United States Patent Application Publication US 2018/0305689 A1 - sequence listing, part 63

SEQ ID NO: 914074 - DNA, 4001 bp, Homo sapiens
gctttggcagcagccacctgcagccaagtcacagctctgccccaacctccccggcagggtcctgctgtgtcttgttcaaaacaaggatttaacaccatgtgccacctctgtgctgggcccaggggaggaagatagagtggaggaagccctcacacaccagtgcctttgagcccatcggagagccaggcaagcagatgaggaatgacaatgacagggtggcaaatgccagggcaggcgtgggtcctacatgccaggcagccacagaggagcaagtactgccctatgcaagagcatccctgaacactccagggcaggggggccactcctgatggagtctgtcaggtggatgaaggcagaaggacattcccaacggtgagagccactcatgtgaagaccagagacaagagcaagcatgtccagatgatgtgggtgtggcctgtggcacctggtggggactggccagcagtgagcctggcatggagaagagccagatcaccaagggagctgtgtgctcagccctgaaacaggactttgttctggattgaaaacttcaaagggtgaaggcacataagccttgcaaactgtaaagtgcatgcagcatccacagaaactacaatccctggcaggattgagtcctgtgccaagccaagcctcagcagcctgccagtttctggcccaggggtcctggatgatttccttcacccacaggtgtaccagtccataggattgactggcacatgactttgcatacaaaacacctgaaatgtaggctaggcccttgcttctcatctgcagttgctacgaccatttggggatggtcattcattgtgtgggacgttccctgatgccctctctccggatgcccagtggggctccagagacaacccacagcatcctcctgccggaggatctggagggagaggcacagtccacagaaggggccctagccaagaactggtgtgccacgcatgccaaggagaaaggaactgcatatctacaccacactctggcccagaaccaatggcaagggtcacaaatatgccgtcgttcaccctaccattgccaaccacgtcggagcacaatctgaagtctcaatggtgtcttcccagaactcgggccttccacaacaagacaaagcaagtcccaactccccgactccaataagggccgctggacagcctctgcagcagcctcgaagccctaaggtcctggccaaaaggcaaaagcacaggctcatgggacctgatgcccacaagacaagggtttcaagcccccagccctcatcaccccagtgcccatcttgaagaagggcacagcctggccctgctaatttttctacctcctgggggactggtggcctacctctctgtgactcccagccacgtacctcgcttggtctttggaggcctgagaccctcgtcctgggccagggcctcccaagtctcccgctccttccagcgcctcagctgctcctcccgcattttgtagaagaggatgtgcttctgcacatcgctgagctcggcaaggagctcggggtcgatgtacatgtcgtgcaggatctgctgcagcatgatgccacctgggatgcacgcaccagaagggcagccagcaggggaagcagggccaggcagaacgcccgaggggctgctctgcactacggactgctcaatccggggccactctcggtgccccttctctgtgcagcattgtcagttggcctcagcttgcagccagcgacgaactcatctcctctacccaggacagcaaaagaggccaggcaacaggacccaaaggggcaggtgggactctgcaagggggagcaaccaccaggagcaatctagtccttctcctgggtcaccaagcacggcatcccaggagagcccatgtcttggcatcacctggggttctgagacaatgggaagggcccaagcctccagctcagccaggaaatgcccagtcccagccctgcctgggctggtaggtgtcgagtgatctgttagtggaaggtaacaatgacaccagctatatcaatgacactgccccggccagctgggaactgatctctcctctgcagataagaggaggagaaggaggcagacttgcctactaaattccatgtcttttcagccaatttcaaacacagaccagaggagcctgccagaagctgctgggcccctcagccctctcagcccctctctctgcgggttccttcgctgccaactttcttcctttccagaacatttggcattctgagatgatgcgtttaaaactctgccttgggggaggaaagatttttcctcctatctgtgttacagccaagaaagaaaacaaaatggaatcagtagagacaactggaggggattttatcttggaattccaggacagaaaggaagcagacatcctttccctttggcctatatataatgagatcctgcagccatgcgtggctgacagataaaccctccaggggccagttttaatggtcgttgttaatcttgtttgttgcagatgcctggagttgaccaaaaagaaagaagatgaaactggctcttctctgtgccctgatcagaagcacactggaatggcgggatgttgccttctgctgggagggaagccaccctctctttggtgtgtgaaggtgggtagaagctgccgttgctgagatctttagggtgaaagctcaccctaaatatgtgctcagagcaaatcacagatgccttcttattgggacaaggatattgaagctcagagaaagtaagtggcttgcctatggcttcctaatggacaagtcactgtattgggactcccccgttttgaaatttgacatccactagcaactatgaatctgttgatggtttgaaaacataacccaaccaagggaaaacaaacgaaccaacaggatttggcactgtggcttggttggattggtgaccttcctgtccccttccttgcccatgagggtggaaggtggatcaggtacccaagagtgatggaagaggggtggagagttggcattcttccccctctgcaaggttaacacaacaggaagatggactaagcagattcagatgagctgtaagcccatagggtcaaagctcctgctcagctaggcaatgtccaggtcacaggagtggagtcagacgccccacccctccccacccaggtccagctagctggtcccagtgtgcccagaccttcctagagccgccacaggactcgcctgtccgctgcagagctgtggccctggactcccatccacccacctcagggcttgcaccgactcccccaccgggagtcctggctcccctcagtttctgagaccgggggtcttccctagcctctgcccagctattctctttctccccctcgccgtggctggtgggagacccccgagtccaaagaggagacaaggggaggaaggcccccagggtctgggctcctgcgggcagcttctttttgtctttcccgggccgccagatacctacgaccacaagagggcacggggcagggacaacgctgtagggagcagcaggaatgggccggctggaggcgggcgagaacggtgatggtgccaccctggaggaccgtcgggagagtgaggcagccggactagaatgacccccgctagcgcccattttgtgcgatagaggggatctcgctgggggcggggtgatccctggcactcccaggtcagcggggcaggaggccaagagacaccgaatcgcggggacgtgagcgtcacccagccgcggatggcagcccgggagcgggtgaagtccggtttccgggaagacgtgcttcggggcccgcctatcaattctcctgggcctggcggggtggagggcgggggactcggccaggcctggggcgctccctggcggccgcacggggaggcactcggcttcgcaacctgggtgtgcctggcctgggtgtgcgggaggaccccagaggaccccagaggaccccaggagcaggggtcgcgccgaagagcagagtccgcg

SEQ ID NO: 914075 - DNA, 4001 bp, Homo sapiens
atctcatttaattctcccaacaagtacatactattattatccttacttgaaattgagtaaactgaggctgggggaggtttaaataacttgccaaggtggcacagctagttactggctgcatgccaggctttgagcaagaccgtctaacttcagaaccccagcacgcaatcttgcctttcaatcctgtctgcagtgggccccggttctagtttgttaccagtgtgtcctgcatctgcaaccttgggcaccatcggtgggagctgaaatgtgatgtttcatttaaaatccagagttggaaacgcacctgcctgggtctcagagcagagtgccatctgttgaatgcagtgccaagctcagctgaggactacaaatgagaacccttaaaacttagcctgcaacatttgagaaaaataaaccctgggatatacaaagggacatctgtccacagagcaggttgaccacctggtgacccaagccctccaaaaagagctttcttgtaacagcagcagaaaatgcttgctggaccagatgacacaaaagaaacaactctctaagggtgtcagggactggacccgacaggcacccacctccctgcctagtcaacctgcctccacatttacctcctccccatatgagcccagccgcatttgctcagctgtaaagaaactcaaagttcagagctacactggtgacaaaggcaaaaagagtagcccgaggctgacattgccacaaaccccagtccctttgcaacagtggaagaaaaggcacttcagagatcaatgtacaatccagggcagcaaccagcgcctgttttaactgttaagattaatgctttgagcactggaactgctcctctaaatacccaatttgcaaataacatgcagtcctctgtgcttgggtctcttctatctcaagtacaggagcacagacgctcagaggggtcaaggacaccgtgtttacttcctaaggtgtgagggatgggaagacaggaccggctgagatgaaaggggaactgtcacataggctctggagctgccccagtcaaccttaaccccttctcattaaagtttgggggaggaagggggaggggcggttcctcggagaccacagcaaacattcgcctcctcgtgtctggagatggagcatcacttaagaggaaatgaacccggttaagggtcacgtccagaggagggataaaaggaaaagccacaattctcctcacaccgacggacacaatggctttatgagggaaatcaaagcttagcgcggagggtggaggttgggcaagggggcggcggcttccttctgcccccagccccaggcctaggaaggcagagacagagctggcgtgggaggcagggcgcgaggcttccttctccagggcgagctctgaaagcatctcgggctgtgtgagcgtgagcgcccagggcccctggggagggccgaggagatgcgctttcccgacggggctgctctgtgaggggttgacgaaagctccccccaccatccatcaaaggcggacagatgacttcaccgttgtaacagacaagggcagccacttgccaattccaatgccaaaaaaagaaaccgggggggcgggggtgcgaaggaggaaggacagaagaggcttccctggagatcacagccctgcgaagaaactccacggctgctggctgcccagtgggcgcttagcttcgcgacctcacagctgggaggggcaaggggccatccggggccctcccgggacctcgggccacccccagcagggtcggcgggggctgtactcacgtagtgcttggaggggttcctccgcttctccacgtccaccacggtggcatcctgcacgcagtaggcgagcatcttcccccacaaagcgagtggcgcccccggcggcgtcaccttctcatcccggccgggctccggctccttctccagctgccggggtcccggggccgcccgccaccccggcccggcgcgccgaacgctgcccggactcccggcgcccacaggtccggcccagggacgggggagggtcccggagggcgcgcgggctccgtgcgccccgggggactccccgccggcctgccgcgcgccccttcactcccgcgcggccgccgcgctgcgctcgcccgctcgctctctccgccgcccggtgggtccggcgggaactggcggagcagaggaggggcgggggtgtgtcccgtcggcgaggggacggggcgggggccccggagcctgctgtcagcgtcctggggaggggccggcggctccccttcgccgctctccggctcgggctccggggggatcggcgctggcggaggctgtgggcgcaggaggcggaggcagggcctggcaggcagggaagggaagggagggaggggagagaggggaagcgcgcggggaggggctccgggccgggggaggggctcggggcgacggggagggggctgcagcccggccccagtggcaggggcgggccgacgagcccccacccgagcccagcgcgcagccagcggcctggcgcagcaccgggctagttcgctaggcacaaaaactcagggtggcttcggggggagagggagcggggaaagtgagccccgcgcgcccccatcctggctttccgcctcggagcggatttgtgcctttttgtccccacttttatgtccccctacaacttccacccccagatctctttaatgagaagtagtttattacccggctgttactgcccaggcccccgaggaggagatgggaatggggaaaaggccagctttaaatccttcaagccagagcctctttggacgaaccacctgaccctctgcaggtcataaagggtgaattctccccggaaaagtgatcgattcgttgcctgagtcgtccatcgatctgggcttgtgtaactaccctgtgcatcatttaccaatgacaacgttacagactctgcataacaccactgccttaagcccagggctcccctggggaccctccccaagctggcgacagggaaaggagcatacaatggtgggaaaacccacccggttggaggccagctcaccgtgagccccaggctctggcattctcacccctccctctagtctggaaaacccactttccaagccacttgtccgtggtccctggacttggagcacagttactacttaattcaatgtagcttccccccttctagttcaacatttttttcccattctgctttcaaacatttaaagggtagtgttttcacaactactccagttgttacacaatcacaataaagctttgtgactgtggaccaatgtgaaacatctgaaaagaggacaaataattttgtgacctaattgcattaatactttcttctgcgcgttctctagactgtcagaacccaggcacagatctaaggctttatttattcacatatttgctccatacagagtaacccactattcctccaaccttcctggggaagggcgctaggacaccaaacgatggcacgggacaaagaaaaaaaaagatggatgggcctagggggctcagactgtgagagatcttggcaccaggccagagcttcttggtcagagaagatgacagaaaacctttgtgaatgttggagcaggagtcctgggggaaggtgcacctggtaatgttgctcagctgatgggaaaatgggaggacagggcactacctccatgagcaaggattattccctgaagggatgagaggtagacctggaacgggccctccatattgagctcccgaacttgggagggtgctggccagctccaggtcctctctgatgatggatcaagacagcctgtgagtttgtgaggaagagattcatcatggctctcggataactcgtcttctgtggatggcaaagtcttctggaagtgctaataaaacctgagaagccaccagcgaggggagctggtgtttagctgttgtggggggaagaagaggagggggtttagtttgatttgggtccccttgtgaatcaaagcagtcag

SEQ ID NO: 914076 - DNA, 4001 bp, Homo sapiens
aatattaaaacacccacagaatatcatatctttgaaaagctgcaaaacctaaaaatcagaaagtttatcactcattataagaccaatgctgaaagcaacaaaaatataatctttatttttctcagaataaattgcctttaatacaaaaagaaaacatcctttaaaaagcttcataatcaacttcttatgacaatttttacaaatcttataaaaagggcccacagaggcaatacctttatcaatttttcaaaactgatgtcaatggattactatattccaaatgtttcagaatgtttttccataattaaaaatgccagaactaatttttaattttttactgacatgttcacgcgtttatattccctatttttttctcctactaccagcctttaaaaaacattttctttgttttagtacaagttagctttatgtgaaagactggaatgaaaattagcaaaatggtaacagtgctgcattcactacaggtgacgtttcttctacccttctaaattcttgtgttatttttaataaacatgtaagtactttcaagatgcaaaaaaaaattttttttctatttcttatgacactgctcttttgtaaggctctgatttgtcaaccttttgtggtaaattaggtagaaagtgatgtgaatttaaacatctttcagataaaggtggaaaagtcagagaatgagaaaatgtagttttcatatatctaataaaattgtatcaacagatactttaaacacagcaacaacttgaaaattaggcaaacatcttttcttctttaaatttacttattctccaatgaaagttaaagattaggtttgtgtgggaaagatctaattacatctattttctaactcactttttaagtctatgaaacaatttcaagccatgtactattaacagtgctgaaaatggaataaagtaaaccataaaaaagttgtaatttagaaataagctgtttttaggcaagtatcaggcattttttgatatgagaaagcactcaaaattatttagcataacaaatactacaaataataataatccaaggcctcttaccaatttcagcaggtagttgtttaattttgttctctcgaatgctaagcatgctgagttttgacaagtttttgatgtccttttccacagtagttatacgattaaagcgaaggtaaagagtggtgagagaatccagcctatacaccactgaaggaatttctctcagtttattatgccgtaaatcaagcatccgcagcttcttcaagttatcaagagagtcaggcaaactggtaagtgaattttcacttagagccagtgtcatgagatttactaaacatcccacctctgctgggagggactgcaatttgttactgtataaataaagttctgttaattgagtcaactctttgattgatgatggcaatatgtgtatagatctcttggataagtccaaacgcattgaattctcttcccggcatttgttgagctctttaatcacctctgcattgctggatttttttctagtcccaggtgctgggtttggccgtttgatcgtattgtcaactgaaaatgccacccctggttgggcagcactggagtccttctttccatctttggcatctttccctttggtcttaggttctttttctttgctctctttcccaaaacctccagaggcttttgcctccttttctctttccttggctgatggtactttgggatctttttctttagagtctttttcttttcctaaactactactcatggtgactcaagcctggacaaaaactacatgaactccttttattttccagtaattgaattcaaagatgaagagacaaagatcctacacaatcaaaaaagtactggcttgaagaagtaatcagcatggagtaacatccatctgttacatgttggatctaaaagcactatgcccatttctgatcattcattccaactggtaaaatagtgctggtcaatcaatgattcattagagttcctgaaatataatatagacagtattaaattactttagataatttatattaaataggctctgaaaaacaatcttattagagtttgccattttcctatgatttcattctcaaatatttatgaacatcctttataggtaaaaatccatttaaaactacacagcttaataaggctggctctaccttcaagaaacttgcaatctaataggaagatgtatgaatgtaagttactttactagaaaattttataagacctaaaaagtggaagaaaccacaacaataagcttaatatttattaagtgctttctatgtactagcattattctgaggaattcacatgtattaatataacacatacaacagccctatgagatacattgttatccccattttatacaaagaaacactaaagcacagaaatatttttaagtaactaactctgagatcttggaaacatgatggagccaatattccaaattaggtagtatgtgctcacagcctatgttcctaacccactacactaaaacagttctagctacaattaattggcggatagctttagataacagaaaggatttcagtggtggtgacgatagaagagagagcagtctggcaaaagaaaaaaaaagaacaaagtgaaatatgtatgaaaaacagcacagttcagggaaaggggcattaataatctgtactttaataagcactctacatgattctgatggaggtagacctgaggatcacctttgaaaaccagtgacaaagggcaatgtccaatgatgtgtatattctagggactgaaaaagaaagatcaatggcacagggttcttaaaagcagaaaaagtctgctggtaaaatgacaggccgaaaagattggcaaaggacaaaaagattagtaaaatatttatggaaggaatcagtcctccctaaacattttgaaatttaaaattagtaattcttattttatgactctattgttaactctatttaactaactggtaattatttggtactagggattaaagataaaataacttcttacctgactagcttaagaggttaaaacagttattagaattttgtcagactaccaaaaggatgtgataatgttaagtgctaaggattctgctaataatttatttttataggatgtgaacctctctgtatacaagcttgtagtttaattagacagccaaaacactcacatataacaagtaattgataagacagcatattattaaatcctcaggcaagtggcatatgctatagcacttttgagaaaatttgtaacagtgagaatggttgagaaaagcatacaggacttaggctaactagtcctggattaatgggttgtgttcaagcaagtaaaggagagatggcaaagcattacaggtgggtggcatgaaaaagaaagttttgcctagaatagggagtggagcttagtttgcacgggacactgaaaatgtgtcactttgctgaagcaaatggtcaaatgtgcagaaataacaggaactggggtagaggatgaataatctgtaaatttgaaactgcacagtatgaactttactggtatataagattctacaattaaacaaatacatcattatttgctagcacaccaggagagctctatctattactattcaaccctttcaaaaaaaaagaaaaaaattattttgcactgcgatggagagagactaagaaaaactctagagatactgattcagaaaataatgctgataagccaatatgaaagtacatttactaaaaccatacaactgaataatgggaaatatgcatagctaaagggttacaggcattgcttatcaatttgtatttaagaaatgtcattatatcaagtttctggaaatcaaatttctatttagcaagatatgtataccctaaatttagaaggacacctcctatataaggatcaaatgaaatatataaggtgtaaaatcacatatattaagtacagaggatagaacaagattacccctattaaaag

SEQ ID NO: 914077 - DNA, 4001 bp, Homo sapiens
taaaaataaaactgaacaagcaccttgggaaaatgcagtacccttaaagacatgtccataatttgaaactgggatttcaatattgttttatatgttggctttatattaaatttcagacatttgaaagttacaaaccttagacaaaacttttattcagttttgtgtttatttttgtctatttttcaaatgtgtatttataattacataaaaagtttacaatatactttatgtccaaataaagacaaaaggcttatcatactcagtctaagttccatatgtggcgaatggtcatttgcatactttattcctaaaattcttttcactgtcacacagcaaaacatcaacacttgataaattcaaattataaatataaccttactgaatgttacaaattggatgcaatagctaagtctcttcaagtacacagtaacagttctacagtccacagcatggaggatgagggtaaagattagtaagtacactaataaattgaggtctttaaaattaaaactatttttcagtggtgttgctgcatttagttacaaaaacacttggttacacaaatgtaccttaggattctgaaaaccgtaacaaaaagcttttgatatagtagtccctcttgagtagaaactagacgcactcggtatctaagaaaagtatacgaaatggcacaggtgtaagcctagacactgctggtagttatcacgctggaggcaaatactatacagtccacatctgcaacctaattttgcttcagcatccccagagacttcgaaaatatttctttgggtaggttgcaaaacagtgcttcctcttttattctcatcacccccattacgatacaaagcaacagacaagaaaaatcaaactgccaactgtaagggcttaaacacacacacaaagcatcttctttctagctcccgaatcggtatttattccacctgtttgtaaatccataattccacaataacacaaactgcctgcttaaagaaaggaaggaagaaaagaaaaagaaagaaaagaaataaagagaaaggcaagttaatgctttggagtcattactcttccacctaggcatggggggagggggatggtacaaaaacaatggatattgaggtgctgggggaaaaatcgtcttgccccaaagcctcttgtgttatgagcctggggaagtcggggaagagtgagactacttttcctctctccctaaaagctgtgctatcacggggagaggttgccatcgggcatgttctacgaggcggtctcgaagggctacaactcgcttcgctaggcaacacacccagagccgatccagcactcttcactcaagggtttttagggagaggagaacgggagagcaaggtggactccagggagggggcgagaagagaccccaccctgtatgaccgccgctgcgcccgggccctcgccaacgatttacacgactcggggcgccctgcggactgggcccgggggcccagggagccgagaggagagagactgtccgccgggggcccccggcccgcgccctcgcgccggctcgccgtcgcccaggcgctgtccgggccgcccgccgccgccgccgcaggcccggccccggccgctgtcacacccgaccgccttcctctccgcgccgggctgcaggctcccacgcgagccggctccaagggccccgcactcccggagacagcaaccaggaaagcggcggcggcggcgcctcccagggccccggcccctcgggcctcgccccggcgctgccggctcgcgcctgtcagggcgcacggggcctccccctaccgacagccagcccgactgcccgacggacaggaaggcaggcaggaagaaccgaccaacagacaccctccgcctcatcggccccgagttaccgtcaggagccccgactccgccatcctcctcgctcgccctccttcctcctcttcctcctcctcctaagaagcgacgctgcccaaccgccgccccccgcccgcccctcccccactcgccccgccccgcccgccccgccactactctcgctccagcctccccgccccacccctctgccgtgggcccgtcactcgctaggcaagaaaaatgggcggaaccggggcaagagaagctgcccaatcagagacgggcagtgccgccagcttctctctctccgcccttgtcctttcctcagttcctctacgccgtctcccgcccactgggcgcctctggctagccgggctacagagtaagcctccagcagggtagagtgacaactccccgatcggaagttactgttgaagctaaggcggccataactgataatggcaaaaggagattcctggcttcctgtttccagggtgacgtagatttttttccttcgccagtctcaccgttacccggggcaacagctgagccgtctgggaagggatgcatctgtaagtaagcccaaagaggtaccgtgggtgaccacacatcccatgttagacaagttaattcatactccggattacacgtccagtttcctggcccttattttactgagacgtctggtcacttacggagatggacaacagtttagggctccgaaattccctctcctgcccggaagttgcatttggcacttccgaattgggtcatggcggaagggtgttaatagcctggccgcccgtgccccagggaatgcttatttttgaccttagttgcaaagtgaggtgagtccgtggaccccaaccagtgggccggacccgggccggacggtccctgtgggacagagcgctgaaatggcgagcggggctcagggccgcttccgttggaaggcggtttttttccgggctggcctggcggcggcccgcccccgtgaggctccctgtggggtgaggccgctctacaggccgccctaacccagccagaggcagcccggccgggaggaccccagcggggaatgggcggggacctcggggcggagctcctaactccggcaaaacggagctcttgaccacgcctccgcaagttcctattaagtactttcactccttggcctttggagggaggagaattcgggaacttcagaaaatcattttccaccttcacctataaaaggaaaagatgagcccctaccaccagggcaggacctcaatctttttcccctgccacctgccttcccattctgatttttcccccctttccgcgtctctcctttgagtctttgtaagctttgactgcggttctggtggtgggattcctgcaggtctacagtttcttaaacaacgtgttgaagatttttgaaaatactgtattgcttttatatggccctttacaaagttatcatacattatcttgtagtttcttctgtatgcttgagtcaagaactctaagtcatcttggtaataccgggttggatgcttaaagctgcagcaaaaagaccagaactttcaggtaaaattgaaaatggttaatatccagccagtcaacaatacagatgcaaacctaccttctcgacttaatttctgcttccttagtacttacacgccagccaaaatgaactactcttgtttctttgctgttaattactgaaatctgttgtagcagtcaccttttgtgattctgtatctgattctgttacccgtggagatgtgtttccagattcttcccagcaggaagtaatttcctctgagtttagcattttttgtacatcttttatgacaatcagtatgttatatatatataatagcgcttatgtttttagcttcactaccatgtctgcacctaaatagaatggtttgtatcagattcgtcttcccgtcattttcaccatgcacatgatattattttggtaaatacttactgaaagtttgaatatatcgggtgtctcttggatgcccaagacacttccagccaagttttagagaccttcaatttatcagaaattcagctgagcgcctgctactcaatctttgttttacgtttcccctgtgaagtctttctgacatgatttttttccccagtgttttatt

SEQ ID NO: 914078 - DNA, 4001 bp, Homo sapiens
cagaaaagatagccgggagcggtggctcacgcctctaattccagagctttgggaggccgaggcaggcggatcacctgaggttgagaattcgagaccagcctgaccaacatggagaaatctcgtctctactaataatacaaaaattagccgggcatggtggcgcatgcctgtaatcccaactactcaggaggctgaggcacgagaatggcttgaacccgggaagcggaggttgcggtgagccgagatcacgccattgcactccagcttgggtaacaagagcgaaactccaccttttaaaaaaaaagaaaaggaaaaaaaaaaagaaaagataataatctagctagaatgtatcatacaatcacaaacaatagcgttcgtgaaacgtgtaataaatggacatttacataaaaacgtcattcaaatataaccttggcaatgcgcacgttaaacttacacaatactacaagtacctctgcattgtttcctctattaaataaacagtattaataacacaattattattaggtaaataataaattagtactcaactgtgttgcttgaaatcagggtctctttactaaatcagtccctaaaaacacatattacttttttttttttttttttttgagacggggtctcactctgttgcccaccctggagtgcagtggcaggatcacagctcactgcaacctcgaactctagtacctgggactaaaggtgtgcgacaccacgtcccgctttttttacttttagtagagaggaggtctcgctatgttgcccaggctggcctgaaactcctaggctcaagagatcctcccgctttggcctcccaaagtgctaggattacacgaaagagccaccgcgcccggcctgacccaaatattgataaagatgaacacctatcaaggatagaaactcctcagatcaaaaataagaaacctgaccgggcgcggtggctcacgcctgtaatcccagcactttgggcggccgaggcggacggatcacgaagtcaagaaatcaagaccatcctggccaacatggtgaaaccccgtctctgctaaaaacacaaaaattagctgggcgtggtggcgggtgtctgtagtcccagctactcggcaggctgaaggagaatcggttgaacgcgggaggcggaggttgcactgagccgagatcgcgccactgcactccagcctagcgacagagcgagactccgtctcaaaaaaaaaaaaaaaaaaaaaaagaaaccttcaagaacatgacaactgcaacatatctgcttcattatgctagaagtgttaagtttgtgtctcaatactacatacatacaaaaaaagcatgtttagcccaaacaccattaccgcacaagagcaagattagaataaaagtaatatgaacagctctaaaagtactctctctcccatacccactcctaactgcattacagaatggtaatgtcttcaggaacagccacgttctttaaattttgcaagctgtgactatagaaacagctttcctctttcaaaaattgtaatttcagtcataaaaatatagaccaaaaaaagcaaactgcacaggtgtcaagtttgcaaaaagcaattgaaaacgcagaccaacgggacagccaaaaagttgcagacttaagtgtgctggggggtagaggagaaaagcaatgaaaataaaaaataaagaaaaagaaaaaaaaagctctaacaaaagcaatatgctaaaagagtaagagggggagagaaacttattttaaagcgactgcgagagtctcccgacctggctgctgcggaaagaacaaggccgcccaggcgggccacggacggaggaaaagagcgaatccactggcagctcgcgcagtaggaaccgcagccccggaggagcgcggctgaacggagggccggggtggggaggggaacgccgcggagcctgccccgagcccccagccgccctcaacctcaggccagtaggagcccggggagagggaggaggagatgcgcagttccggccgcccgcaccctgcgcacctcggtacccaatcgccgccgccgccgcctcttcctcctcctcgccctcgtcgtcgtcgtcttcgtcgtacaagttgtcggccagcggtggctcccgagatgggccctgcaggcccggcccattgtctccttccccagccgccgcagtcgcctgggcctcttgctccccgcctgccgccgccgcctctgcctccgcctcccgccacagcgccgccgccgccgcacccgggcagcccctggccgccgccggcacctcacgctctggggccgccccaccgggctcgcccgggctccgctcgaggccgggaccatctctccgcggcctcttgcggagcggctccccggcgggggacgacgcggcctccctgtcggcccccgccgccgagggggagccgccgggctgaagggcgagggccgcctcgtccgccatcttccaactgcctctctggccctcctccctcgcctcctctgctcccgctcgacgcgcggcactggcgcccccgcggctccggctgcgggagatttaaaccccatcacgtgacccgccccatcgccgcccccgccctctcggcgctcccgccacccacgcgggccagaccacaacactacgggtcacgtggcgggcggaggctgttgcgtctaccgctccgcctgggctggaagcgcactcggccccggcggccggcggcccttcctctttgtggcgagcgtgtagtgcagccaaattcgcccctcggccgctttctcaacttctctttcaaactgacctcaaatcactaccgccggaacagctcaagttttggtccgccctgggaatttccacgtcttcctgaagtgtacacctggcctgccttagccttgtctatatttagctaagggttaaaacacagctgaagctggctaagacttagctccctgaaatacgttggatagtcgttctgttttgttaataagtaggaagagaggcaaaaggaggcggctcctttcccactctcctcacaccgttctgacagctcctcttttgctcctttttctgctccttgcttttctccttagtcggttgcttttttcccctctctcccatcacttgtagggtggtatacattgtaaaatccttgaaggcatatgtcctcctgggaagacctttgacgtggaggtttggagatcagccgatctactttctggccccagcttggcttcaaacgtgtgtgaattccctcctccgggcctcagttttctcacgtgcagaatgggtttgttgggtcagtatgagagcatgggaaggaaatgacttggcctccatgcacatctgcccttggttaaaatttggagtccttcctttctagcgtgagctatctagccgtttctaaacttaatttttctcatgtcttaaatggtaataagtattttaaaacgtcatagatttaaatgagataaccagatgtaaaacgaggggtacctagtagttcaaaaggcttagtggaaagcccttccactttcctctctccctgaaattctggcacactgtgactccatatctaatcttaactaaggacccatataacccatggtagatctagagccagtgtttgttatggcatctgcctggagcacagcgtttctatctgtttaaaggacctctacgagtttatggtacactgtcccttaagcctagtatgggttctggccatactgcatcaattacctgcgtgactttaggcaaccaacttaaagctgtttcttcatccttaaaataaaaaataaaaagctggaaatatatcgctaaggtcctatctacatccaaaagtcttatttcatctggtcaccactattcatttctgaaagtaatcatctccagtcctagaagccttaaaaccatctttggttgcgtgggggtcaaggggagggagagcattaggacaaatagctaatgcatgcgggacttaaaacctggctgggcgcggtggctgc

SEQ ID NO: 914079 - DNA, 4001 bp, Homo sapiens
caattattattaggtaaataataaattagtactcaactgtgttgcttgaaatcagggtctctttactaaatcagtccctaaaaacacatattacttttttttttttttttttttgagacggggtctcactctgttgcccaccctggagtgcagtggcaggatcacagctcactgcaacctcgaactctagtacctgggactaaaggtgtgcgacaccacgtcccgctttttttacttttagtagagaggaggtctcgctatgttgcccaggctggcctgaaactcctaggctcaagagatcctcccgctttggcctcccaaagtgctaggattacacgaaagagccaccgcgcccggcctgacccaaatattgataaagatgaacacctatcaaggatagaaactcctcagatcaaaaataagaaacctgaccgggcgcggtggctcacgcctgtaatcccagcactttgggcggccgaggcggacggatcacgaagtcaagaaatcaagaccatcctggccaacatggtgaaaccccgtctctgctaaaaacacaaaaattagctgggcgtggtggcgggtgtctgtagtcccagctactcggcaggctgaaggagaatcggttgaacgcgggaggcggaggttgcactgagccgagatcgcgccactgcactccagcctagcgacagagcgagactccgtctcaaaaaaaaaaaaaaaaaaaaaaagaaaccttcaagaacatgacaactgcaacatatctgcttcattatgctagaagtgttaagtttgtgtctcaatactacatacatacaaaaaaagcatgtttagcccaaacaccattaccgcacaagagcaagattagaataaaagtaatatgaacagctctaaaagtactctctctcccatacccactcctaactgcattacagaatggtaatgtcttcaggaacagccacgttctttaaattttgcaagctgtgactatagaaacagctttcctctttcaaaaattgtaatttcagtcataaaaatatagaccaaaaaaagcaaactgcacaggtgtcaagtttgcaaaaagcaattgaaaacgcagaccaacgggacagccaaaaagttgcagacttaagtgtgctggggggtagaggagaaaagcaatgaaaataaaaaataaagaaaaagaaaaaaaaagctctaacaaaagcaatatgctaaaagagtaagagggggagagaaacttattttaaagcgactgcgagagtctcccgacctggctgctgcggaaagaacaaggccgcccaggcgggccacggacggaggaaaagagcgaatccactggcagctcgcgcagtaggaaccgcagccccggaggagcgcggctgaacggagggccggggtggggaggggaacgccgcggagcctgccccgagcccccagccgccctcaacctcaggccagtaggagcccggggagagggaggaggagatgcgcagttccggccgcccgcaccctgcgcacctcggtacccaatcgccgccgccgccgcctcttcctcctcctcgccctcgtcgtcgtcgtcttcgtcgtacaagttgtcggccagcggtggctcccgagatgggccctgcaggcccggcccattgtctccttccccagccgccgcagtcgcctgggcctcttgctccccgcctgccgccgccgcctctgcctccgcctcccgccacagcgccgccgccgccgcacccgggcagcccctggccgccgccggcacctcacgctctggggccgccccaccgggctcgcccgggctccgctcgaggccgggaccatctctccgcggcctcttgcggagcggctccccggcgggggacgacgcggcctccctgtcggcccccgccgccgagggggagccgccgggctgaagggcgagggccgcctcgtccgccatcttccaactgcctctctggccctcctccctcgcctcctctgctcccgctcgacgcgcggcactggcgcccccgcggctccggctgcgggagatttaaaccccatcacgtgacccgccccatcgccgcccccgccctctcggcgctcccgccacccacgcgggccagaccacaacactacgggtcacgtggcgggcggaggctgttgcgtctaccgctccgcctgggctggaagcgcactcggccccggcggccggcggcccttcctctttgtggcgagcgtgtagtgcagccaaattcgcccctcggccgctttctcaacttctctttcaaactgacctcaaatcactaccgccggaacagctcaagttttggtccgccctgggaatttccacgtcttcctgaagtgtacacctggcctgccttagccttgtctatatttagctaagggttaaaacacagctgaagctggctaagacttagctccctgaaatacgttggatagtcgttctgttttgttaataagtaggaagagaggcaaaaggaggcggctcctttcccactctcctcacaccgttctgacagctcctcttttgctcctttttctgctccttgcttttctccttagtcggttgcttttttcccctctctcccatcacttgtagggtggtatacattgtaaaatccttgaaggcatatgtcctcctgggaagacctttgacgtggaggtttggagatcagccgatctactttctggccccagcttggcttcaaacgtgtgtgaattccctcctccgggcctcagttttctcacgtgcagaatgggtttgttgggtcagtatgagagcatgggaaggaaatgacttggcctccatgcacatctgcccttggttaaaatttggagtccttcctttctagcgtgagctatctagccgtttctaaacttaatttttctcatgtcttaaatggtaataagtattttaaaacgtcatagatttaaatgagataaccagatgtaaaacgaggggtacctagtagttcaaaaggcttagtggaaagcccttccactttcctctctccctgaaattctggcacactgtgactccatatctaatcttaactaaggacccatataacccatggtagatctagagccagtgtttgttatggcatctgcctggagcacagcgtttctatctgtttaaaggacctctacgagtttatggtacactgtcccttaagcctagtatgggttctggccatactgcatcaattacctgcgtgactttaggcaaccaacttaaagctgtttcttcatccttaaaataaaaaataaaaagctggaaatatatcgctaaggtcctatctacatccaaaagtcttatttcatctggtcaccactattcatttctgaaagtaatcatctccagtcctagaagccttaaaaccatctttggttgcgtgggggtcaaggggagggagagcattaggacaaatagctaatgcatgcgggacttaaaacctggctgggcgcggtggctgctgcctgtaatcccagcactttgggaggccgaggcggacagatcacctgaagtcggaagttcgagaccagcctgaccaacatggagaaaccccgtctctactaaaaatacaaaattagccgggcgtggtggcacatgcctgtaatcccagctactcagaaggctgaggcaggagaatcgcttgaacccagcaggcagaggttgcggtgagccgagatcgcaccattgcacaccagcctgggcagcaagagcgaaactccgtctcaaaaaaaaatataaataaaacctagatgaggggttgattggtgcagcaaaccaccatggctcacctataagtatgtaacaaacctacacattctgcacctgtatcctggaacttaaattaaaaaaaaaatctttgaagcgttccttcataccaatccctctgaaatccatctgaccaatcaatgaccaaatcctgttgtccttcctttcttgctacactcctcccaattcctgactaggcaccacactc

SEQ ID NO: 914080 - DNA, 4001 bp, Homo sapiens
ctatgggctgctcagccatactgaaatcctgagccaccacgaggggagagaggagagacaagacatgaggagcctgatggtctctggaaagggaatcctcttctggttctgttcccctggcttcagcccaaatccttctgggagcactggagccaatcactgtctttcactgctgcagctactgggaacctacaaaaaagcgggagataaaaaaaaaaaaaaaaaaatcacaagttcgaatttatggatacacaagtatcatttcatattcatgacatcagcaaatcacatcataatcagatttgagcaaggtttggacactaagacccaaaagactggacactcaacactgacagtatcacatattaaccagaaaattcgcttttttgttatggaatcatagggtgaaaattaagtcttttaactttgaaaagcttacttttcacttctgaggccaatttttacactaataaatttcaagtaaacgtctcttttaaagttgttccacaacattttaattcaaacttctatttcctttctcagttggggtagtgttttgtttgtgttttaaaaaaacacatggcacaacaaacgttatggaaaacgcactcattccgttaaatgccgatacaaacctgccttttactacatctgtctaagcagcgcattgctaagtataaacttaaaaaaatttttttttctcaaagacatatctattatttcttggcaaatactatttggtgatgtggtgcaaaaacacaatggtaaaaaatttcggggtatttgtaagttttctggagagttgcaggcccctttccttttgaaagtttagagctccaataccctcaattctactggcagaattaggatggacttagagggtcctaaacgtgaccgattcactaaggcgggggggggggggggctacagcttgcagcaacgtgctctgcaacttaatcctacgctaaaagagggcagagagcgaaaaagaatggaatacaaactctcccgacatccgtagttactttcaaggtggattgtgtattttaaggctgatgggaacgtctggtttgtggagcaaaaagaagagaaggtaagtgtttgtccttgtatccaccagttcgtagagaaacaatgaaagaacaaagggaaccacttccccatctgaacattttctgtatctccctccgtttcaagccaaaaagcttgggaagggattcgctttactctaccttaagtagtggttgctggcttgttgaactaagaatgagaaaaaagttgagaggcagatatagactaaataataataaaaaaggcttgctgtggcggatctccaccgcgccagtgtcagcaacttgcagcagaagttgctcaatgcacggaggcaaagcccaagaaataccctttgcacaccagatttcgaactcagtcatttaaatagactttcttgctgtttgaaggggtttctgcgcacaaaatgtgtaggtagtggctatgggagagatgtactatttaggtcgaaaaatgatctcatggctatctggaaaagaatttttaaaaaggaaaggggattcaagtatcacgttactgtttgctaatagaagaaatggcagcactggctgggaaaggagagggattcgtattgaaatgcatttgctttggggtacgctggttatccgcaagtctggctttgtgggtctgcgtggctgaataagtgaccaagtgccttcggcattatataaacggatcgatgtgtgcgggagtccccaaagccgtcgagcacgtgaaacgcgactttttactgccctccaagcggcgaccaagccccgctccaccccaccccgcctcaaaatccgtatattacctgccctgttacagtgacacatgtttatgtttatagtcctggtttgtagtagtgtcaagaaccgcagcaagaggaaggggaggagagaggagagggaggagtaaattcaaccacccccacttgttgttaaagcaaatttactgcgttattgcaagctcaggacggggggctgggatgagagttgagaggaagggttgagttgggaagtgtgttggcggtggaaggtgggggtggggttaagagctccgcaatggagctcctctccccagcagcccaggaaaagcagctcggtcaataggggagcatgctggcgcggtcgaaaacaaaaaggttcctcctgctcgctgcgttcacgtggggggctctgcacgcggggctccagggccgtgacccctgaccccggctcctctccgcgctctccggtgccgcgcggccactttttacccaggatccctcgcgcgggccgcgctcgtgccgagctggagtccttcctaatcctccattcccggctctcgctccccgcccccgccgccagccccgggggaggattctccggcggggaacccccgccccacccccaccccgactgccccggcggagtcggccgcagcgagtccgcgcggggcggggagggccgggccgggcctcccctaccgcgccgggcctgcgagggaggggagggacggggagccgaggggagggggcgccggcctcccggctcagctgccccactgaggcctggacctgttgactgcgattggcccgcctcatcccgcgccctctctctgctcgcagcggccccagcccttccgcggcgtcgcggggaggaaatggggatggctgtcctcctctccgcctccttctaactttcctttttttatttgggtgtgttggggggggtgctgagaaagcccaggcaactccaccgccgccccatcctgcctccgaaagtctcgtcacgcccgacccgccgccgccctcccagcccccatgacttaaaaccgcctcccctcctcgcagcggcgccccggcccggagcccgagagccctcgacgcccccgccgcgcctcccccgcctggcctggcccagcggcgtccccagcgaattgtgtcgcttttctgccctggaagctccctcggccacgttccactttttttcccagtcccaggaggcgtaagataaaacctctgatttgctgcgtgctgccgggcacattctctgccctctcgtccgaaggacgagtttaaaatggagagtttaaaataatagcatttacaggaggaaataaagagcgaggagatggttctttggccggttttaagacatacatgctttttttttcttttaatacaagatgtcttaagggttaaaagcgttctagggtttgctgtatttccttctagatttggggtttcctgaggaaatcttttccggagggaaatagcaaatcaacattaagatggaagcgagacttctcagccacttttggaaatgaagggggaaattgtaaaaatacattcagaaaagggcgcgaaggcggcggctgaggggaagaagctggagtcttgggaggaagcgcagtgggttggaatcgggggaaggagggcccgctaggtccgggcggggaagaaggcgtgcgggcggcggggcgtgcgccgggccgggcagctggaggaaggcgcggcgggactggcgagcgcgaagaggcaggcggggaaggcctcggggggcgggggccgggcgcggggccggcgcgccggaggaagcgggacctggctcctcgcgcccgccgggccgcccccattgttctgccctagcaccgctgttagccgagcacgtcctgaccgagggaggggccccgcgggccaacccgacccccgtcggcgcctccccgggctcctgagctccggccgggtcgggtcgggccggcgcggcaagttttgatggtcagactcagccagcgaggggttcccagctgaagacctcggaggaaggagcctttacagcgtgctgcgaaattgaaggaagccgggcgagcctgcaacgcacacgttatgagaaaaagggaaagcaacatagatatgtttataaagtgataaatagataagagacacccgtgggcagttattattctgg

SEQ ID NO: 914081 - DNA, 4001 bp, Homo sapiens
caacactataattcatgtttttacttctgatcgatcattaccatagagggtgctgagaatcagaaaagactccaaggaaagatgggggtagagttactcccatctatttggactaattttcttcttctgggcattcacctgagaagtatctgtatatccataatataaaaataatttaaaatattacttaaaattaaaggtttgcacctttaaaaattgtgccacaaaagcaatttgattaaatcaacctctcatctatttcagaatcccatcagttaaaaaaaaaaaacataaaaaataagaacaggaaaatgatgtgattaggtgatgctagtcatattatttttgctcaaaatgcctagaggcaatatgccttggaaaactgagttaggtgggaatgagaagatctggattctagtgttgattccatcaccagttaacagtatgaattcagccaatccttgccaatctggatctgagcttcctgggctgtaacgtgaagagtttgaatttagtagatggtctccaaagcctttcagtttcaaagtttctctaaaccctgtaattataagtgactaaatccagttcacctaattactaccactactcttttacatccttcatttcttcagcaaacatccggtcaccttgggggcgcagggggtggaggatgtcaaacaccattagccacagtttggcacgacatttatggagggggagcgacaaacaatgcaagggcagctagctgatgattttaactgttagcgagcttacacctgtggagcgaatgtgtttctgaatttgaaaggccggaagattttccccctgggctaagctggtgacgccgcgggagtgcctagctctgagcaaagaaccaggtaggatgaactaattagaggctcttcaaaaggagagtgtttaaccagtttcctggcaggactcacctgactagacatttttaaaaattatggccaggcacggtggctcacgcctgtaatcccatcactttgggaggctaaagcgggcagatcgcttgagcccaggagctcgagagcaaaccggccaatatgtcgaaatcctgtatctgcaaaaaaaaaaaaaaaaaaaaaaaaaaatccaaaaattagccgggcgtggtggcgcgcacctttagtcccagctactccagatgctggggagggaggatcgttggagccggggaggcggaggttgcaatgagctgagatcgcgccactgcactccagcctgggcgacagagcgagaccttgtctctaaataaataaatagtataagaggtttagaatgctgatgtgtgaaaacggaagactaaccaaatagccccaggacttactgaaattgtgcttcaaaattttgttacgaacgcttttccgagtccacaatacaggtatcactggtttatttgtggacaagaagcaactgagaaattgagttcaatccactgaaagccggtgtgtttttaatatagcacacacgggaaataaatattattgtctgaggtgggggacggggagagatttttaaaatgtactataaacataaaatccagaagaaagatggtctctattccaccgagaagtctgcatttgaaaaccacaagagatggagatcaaagccgctcgttctccagccacctgcccaaaaactcggccgcagcgcagacccaacccagacagggcaagtgagcacgtgtctccctcccaacccaagctgcgcgccgacgcacccaagttagggtcccaggctcccggcgcgggatgggcgctagggcagcggagaatggagggtccccgtcctcctccagctccaacgacagcgccagcgccccgccgtcccgccgcccttccttgaaggatgcccgtgtcacctgagccaccgcgccctctgcacaaccgtgtcagggagagggaagagggggagccgaggaagcttcttggccagggcgctggggatccgggagcgggggccgccggcgagactgagcccgggacagcccagagctccagcgctccagcgctctgcagcccgcccagagcgcgcagaccacccccatgccccgcccgccctcctgccacacccgcccccagcccggccccgccgcctcctcacctcgccgggaccactgcagccctggcggtagcgcgcggacatgcccccggggcgcacccgccgagccgcgtccctgcgcagtggccccttcccgggccccaggctgcgcgatccgcgcttcggtggggcggggagcggactgggcggaggcgccggcgaggctggggccgggggcctagctggcaacgccgggagagggaagcgtagcgcggaaaatcccagtgctcggccttcgaaatgcaccggctcattcagccccgccagctccgccggggactctgcctggccggcaaagaggatttagcgcggggatccgctctaagtactgtggcttggctaggggcgaggggcgcagcggaggagggacgtctcgcggttatgtaatgcaccggctttctgtgtccccagccaaaccgctctaggactgccggaccctccccgggaagagccatgacccctgacctcggcaagccgaggggagctcggtgttcccaaaaagaacttttcccctcagggtcaaagagcaagatctcgagaaaaaatacaaggcctcctttaggtgtatctggcagggatccggaccctgctagccaatccttcccatttcacagcacaggaaactgaagctccagaatgctagtgaaaagcgttatctcttggagtcaaaaggacctgggttcaacgcatctgaaaatctcataaccttgggcaatttaactctctgagcctcacttttgcttgtaaaacaaaggatgatagcgcccacttcatgttgttgctgcgagtatgaaatgagtgaggtgtaggcgcccggtacataatacaattccccaaacgttgactcaaagcctgaaaagggagctgccaggacgtaccccacgtaggacaggttccaggcgaactttctgtaaagtcctctccttgtcagaagcaaggcctctgaactgacaaggtctggttccaatatcttggagcctacgtcctcacttcttcaagagtggcccgtagaccaacagcgaggtcatcacctgggtgcttgttaaaaatgcggaatctcaggcccaaccgcggatcagaatctgcattttttgcaagattccctggtgatttcgctgtatgtcaaaatttcaaaatgaattaggctttttggaattattattattattatttttgagaagcagtctcgctctgtcgcccaggctggagtgcagtggtgcgattttggctcactgcaacctccgcctccctagttcaaacgattctcctgcctcagcttccggagtagctgggattacgggcgcgtgccaccacgcccagctaattttttgtatctttggtagagacgggatttcaccatgttggccaggctgatctcgaactcctgacctcatgatctgcccgacaaagagttactgatgaacagtagggagcatttgccacgcagcaaggcaccgtaggtatgttttttttttttttttttttgggaaggagtctcgttttgtttgttttctaaagaagggatttcactatgtcgctaaggctagagtgctgtggtgcgatcatagctcattgcagtctcgaactcctaggctcaagggatcctcctgcctcagcctccccaagcactgggattacaggcttgagccactgtgcaagccaggggtttttttaaatagtctagtatagtcctttctcattttaccctctggctatttttagtcatccccctcctctcagtttcctgccctttaactataaatctgaatttaagtcctattttcacttgcaaaaaaccctaggttagatttaagtgatgattagtgaataaatgttcaaaactcacaaaagaaagaacaaatacagcttgtaaaaga

SEQ ID NO: 914082 - DNA, 4001 bp, Homo sapiens
ttcagactcaaagtcagaagccagaaaagatttcctaatgtcttgatctacctccccatatctttggctcctcccaatgctcttcctatggatatgaaggatacctgttattccacttgcctacacaaaaaatggaagaaaccagtagggatgttattagggggtcggtggtgctgaaagtctgagttgttgcaaaattgcaggttaaattattttatctaattcctacttgcgaggacttttttttgatggtggagggagagcgggactggtttctggcaatgatatgggtactaaccatgttttctgcatttacatatttattattaattattgcaacagataatagaaaatgactttactctgcatttggtccaggaaagtggaagggttttcctattagaagttttaaaagaagctataatcatgcaacaaataatcatcctttctcttcggaatcttctctagcttcctcagccctctgcctaaacctgcctgaagaatttctcgaagctgaagccaactcaaatataagaaactgttagggcataccgatttacagaatttgatggaacaacggaaaatcctgggtgcagggaatgggagaatccaccttcaatatgaactgttattcagttaattcaagatttttaaaaaacacatcaaaactgtagcctagaaaattgaccaaaaatgttatatcgaataacttactatataagtaatatatttagcgtaaatcctgactaaacttcggggatagtttgtgttggatagactaggcacccagaaaacaaggtaaagcattgatttgcttttgacagccaagtttgttcgtggttatcagctctctggaaagcctctgggcgctgctgaagccagagcaggttacctagggcgaaccaaagatggggcattaagcaccaagtcctcccaagtgctggctgagggtccaggtgggcgcggtgccggtgcctcctgcggcggtggcgaaggctgggctcccgcgctcgcccagggctgccgggtggtgctgaacctggcgccaacgtgcagaatccgccggccctgcgcgctgcgctccacgtaggtcaggagtacccgcggcgccccattcccaaccctccgggggcacctggttgctcgcgctccggaccaaggcagttggaggcctttcggtcctctgggaaatggaggcccacctgcatcacatgcacctctccctgctcttccaccagcaaccctggaagctctctggagtccagaggcagctctctggggggccaccgtaccacccccaggaccccctccctctctttcaactccgtacaaaatgccgccttcggattcccgggaaaacttgcccactttgtagaagcaccccatcaaaaagggggcggcgaggggcgggcgcaccgtggacactcgaagcccccggcacacaccccagacaaaagcccggttccatgctgctccaccgccccctcctactgctccgagtcggagttacttcttgcctctaggacgctgggcagcaggggctgctgcccacctttggaaccctccccgcaagctccagccctttacctgagtcccggcctcggcggggcctccggtgctcagcacccggctcagtgccccgtgcggccgggctggtggtgtggtggggatcgcggccgccgctctcccctgcagctccgggccagccgggcggctatttatccgagccagctgcggccccggcccctgccggagtattaggcaatcggtcccgctacgcgctgccccgggagccgccgccctctgcccccacagacccgcagcggcggcggccacatggagctggggagccggcccccttctctgagctccaccttctctttcgccttctcctccccggggttttccctgctgtctttttctcccttgtctctctttgcggggcaccccggccagtctgaaccggttgtgactgcgcgggtggttgggggaaggaggaggaggaggcggaggagatggaggcggaaaagcgggcggtaggggcgctgcgcctgctcccgctgctcccggcccggccaggagtagggagggcactgcccgagccgcggccccggccctaccaggcctggagccaccaaagccacgagagaggtgggcgccgtcggccaggcgccctctcggtgcgcacacacgcgcgtccccaggcgccgctgtgcccccgccgcccaccacgtgccctggccaagcccgccaagggccgtgcgcgtttggggggagccggggtgtacaaatgaatgcgagtgttccttggtctccctggctcccggggccgctggcgccctcctggccggagctgtatgctcagctggcagtggtcccggagaaacgggcaccagaactttgtggagtccgtgatcctgggaagtgaggagtgaggatgccaagtacagtcctttgtgacagctccgcgggaaaggagggcgtcctgcggtgcacacacacacacacacacacacacacacacacacacacacacacacacaggctgcttctaaggacgttcagtctgtcctgcagttgaactgcactaacaatactaccattggcaatactatctttggtaatgggcttgcgcgcagagatggatggctgttttatccctcagtcactgcagcagctgggggctgtccataggtaccagtggttcgccggccgtgggaaacctccaaagtgatatgcactttttgtgttcctctgtgttttttctgggaagccgcaccacactttctacttcttaaaggggactgcggccatcaaccaccttgatgagaacttcctttatacactgaagtgacaggtcctggcctagacgaagactctacacctggcaaagggttggtttcagaagtgctgatcaagctgctgagcctctgtttccttgtctatgaaattacaagaatcttgcctgtatcatggagtttgtgtgagatgagagtttaaaaaacctgtggagcctaggcaaccatgtcatgttttcttacagcacaaatgtggtggaggttcagcccttttggcccccatcagtcctttctactcaatttattgactttcaggttagagtgaagagaatgaccactgctagtcaatagtattttgttttgttctaagaaggaaaaagagaagaggggaaaagtaacagtgagaatgagagcaacatggtcccaagaataagttctggaaggaaaaatggagaaactgtactgtcaacaccataaaaaacttacttctaaagaggcaagggaacacaataggggattcttaggctgtatttttttacctggtttatggttactcaagtgcgttcactttgtggtaatgcgttgacctatacactgataatttgtgttcttttctctatgtttcaataaaatagtttttttgagatggagtcttgctctgttgcccaggctggagtgcagcggcgtgatctcagctcattgcaacctccatctcccagggttcaagcaattctcctgcctcagcctcctgagtagctgggattacaggcacgcagcactatacctggctaatttttgtatttttagtggatatggggtttcaccacgttggcctggtcttgaacgcctaacctcaagtgatccaccgccttggcctccaaagtgctgagattacaggtgtgagccaccgcacccagccaatgaaaggtaattttagaaagtctgtctttgattcaaatacttcctaagcaccagagcacatgttatcttgattgttgctcaaaccaatcaatgtatatgaacttatgttttggggacaaggaaattgtgcctggaaaatattctacatccaccaactggtttctgaaattgacacatgcctgttatcacttgcaccaagttttcccagatttcttttagaagagtatatagccagcacttccatttctactcaggccagcccttgcctatcaactaagaacc

SEQ ID NO: 914083 - DNA, 4001 bp, Homo sapiens
gaattcctaaggctttcacaaggaaaaagcaaaactgaaacaggccaggcacggtggctcaggcctgtaatcccagcattttgggaggtcgaggcgggtagatcacctgaggtcaggagttcaagaccagcctggccaacatggcaaaatcctgtctctaataaaaatacaaaaattagccagctttggtggggcatgccggtaacccagctactcgggaggctaatgcaggagaatcacttgaacccgggaggtggaggttgcagtgagccaagactgtgccactgccctccagcctgggcaacagagtgagactccatttcaaaaaaacaaacaaaaaccaaaataaaaagcaacaacaaaaaatacaaattaaattgtgaaacatataatcgaagctgtgagcacatgtgtccaatggagcattcgagccgaagcagaactaatgccgttggtactgaacagggatgagctccacggctctgataactcctcgagatgaaacctatcagatgctctgaaaactgctgtgagaaaacctgcaaatggagagaaaggaaacagctcccaccacttacagtctaaatgagtcgtgatttttttttcattcattaaaaactgggatttttttttttaaggaaatgcatgccaaatacttctctgttaatgggcctaattaagggacctggatttcgattatttaatttttcaaaattccactataggaaaaataatagaaccaagattgttcaaattgttcttgcaatggttcctgaaatatttccatctcaagtcattcactaatacagtatatctaaatgtcttgtttttggagtaagggatcgaaacttgctcttttaggtactacaccaaattactaacctgccttttcgagtagcccaataattattctaacacgtaattttgaactttaggaatttctcttttggaacagaaatctttttcatcgcagtgaaagcaggcaagaggatgcgggaaattatcagggggaaacataagttctgggtcttatcggatgtcacagtttttgacccgagcatcaggaaagcgaagccacacaacgcggctcctcctagccccggcgcggcagcctggaggggatgtcttttttgcaaagcgagttctccaactttcccgggccttggcggagctccgggaccgcgcaggggtaagtggagtgccggggaaggggcgctggggctggggtgccggggcaggggtgccctgtccgcacgtacccacgacagtgagcagcatgttgtccagcagcagcgccaggaacacgatgaacaggatgagcttccgcgagcggcggctctcctgcagccagcggaccagcgccagctcgctcagggccatggctccggggctccgctgcgggcgcggtgcgcggtgaggacccaaggcggccgtggaccccccattctcccgtcccccaggccgcggaagggcgggtcagggagccgcgcgcaccggcatccggggacacccccgggcgccccagcctcggctcacctgcctcgagcgcgtccccacgagagcccgcgctccctggaaagagcgcccgcgagcgccgtcggggacccaatctggagacccaacctagaacccccaggacgctgccctgatccccgccgcccccaactgtgccacctcccaaactgcacgctcggccccgtgcaccttgcgccctgcgccctgcgccccggctgccccggggtccccgcagccccgcccgcgtagctctgggggcctccctgcctccctgcctcccccgggcccgctcccctccggcaccgcgccctgcgagcagggaaccggggccgtgttacctcggggtcgcttgcgatgcctgcccgggtcctccgtgcccgcgccaacgcccgcaccgcagtgggctccgtcagtccgggcggctccgggtcgcagtctccgccccagcgccccgccgccgccgctcagtttaccccgtccggctctgacgtcacggccggagggagcgggggcggggggctggggcgccccggcctccgcccgcccgcgccgtcgctgcgcaggaggggctgccgcctccctgtccccgcctcggccgcggccgcgcctcttccccggacccagcgcgtggccgagtgccttggggacccaggcctggggaagaggcaggggcgcagagggaaagaggtcagagagcctggacgaagagtgaagggccagggaccaaggcgaggaggcacggaccagggctttcttgtggctccaagtggtggctcgagctgctttgaataaatcacgtggctctttgagcctcagtgtccctgaaatgggccgtgaggacgggaatgatggccgcggggtgagatcgccaggggtgacaggtgctgggagccagggacaggcttccctttcctgaagaagccaccctttgcacccaccatcccctcccctctccgacctctgcagcccgatgcggggtgccactcggaggagcctttgagccttgggcatcctcaagctggtgacttggaaacgggggggggaaggggacacttttcagtgtcgccctatggtgggagttggggaggtgagggtcccaggtctcagaaagtgggagcagtgggtttgggcctctggggccacctgagcaggggaccctggaggctaggtgagtacacctggcctcagagaaagggctagggggcgggctgtgggcggggcagcaggcctaggccctgtgtcctgtactctctccccaccatgctgtgcctgggcgtctgggtgagaggtggttcctagagccaggggcctgcgtgtggctggtgcagagctgtcatcctcactgctaagggctaagagcctgcctttgatttccaggtcccttttataagcaaaggagaaacaaacagatgccctctgacatcgctggagctctgcaggccctccgaggggaccgtgggagcaagagctgttttcttgaaaagctacctagaataaatgttaccctgtcacagtctcttagcagaagagtgggcttgttttattaatgttagcttgttgacagcaggaggccactgagaacagcagtgtgatgtgtggctgcccccgctctctccacctccctactcccttgcagagaccccctgtgcttctcattgctaccccatgtgtgagaagagatggttgaataggtaagtaggtcaggaacatgggtctccaggatgtcacaggatgtgcacaacttaaacattaaacagggaggacagaaggaaaaccacttaggaggaggaagcagatggcagagagccgtttaagatggcaggagggtatcactcagggagtgccccagagtgcttgctctggagtttcagaacccaaggatgcagactctaccccagggaccacatggggacagagaggcattatggtaaagggtgcctgccaggatgcccaggtcccagtctgctacttccttgactggtggccttgggctggttatgtatcctctttgtggcttagtttcgccatctctggaatggggatactcactggacctactgcagcgtggttgtgagaattccaggggaatgcataggcagctcttagcacagtgcctggcacaaagtgagagctccgtaagtgccggcccctcattcatgcgctgaatatgtgttgagctcttactacgtgccaggcactatggttaatgctggggagacagtaaagcctagacaaatccctgctgacattctgacctgatagcagcatcatagcagtgaacactggaagccacaccaaactccagcccagccagctggatgtagatggctccagggacaatgccagcccggcgttcccgcctccggatcactgtcaccacccctagagcactatggcctataacagactttttgttgaaaccccctaaaaaatgtttaacaatatgtttgccttacacattttcaagttggcatctaaaatgagtt

SEQ ID NO: 914084 - DNA, 4001 bp, Homo sapiens
acgcatcaaaagggccaggcgggctgcgaggctcgccgtcctggccagacacaggacgctcacgcaggcgcaccgcatcgtacagaccttgcggtggctcatcaagcagcacatcgcgctcggaacgggagcgcgtcaggaggcccacgttgcggagcagcagcaagacgggagcatagagcaggttggccagtcccatgccaaggctgagctgctcaaagcccagcgagtgcacaatgtggcctgccactatgggcccgagcgcgtaggccaccgaataggagatgtcggcgatggcgtagacgctgccatagactgagacatggcgcacgtccaccaggaaggcgagcgtgggcagcagtgctgtgtcgactagggctatgccaaaacagaggccgcatagtgagaccactagcggcgcgaaggagcggcaggcgggcacgatgcacgagctggcgccgatcacagccagcccaagcgcgccgtacagccactgcaggtgtgggtagcgcgccgccaggcgcacggtgaggtagacgcccagcacatgaggcacgaaggccggcagccaggccatgcccatctcccactcggaagccgccatcgtatgcttcatccacgtggcaatggtgggttcgaggaaggcgaggggaatgttacaggtggtgagcgcgccggccaccacggcaatgtaggggtctagcatgaggcggtggatgggagtgcccactggcaggttggcccgagcccgtgcagccgccgagaagggtttggccactgccagcagcaacagcgcgtcaaagagcgacacggcagctagcaccaagaagggcacgcgcttgccggcgaactcatagaggatgcccccgaagggcggggccactaggcttccgaagctaatgaaggccagcgccacgcccagtgcacgactgcgctccggctcctccgggtacttatcggcgatcatggctatgccagacgtgtcggcgaaggctgagcccaggccctgcaggctgcgcgccgcgaacagcgtggcgtagtcctcggcgaaggcgaacaggactgtagaggcgaacatgacgcccaggccgatcagcagcggcacgtcgtagctcatgcggtcgatgaagggcccgctcaaggggttcactagcagctgcaggatagccttggaagcaaacagcaccccgatcttcacgtcttcgctctccgtagggtagcggggccgaagggctgagcccgctggccacgcagctgtcggggacgccgaggtgttggccgtgtaggcgctggcattggccggagtgggcagcggcagggtgggctcccacacctcgggagtccgggtggggccctcgccgcccccgcgcatgtgggcgatgtagtcgggcactatgggcacgatgaccatgtacagcatgttgtccagtaacagcgccacgcacacgataacaagcaccaggcgcctctgccgccggggctcctgcagcgccgcgcccacagcctccgacagcttggtggccgccgcccgggcctggcccgcaggttccgcggattccatgcccccaccccgatgctcttccgaggacgcctccgccagggccgagcgctggcgtcccgcagtgcagaggcgagggcacgggacttcggggaggctgtcctggccgagcagactcccctgtgcctcaggtggccgcggagctcatggcccagcgtcccgggaaaggaaaggactccgtccggcgaggcgttgcagctactcttagccgatcccgggacccgcggctgctgggctcaggggcggccgggaagtcgggcgcgccgaggggccggggccggagactgggcgcacttcgcccggggcgcgcccagagcagcccccgccgcgctaagaggccgcccgcgctggccgagggacatgctgttgccgcccgcccgcttgcccgcccgttagccccgccgctgcgctcccctcccctcgcgtcggctcttgcctcctccgccgcctcctctttttttttcccttccactcggggctgtgacgcggcgagtcccagcccccgagtggtgcccgggccacttacgtcgctcatgctaatgcgacgtcggcggggcgggggccgggggcggggcgtggccgggcaggggtccgctctccagatgctccagggctggaggcccaggaagggctctcggtgtggaagtcttgaaccagcccctgggatgggcgttccgcgccggtagctggccctctgccccccgccccctgcctgccccccgcccgcggttctaggactcgcggggtcagcgcccgctcttctcctcttggggaagggggcgcggcagccggttcctcgaggccccttgggagaggcgggagccagaggcttgcgatctccgcttcagcctggacctcggcgcacagcgagcaggaagcccccgaggtgagccgccgctgcgtccatctgttctcgcagctggattgtggagccgcgtccggaggagcgctggacacggacacccccaaccctttctccgactccgccccctggccccttgcacacacactcccgccaggaggggaggggaaggctcagcaactgcctggcctggctctgacccaccggcccctccgcagaatttctcggccgcgaatcgcggccgggagcttgtggggactgagggcagaagttgccgcgccccagtcggggtcgcgaatattagcctggccgctgccgccctcccgcactgcctggccacattccccttgcctggaatccccctttctcctttagcggtctggtcccccagctccgcctcttctctccccgccgccgcaccccctccccactctaactcctcccaggcactcttcgcacccgaccaagccctccctcggctcctgccagcctccgccccctgttctgcacactcccccatccctcattttccagagcctcctccaagccccgggtgggctctggagtgactgtggctggggtcctctcttggaactgtaagaaacccttcttgggtgccgcgcccactccccggagagcgcccagccgcttcgctgtcgtcaggggctccagggagactcaccttccttctgagagggccgcaccccttgaggcgcccgtgctcagctgacaggctgagctgcccaggctgtgcgctgggcctgacgcgtccccagagcggcgttgaccctggatggcacatggaacccgtgttccagtgggcggactggcgggagagaggctccagggcggctgaggttggaggtggggattgtgttgttgagattacggtttgcgtctctcttccagagtcagaggggagccttcccatttttctggcctcaaaagtaaagcagcattagacgcagatgcttctcccattgtgccccccaccccgcaggaagtgccgcgatgcagtgcaaagagtgtggtctttcgaggcagacaaccaggatggctcccagctctgccacgtactcattagagtacctgcagggaattactttgcctctctgtccctcagttagtttctttgtaaaattgaataataatagtacctactgctaagggggccgggcacacagtaagagcagtataaggacttgctatgttgttatcgtgtgtagaatgtgcggtttatcctcatttttcacttgtgggtcttgtgaagaacagatgaaagacacagggggcacttggctagctggctgatccctctggctaggtgggcattgtgactccaggctctgtctgggttggtggaggacccggagggcattggaatgtctccatctgtccctgagatggctgtaggatgaggggatggggaccaatgtgtcagggtgagaggcggcagcctggccacctgttgctcaattccttcacccacccagtcaccctgggaaaggagaaactcatccactgaagggctgctgccacctgctctgcagtgactgaagtgccctctgtctgagggaggaa

SEQ ID NO: 914085 - DNA, 4001 bp, Homo sapiens
gcttactggagcctcgatctcctggactcaagcagtcttcctgcctcagcttccctagtaactgggactacagtagtgagccactgcacacaacttcaatgtggaatttttaaatttttgaatcttaaataattaagtaatgacaacctgtggggaaaagcaagagagatcagattgttactgtgtctgtgtagaaagaagtagacataggagactccattttgttctgtactaagaaaaattcttctgccttgagattctgttaatctataaccttacccccaaccccgtgctctctgaaacatgtgctgtgtcacagagttgaatggattaagggcggtgcaagatgtgctttgttaaacagatgcttgaaggcagcatgctccttaagagtcatcaccactccctaatctcaagtacccagggacacaaaaactgcggaaggccgcagggacctctgcctaggaaagccaggtattgtccaaggtttctccccatgtgatagtctgaaatacggcctcgtgggaagggaaagacctgaacgtcccccagcccgacacccgtaaagggtctgtgctgaggaggattagtataagaggaaggcatgcctcttgcagttgagacaagaggaaggcatctgtctcctgcctgtccctgggcaatggaatgtctcggtataaaacgcgattgtatgctccatctactgagatagggaaaaaccgccttagggctggaggtgggacctgcgggcagcaatactgctttgtaaagcattgagatgtttatgtgtatgcatatctaagagcacagcacttaatcctttacattgtctatgacgcaaagacctttgttcacgtgtttgtctgctgaccctctccccacaattgtcttgtgaccctgacacatccccctcttcgagaaacacccacaaatgatcaataaatactaagggaactcagaggctggcgggatcctccatatgctgaacgctggttccccgggtccccttatttctgtctctatactttgtctctgtgtctttttctttcctaagtctctcgttccaccttacgagaaacacccacaggtgtggaggggcaacccacccctacacaacccagagaagtaattaaggaagggtggagcttgaaggcccaggaaattcctaagagacaatatgaactttttgatcccaaagtcacatcaataatagggcttgtcaagtactgtgtcacagtttactagaatcactggaaccagttttggctgtagacagtttgcacaattttccagtagtcattaaaaagctgatctccaatatttgttttcctttaagcaaacagcaaaatccaagtctacactgggtcactcacggtttttataaaagaaaggagtgcccagcatgtctcactaaaaccccagggtctctgtaagggatcctcctcttttccctgttatccagccctgaagaatgggtgcctgattcagaccttccacctccccagcctctgccggagtgccaaaggtcccactccccataacctagctgtcattagtcaagtgattactagaaagaggttacagcaggtcagggcagacatctaacagaacattgaagcagccagagtccaggaatgtcatagaggccgcttgcatcccacttgcccacagtcctgcccccgccactcagagcgcggctggctcttcgtggcatggacccacctccggccagaaaggagcgcagccagtagaagtctctgcgggttgtgggccctccggcccctgccgcctgcggcattgcgggagggggatcggccgccgccagggctgccgcggccgtcgccgccgccatcaggaccagggtcgcgtcaggagcctaggttgccaacttacagaacaccggacgggaccatagccggaacaggcggtgacaggaggctgaccgccccgccggcggggcaaagtaacacccggcggcgcggcgccggctgatggcgtacagcaagggcggggcctgtgtcacgcgccaaggggctctgccgggaggggcggggccaggacgcggaacagggcgtcacccaggctcgtaaactcctccatcccgcctcacccggcgttgccactgtcagttcactgctcaggccccttctgttcggacggaaaaaggaaacggtaggcagtgagatggtcccattaaaacccacaacctggccgggcgcggtggctcacgcctgtaatcccagcactttgggaggcccaggcggacggatcacttgaggtcaggagttcaagactagcctggatgccgggcgccgtggctcacgcctataatcccagccctttgggaggctgaggcgggcggatcacaaagtcaggagttcgagaccagcctggccaatatggtgaaaccccgtctctactaaaaatacagaaattagccgggcggggtggcgggcacctgtagtcccagctactcgagaggctgaagtaggagaatcacttgaatccaggaggcagaggttgcagtgagctgagatagcgccactgcactctagcctgggtgacagagtgagactccgtctaaaaaaaaaaaagactagccaggcgaacatggtgaaaccccgtctctactaaaaatacaaaaaattagccaggcgtgagggcgggcgcctgtaatcccagctactggggaggctgaggcaggagaattggttgaacccaggaggcggagattgcagtgagcctagatcgcaccattgcactccagcctgggcgacacagcgagactacgcctcaaaaaaataaaaaataaaaaggcccacaaccttagaaagctctctcctgtctcgtcccttgacctatattgaccactgaccagtaatcgcctatcgcgctttttttttttttttttttgagacggagtctcgttctgttgcccaggctggagtgcagtggcgagatctctgctcactgcaacctccaccccctgggttcaagcaattctcctgcctcagcctccctagtaggtgggattataggcgtgcaatactacccctggttactttttgtatttttagtagagacggggtttccaacgtattggtcaaggctggtccgaactgctgacctcatcggatccgccctcctcggcctcccaaagtgctggaattgcaggcgtgagcctctgcgccctgctctcggagctgtattctgacctccctaagatgcagcctttcttttttttttttttttttttttttgagacggagtctcgctgtgtcgcccaggctggagtgcactggcctgatctcggctcactgcaagctctgcctcccgggttcacgccattctcctgcctcagcctcctgagtggctgggactacaggcgcccaccaccacgcccggctaattttttgtatttttagtagagacggggtttcaccgtgttagccaggatggtctccatctcctgacctcgcgatccgcctgcctcggcctcccaaagtgctgggattacaggcatgagccacggcgcccggccaagatgcagcctttctaacctgcggcttctcgctttttcaggcatgttttgacttgcttccatctcccaccaaatcagctctgccttgtcagagctcctcactgaacaccaatttctgccctccctaaatcccccactaagcttccattcctcccctaccacctctgcaaaaaaaaaaaaaaaaaaaaaaaaaaacacacacaaccaggcctggggcggtggctcatgcagtaatcccaggattttgggatgccacgactggcggaccaccaaaggtcaggagttcgagaccagcctggccaacatggtgaaaccttgtctctactaaaaatacaaaaattagccaggcgtggttgtgggtgcctgtgggtgccagtaatcccagctactcgggaggccgaggcaggagaatcggttgaacctgggaggcggaggttgcagtgagctgagattgcaccgt

SEQ ID NO: 914086 - DNA, 4001 bp, Homo sapiens
tagattatattaacttttggatatacggcattattaactcacaagtcattcaacctagagtctatacatataatgtgtgcatcttttttatttatacttgttttacatttcaatgttgttacttctctctcatggattttacagtttatttctatttctcccaattgacaaggacatttaacattctaatgtccattttagtcaagtgcatttaccccgttttcaatggatatggcccttgttaggagttaccttgtgttaaaatactcctgccagtttgctgtcattcacaaagcttaatgagcgctccccccatttccttatccacattctaatgaaaaacatgaaacagtactggaaccaaagggaagtaaaagggatctactttgcctttcccaagttgattctctcctccttttgaatacataacactttcctgatttgaagagaaaacatacatcaaaaagctgccaggtcactgtttgactattacccttcacatgtaaaggaggcatcggtctttgtcatatcaacagtcccctctagtttacctctccctcaattcagtcctcacctttaatggctggcacctttactaatgtacaagaataagaactgtaaagaacaataatctgtttctttcttcacccagctttcttcagaaggacctgacttcagtacacataaatcatcctgcttggttgtgaatgcaattagttttactttcacaagaatcgtgtcctcttgttgatctctttccattttcttcatacttacatctactttctaataccgtcacacttcctttctaggcaacttctccctttttgccaacttcaggtggccaaagaaatatgctatcagtttcatctctcttgtttggaggctgatgtgctccctgaacatacagtcctaatcccagctcaattttcatgttcaggaaataggtggggtatcatgcttgcttcacagagaaactgaaacctattcctgaatacgatctttcccacattacttccagtctggaattctgcattctcactgcacaatgatttccaatcactcatgtgttaagatttaacatgtaagtcctttatctagctgagagatcccagattcgggttcctgccccgtcagtaagggaagatacagcaaggagtttgtaaaagcactagcccagaaaacatctcaagccgttagatccatttcagggtctggttcacgccagttggcttcaccttaatcgagttagtagcacttacctgagcttcgggataccccatcccaccctattcctgtttagtcccaggtggggtccagggctttggctgacagattttcgatcctgagtcccgattcagatttcactgacggttagaaataggtcctggttcctgactgggatcaactcccagctgggaccttgcttgaatggagtgtcggttcgaatcatgtggtagtggcaggagccaggaaggaacccatgtcggctccggctctcagccgggatcctggctccggacaagacccaggggtcgggtcagccccaggtcgggttcgaagccgggtgcaggtctcaccttgacgcagtcgatggggtacatcacgcagtgctccaggatccctgccacggcgcctgccaccatgtgcgtggtgacagtggctccagccggcagcgcctcgtagtccgggccggagtccggatcttgtcgtaccgggggcctgcaggccccggcctccccgccgccggccccccggcccacgccccgctgcagccacccgtccagcagcgccgactccccggggctccgcccgggccctgccgccggcccccccgccacaccgccagcaccccgcccctccaactccatccacccgggccagctgcggcgcccacccccgccgccgctgccaccactgccgccgccgccccccggccccgtagtgtccgcctcaggcgcggcccagagagcccggggcctccggctcccgcttggccccgcggacacgccccccaagcaaccattggtggagacgccaagttagacccacccctttccttacgtacgaaaaatcagccggtagtattagcgaagtcgcctgtcattcctccgccctgaggcgttgctagcgcctacatcccaccttttcccctttgatcttagaagcttcttgtttattggtcactgattggccgacatgtgcgatcaacccgcctctgacttttagaagggcgggagaaacttaaggctgaactttgataggctcaaccactcttgatactttgaccgcggccattggcccgcaccacgtcggtccccgattggctacagaaagagcgacgcgcccagggactctaggggccgacttcgggcccctcactagcgcctgcagagctgcggtccctgtgcgcgggatcgcgtcgggggcggggcggcgacaggccttcaacgtcaaactgctgacgggcgccgttacgacccgcgctcccgtgcgctcctcaaattctgagacgcgtggctggagagcgggcggccctggccccggagagccgtgttcccgcgggatctcgtcgcgggcgtgaggcggggccggcctgggccggtcatccctggctggcgcgacccgcagcctgtccgggaagccgttgcgacatgcgggctgggaaccgcctcacctccaggggggaccgcggcggcccgctagactctggtcgggtctggagtattgggccctctggccggactcggtgctcctcaggccccagcgcccggcactgagcctcgcatccacattcgcagagtaaacccaacaagtgttgaatgaatgaggttccccgggccccggctgtcactgggctctgcgccaggccaagagccgaaggcgggggaggaagatgtcgaaatgggcgggatgattcacagatgacggccggtggcgaggcggggctggaggccgcatcccaaaggcagcagggaagtgcggcggctgtggggaagctcggacgcacggcctggccgagtctgaagcatcagtattttgtccctgagccggcgcgctgatgggtcccccgcctggcgatgagggcttctccctccctcgggtcagcccgggtcctgagaggcaaggccagcgattcccggccttaggacctcctgctctagggagcacgggcgtcttcttccatttgccttccccgagcgtgttggcacaagctgcccgcggtttccagctctgtcttctctgttttacccagatgatgcaactgtggacttctccatctgttcataggttttccttggataggaaagatgttttccttttttctttctaaagtttagctcttctctgggcttcctttttaaaaactttttctactctcttcagcagttgttattaacctttaggtcgcgaccgtttggaaaataataaaactacgaattctcttctcctacttccacctcccatcccctgtgtgcactcaaaattttgcatatcatttctgcgtttcagagtccctgaaggtgccatgtggacaccctaggggtccattaacctggttaacctctccctggccggcgcagtggctcatgcctgtgaccccaacactgtgaaggccgaggtgggacgatttattgagctcaggagttcgagaccagcctggacaacatggcaaaaccccgtctctacaaaataataaatacaaaaaagtacaaaaattcaaaaattagctgggtatggtggtgtgcacctgtagtctcagctacttgggggaggattgcttgcgccagggaggtcgaagctgcagtgagccgtgttcatgccactacactccagcctgggtgacaaagcaagactttgtctcaaaaaaatttttttaaaaggaacttctcccccacagcatgttcagtctctccttttctctagcatatttagcttgagaaatgaataggtctcacaaaaacccattcaatcctgctagagtactaattccctttact

SEQ ID NO: 914087 - DNA, 4001 bp, Homo sapiens
atcccttggaattaggcagggcagaaaacattgcccccttttttcagatggaaaaactgaggtctggaaggcacttgctatgtcccacaaatagaaagaactcccaatagctaaacttaagtccagtgatcacaaatgccaaggtctgtgcctaacagaggtcacacttgaggctgacaacagcctaatatattaggtactactctaagacccatttcacagaggggtctgaggctcagaaaggttgagtaacttgcccagggtcacataactagtagatgacaagagtgaagttacacagccaagcagactggggcccatgctggactcctcagcacaccggggaggactggctgggaatgggaatctgtgtctgctggttccaagtacaggcatccttcctgcaagccttgaagccagtgagtcgggaggggcccaggcacactgcaggcacccttgtcaatgtttgctgaatgaacggactctgcacgaccaggacattctcccctgctggggtagcatgtaccctggagccagcaggtggggggccactggatgcccaagtgcaatgcatccagccagcaagtctattttaaactcccctggttagcagagcccctccccagcctggattcgcatggaggccagcattaacaagctcactgtctggaagctcactgtgtggaaaatcgctttttccacatgcacccactcatagaggaaaagccatgtgaaggcacagcaagaaggaggctgtctgcaagccaggaagagagccctcatcagaaaccaaatcaaccagcaccttgatcttgcccttcccagcctccagatccatgagaaacaaattttgtttaagccacccagtctatgctattttgtctggcacaaaatggtacaaatgtaacaagctcacttgttacattttaaaaattagtgtttaaaatgtaaaaaataatcatgacccacccacatagaacaagagagaaccggcaagtggttctttccagaggctccagctacctgtgggggcggctagaaggtccaccagccctgtcactcaggaccacacctggctagggcccccttctcagttcctagcgtctatttgtcaaggcttgactgagcttctgaagaaggagccaggaattttctctaaccagggtcacaggccagggcactggagtgagcaaagtcttattagtctttataaaagctagctgctggcttctggattaaaaaataaagagaaaggcaggcaaggaagtgcccaaccttccccaaaacaagctggctgtggcctggaacgtgctcctgggtcacctgcgggagcccggccatgcacagacagacagccccacacaaggaggcaggcactgctggggccgcggcaaaacctcatctgggctgggaagcctgggtgctggttccaaggaggttcctgactctggctaggtggctcgcccctctgtgcctcgatctcctgggctgtgaaccggggtggggagctggtagggctaacctgtgggaaggcactgggaagcgcagggcaccgcctactggccgcggcagaaccggctttgcggtgtaaacagccccagcctcaggccccgcagctgggaccgagagaatcagccaccgtctggatacttcgggccgacgggtccataccaggcccccaccatacaggcggtgaggtccagtctcagggaggaggaggggagaggatttggggaagagaagatagagacccagaaagaggggtggcagagagcaaggagagagaggagggacggtggggaagggaccacggatggggtagggtcctgcggctcccctggcagcccgcagccgcccccagggcccgggagggaggtcgctgagcgcgagtctgggggcggccgggaccgtagccggaagagcccgagccggcccgcacttactgtcgccgctgcgccacgccgccgctgcctccggcgcacggccaggaccactgggcttggcaggcggcaggcgggctcctcccccggccccgccccgcccctcgcggcagcacgccgccgcttccccgtttgcaaacacgcttttttcctttgtcttctgccggcgcgccggggctcccccttctggcgctgagctggggcctgcgtgcgcccattttataggagaaaaagtgagtcacccagtcttaaacgcactgcccatgcttgcgatgggtgcgctgcgcatcaggccttttggttgctgctccttctttaccttggagccagaccccactgtctcagacctcccctttagctactataacctgcaccccaggactcaaaggagccctcatcttgtccccaggccgctgcagagacccctctccaaaggccgcttctacccttaccggctgccgctgctctggaggtgaagcgggacccacacccggactgaactgggcctcccaggccaggcagctattttcagtagacccagaacatggcagtcagcaattccagccctcacacttgacctcagccatagcgtgtaacacacagctgccgcgtgttctttaagaaagcaggggccgggcgcggtggctcacgcctgtaatcccagcactttgggaggccgaagcaggcggatcacctgaggtcgggagtttgagaccagcctggccaacatggcgaaacctcgtctctactgaaaatacaaaagtagccgggcatggtggtgcgtgccagtgatcccagctatgtgggaggctgaggcaggagaatcgcttgaacccgggaggcggagatttcagtgaaccgagatggtgccactgcactccagcctggagcctgggcgacagagcaagactccatctcaaaaaaaaaaaaaaaaaaaaaaaggcggaaaccttcctgactcccggtcctggcccagttggcctattcagagcggggatctggatgcttcacagggcctgaagatctgtgaccatggatagtaaattcttgcagttgccatcccagggctcaggggtgccacagaacccattgaggctgtcagtgtgtggacaggttctcagaacatccccactccctgccccagcctctcattttataaccaccattccccaaacactggcctgatcataaaagtctcgagtacacatccagattctggggacctctccccaggagggttgctgccactccccaatccctgagggtggtgctgtatctgctttgtttgctcttccctcatcgtgggcacataatttgtgttcaataaatacctggattaatacaacccatcactcagggggtgcagaatggggatccagaatggatctatttaacaagctccaccagcaggcgagtttggagactagcaccctaaattgtcagaaagccccccggcccaggagaggaaggggcttagctccaggcttacaagctgagggataatggtaaaattactaaacctctctgaaacccagggtcggcttaggactgtcgggagaattaagtcaggtgatccatgccaggcactcaatgcaaatttccatcacttccaaggaagacactccccacccccaaaatgtgatagtgtatatgttagtttagtcatcaggccttatttttagcctctttacgttggaaaaaaatcctctaatatacagagcattttcatgaacagtctcccatttgattccacccccccaccccagtacccagtgaaatgggactgttgtccccattttacagatgaggaaagccaggctcaaagaggtcaagtggcttcccagggcacacagctggcagtgatggagtggcagaacccagagccaaggctctttttgtcatgcccggttacaggcaggcaggtgaggctgaggggagctgggacagcacgagggacaaagccgtaggattcagtgagggcagcagatcagggctatttctggtccagccccaagaccatgacccatgtctgtgaagctccggtgctttgtcacttgattg

SEQ ID NO: 914088 - DNA, 4001 bp, Homo sapiens
cagacccaccgaaatagaatctctgtaactctaaaaggctccactagtttgagaaccactgctacactcgatcactaactccctccagaggatgtgaggcacaggcctaagaaactacttctccttgcttcagtgtaagacccacactgtccctgaagaaagtaaggagatgtcttgggacagctgtatgtgtctgttaaggtcatccaagaatgtaagacatatgggtaacagttccaaccagaacttgaaaaaagctttgttgagataagcagttagaacaagaggtgtcacaaagttcaatgacaacagtaaagtgtttttatgtcaattttctttccaaaatattatcttgtcaccttacaataactaagtcttactggtagaaactttctttgaagttaaacacccacaagattcttagatacactcacgtaagtttctcatcttgccatgagctgcctgggagtagagaattcctcttccattcacaaaaaggggaaactttaagagtttgcatggactgattcggcatgccaccagaaggacattcacccagagggtgataggtgagaaactgaccttttcaaaggctgcttatctgttcaattcagcctggcataacccctgttctagaggcaccagcccatttataaatgatcacaagtctgatcatttcggtttgcctttaggacagaaatggagcaagaatagtcttcctagagtctgtctctctaacttggggaaagtgcacaaagggaggaggggaaagcgcagtgagaggagaggaacagaaatccagggtcacacttaggggaggtgacccagaggacaaggtggtgcaggccgtgtaactgtcctaaaaagagatctgcctattcccttcttcttgcaggaagctgctcctggtagatggtcgacttctaagaggaatgtgcttgaagcagcacttgtggccagtggaaagggccctaggccggtatatggcaagctgggatcctaaccctggtgctccctggacatgcgccccatctcacccccacgttccacatcttggaggagacaaagcaaacgaaaacccaaaagccctcaccttcctgggcctcactttgctcatgtgtcgaaggagggggactgaacataaagtgttcttcacgaggggtccctgactttggggacggggctgtgagcttcttaacaagatatgccttgttctgcatcgtttgctaaaaagtccttgtatccctaaaggttaaaaactagcggtcccacttatctctgcctttccaagattctaaaactctaggacgaacattttttctagactcgatgcttttcagcttccttttcggagagaacccttaaccaccgggatcacttttcagggtcagcttcctcgcaacgtcgccccactgcaggatggcctctctcgctgaccccccacctacgacctaggggagggtacgccaaactgcagtctgactccacagccctgccccgacactaattacaggagcagcctcggaatcccaaaaggactgctaacaatcggaaagtttcttccgtcttagcgccggctggggcgccgggaattccgctttgcagccccccagctgacagctcgaggggtttcccgagccccgggcagggtggggacggaggcgcggcgggcactgtgcccgggttgcggggaccccaacccgccggcgcccgctcgggacccccgagcgagaccagagcccgatccacaccgcgcactcacccggctcggtgcgggagcaacacggcgaggaaaggcagagccagcacctaccgcggtctggcgccccagctgcctcggcggccgccggctcctcagtggcgcccgggggtgcatcgtccgttagcggcagcccgggctcctggagctccgcgaccccggtgctgtcctgaggccgcatctcgcggcacgcgctctaccagcggccggtgccgtctggcgccagcagcagcgcctgggctgccgctcttccggcgggcgatggcgcccatgcgcatgcgcgcccggcccacccgcaccctcccccaaggagaccgcgcgcgtcctccgctggcctcttaacctggggagacccgctgcctccctggtcgggctgtggtgcccacagctggctctaaggcgtccaaccctctgctgcgttcaggctacatggcccagctgcttggagccatccttggcaagtcacactgaacctgtctgtcatggcacagacaaggaggggcgctgggttcccaagccctggcgcccgggggtcctgtggcctccttttcaggaggctcaaagagtgggcgttttttcattgatgtaaccacgcattcagcacctctgtgataccccgaagattttacaaagcaccatgcttgtctttaaatggtctagggtttttatgttttgttttgttttgttttgttttgttttgtttcccgtgttgtccctttgctgcttaccaaggagggtagaattttgctgttttgggaaatatttttaagaaagaattagtgtgtaattataggaaaatatatctataagactgaccagaacccatttatatgttctttgcattctttgcaagagtaggcatgcattattgatctttggttttcttttcttaaatggaaatatcctaatttggccagatgtaagattcaagtaatctgatgtaattagacctggtaaaatatattctttggcccaggattcactaacagcctctttttgtttagctaataattcttcttccatctctttgcttgctttatatgtggaagaacagtctctgtgcaaggatgaacgtatctaaacttctaagtccagtgccaagcagatcaccaaaggagagtgaagtttgcctttactcagacatttgcacatagtgatccacagctgaaacagttttagacttgaagtcaggaatcctaggttctggccctgagtgtgtgacctcagtcaccactgtacccctcgaagccttgattacctcctttatttaatagcgatcaagtatttcccttcctgcttcgcagagtagttatgtaaataaaatgcaatgatgtgggcaaaagcataatatcacctggaaaacactatgttagaaaatcaaagtgtgttttaaactagggtcagcatataatttatcctccaaactggacctttttttttttaagagtaaaaggaggagctcttttaaaagttacacaagggaataggcataaactgggactgtcctaggcaaactgagacaaatggtcacctgaattctaacttgattaacacatacttttgccttgtcttaaaagagaatttaaggctgggcacggtggctcagcctaccatcctagcacttcgggaggctgaggtgggaggattgcttgagcttaggagtttgagaccagcctgggcaacatagaccttgtctctataaaaaaaataataatacttttaaaagaatttaaggctacttacaaaaatatctgtaacaggttttgttgtcgttgttttagatagggaaatttcagggaaggatggtaagggtggtagatcatgattataaagcaagaaccaggaagcttcctcaaatatctgggaagtcaagtgcagtttcacaattgcattctaagatttcgatatggaaagggtttgaagagtcccctcctcttaaatggtgaagattatggctaggaagtgtggtaaagaagaaagaagtgtgatgatttgagaaggaagtaccctgactgctccactttcaacactttcaacaccatcctcgaaaagggagaagaagaagagaagaaaatgggtactacaccagttattaaaggtggtgagatgatttcatacctgctgtttattccctttaacttccttcccctccactgctgaccttcatatataaatggtatcagttatattcattctcccatttagctgacagccatgctgacataaaaggcaaccaatgaga

SEQ ID NO: 914089 - DNA, 4001 bp, Homo sapiens
gtcaatcagaaaagaggactaaaagttcgcgctcacaaataaatgcctctaaatatgcagaagggttctagaaagccttacataaacatcatcctttcaacaacaaaaatgtccctaggtgctatacatagaatgctgatttgctgtatcccaaatatggaaattattttaccagaatgcattgctcaattgcatattggaagatttgcctgtgattttgctttactgaaataaatccctatagaatccattgctttcttttggacatgccctgatacctgaccccattctatttcactaaccagattgcaatctccttgcattccgtttctcctccgtgggcacccagttttctccaacaatgttttgatgaggcttcttgagtggttgtggggtgggtggtcaccagcagagagaacctgtagcaggtctgccggttggcctgaactcccacggcttctgctatcctgggctgagggtttgtctgtctcagtagaaaaaacacggctgagtagaagaaacaatggcacccaggatactgagagctttgtccggaagcacatttccacgcttcctccaccttgagtctgtcttggatggaggtgagtgtgttgccgtttatggggtaaacttgtaaccaaaggaatttctgtggtaaaggggaaaaataaagccttcaattattgtgcctgcaacatgtttgaaaggattcattaattgggtggctaagctgatttgcaatgacaagctgtttctacacagcgggggtctgtaggtaatttctaaccccaaatggcaggaaagcaccatggctgtagactttcaaactgcacagcagccaaaaagcttgctagattctctctccctaaactaaacatagcgtcacgtaagtttctccatttaccaacaggtggtacaagttataggacccaggttgggaaacaccttatgtttatcccattataaagaactccaagtgattcatggtcctcatgaaaaagagaaaataaattctactaaatgaccaacatcatgttgagtttaaaagttttaggccaggcgcggtagctcacaccagtaatcccagcactttgggaggctgaagcaggcagatcacgaggtcaggagtttgagaccagcctggccaatatggtgacacccccgtctctactgaaaatacaaaaattagccaggtatggtggcacgtgcctgtagtcccagttacatgggaggctgaggcagaagaattgcttgaacccgggaggcgggggttgcagtgagccaagatcgtgccactgcactccagcctgggcgacagaacaagactccatctcaaaaaaaaaaaaaagaaaaaagaaaaaagaaaaaaaaagagttttagacaaggaaaagcactagaagaaaatagtaatgttcagaaaacacaggtcttttttttagtttactaagaatcaagattctagagcaggaagcatcttagaaaaacagaatttcgagacctcaagaacatgacacacacacacacacacactcactcagtggtgactaaaggagtgggggatgactttagagccaatcaacttcctggaaaaaaaaattatctttctgttgatggcttaaggcatgtaaaatgttaacagcatctcatgtccgatcctggcccagagatgagctggtaaatgactgtgggctagtaacaaaggtactgggattacttttatgagttaaaaacaacaacaacactttaaggttgttatgttagcaatttaaaagtgacagaggatgatgcaagcatttctaaccccagtgcttaccttcagaagaaagataaacgattctttatctggagctccacagccttttaaatcctggagagtatttcacagttacaaagttccctgtttttaaaattctttgactgtgcactgggagctagagaggattatttcagcccagaaaagttttcagttgctatggagagagctgctctgaaggtaacaatgaaggtggataaaagggagaactttctgtctggtagattttcaaggtaatcaaatcagtgtggttcatgaatttaactttttagatcaagaattaaccaattttcttaggctcacctactgtcacttgcctttcaagggacagaatctaggtcaaaggatttcacctcgcagaatagaaagacttcagtgttagatgaagattttttcctctccagttgattctgtaataactgtttcatccaggctcaaaccaaagatttgttgaaaagataggctctttggaaccatatttgttttgcaagatgcagaagcctaaaagattgaagtctttcgtaatgagatgctttcaaatgaaaagtattggttgaaggaatgaaattcttaccagggatgtaggtagcataaatgaggaactttaatcagctgcatatattgtgatcaccagcaccggtggtagttcttacatcagatccttcatgctcctcaaaacaaaacctctcaacaaattattagtgaataaatgactaaaggaacaaagtggttcattttctaggaagcaagagaagttaaatcctaagatttcagagtgggcagaatgcatgcccacagtataggggtttaagtcagctggtgggcaggtagaggaaatttgagatcaggatgattagcctcatcactaattgtatatgaaacacgggaaccctgcggtaggatattcctgagagaatgctagtaatgagagatgacaacttgctagcagccctggctcgctcttggcgcctcctcagcctcagcttcagctctctccgtcttcaaggagcccttcagcccgccgctgcgctgtgggggaccctctctggggctggccgaggccggagccggctccctctgcttgccgggaggtgtggagggagaggcgtgggcgggaactggggcttgatcagaggctgaatcccgtgcgtggaccagaacgttggccacgatggcgggtctccatctctttcttgcttcccgtcttttgctcttgattgtctgggacgagctccctctaggctgctggagtgcccgggctaggtgctccggataggtgccacaaagtcccgtggctagtgccagtgagaggtgaagccagctgggcttctgggatggtggggacttggagaacttttctgtctagctaaaggattgtaaaagcaccaatcagcgctctgtgtctagctaatctggtggggacttggagaacgtttgtgtctagctaaaggattgtaagcacaccaatcagcactctgtgtgtagctaaaggtttgtaaacgcaccaatcagcactttgtcaaaatgaccaatcagctctctgtaaaatggaccaatcagcaggacgtgggtggggccagataagggaagaaaagcaggccaccccagccagcagcggcaaccagctcaggtccctttctatgctgtggaagctttgttctttcactcctcgcaataaatcttgctgctgctcactctttgggtccatgccacctttatgagctgtcacactcaccgggaaggtctgcagcttcactcctgaagccagcaagaccatgaacccaccagaaggaacaaacaactccagacgtgctgcctttaagagctataacactcaccgcgaaggtctgcagcttcactcctgaagtcagcgagaccacgaacccaccagaaggaagaaactccggacatatctgaacatctgaaggaacaaactgcagacacacgatctttaagaactgtaacactcaccgcaagggtccatggcttcattcttgaagtcagtgagaccaagaacccaccaattccggacacagtaacacggatggaaatacgaaaggcaaatattcctagaaaatttcaggcttttttttttttagatggagtctcactctgtcacccaggcatgagtgcagtggcatgatcttggctcactgcaacctccaccacctgggttcaagtgattct

SEQ ID NO: 914090 - DNA, 4001 bp, Homo sapiens
aatgcacacgctgcccacagaaactcagtttggtaccacctctccccagccctgtaacacacaagcattcacacacacacatacacatgcaccacacacacacacacacacacacacacacacacacacacacttcccatctagattgcatctagattgcaaattctctaaaacctccacgggaatttttcagatgcagccaagaagagtctggggcaaatgtgtgctcactaattgctggccttggtacagagtctgattcgggagacagctctcctcagggtcagatttctgtctctgaccagctgggggccatgaaaatgtgctcgaaagttatcaaaatatgcacacctttcctgagagccactgcagtcaccgaggagtgtgggaaggaggagtaggtaggtttcaaaggagccagcagccttctccaaagccctgttcaaaaatctcctggtgtagtcacctctgcgagcagtacaaaggccctgcatgtgaccaaaatctacacacacacagcccattacggggactctcatggcctcacgctattaaggtggccccttaatactaggaattcacacagaaacacattctgcaggagagtcacagaaaacaaagtataaaggtctgtaaatacacacactcaaacacacccaaacacacacacacacattctactagcttactgggtctagaaaagaaaaggatcaagtttcctcaagaattcacaagtgagacagaacaggggaagagaaatgctatttttttattacttgtcatggtcaatatctttaaccttgggcccccctctccaagctcctgacttcttggcattatccaccgggttctccatccaagacacacctgccccttttcgggtgctgaatgttacataccccaagccccatacccaaagccctcaggtcccattgtctgcctgtgttggggatggctgggtgtggagggaggcgggtgagtaggggaccaacgcgtggcacctgcaggggaagaattctcaaggctctggggcaaacaatggagaagaaggggcagaccagaaacttcgcctccatcccaccctgctgcccttcgtcaggagcaagctctgggagcgggaatctgcgcagctggctcagaacgcggccgtagccccatgtgcccaaaaggagacattgtgcttggcgagtgtgggaagtgtccctcctgggtgcaaggaaggctttctgacaccagttcgcaggcaccctggaggaataaagcgctggcgcagtgaggagggcctgagggtgcggagtgcagggtgcagggtgcaggtgtgaggacggaagctgacaaccccgccgagggccctttgaatcccagggatggggaaaccacggcgctcctggctcctggctcgggaaagaccccggcaggcactgacccgtctgtgggctgcggagcccggacgggccccaatggtcctgcccccacccccaagtccggaattgcgtctgggtgggagggcaacctcggagccagggagccaggggcggggaccatactcacaggcgctcggtgttccgaggtatattcttgggaatggcctgcagccccgtgccgtggcagtccaccgtggttccggtgcaggtgcagagggcggggcacgccgaggcacccaggcgccacgcggctgcccacagcagcagccagagctccggccggaccggccccgccgaggacccccacccgggagtcagcgccatggtgccctcacagcgtcccgctcgcgagccagacggcagcagccgctgaccatccccgtccggggccgcctccaggtgcagtcccggggcagagccaccgaagagcccgcgggcttgcgcgcggcgcccctgcgggctgggaggcaccttgctcctccaagcgacggcgcctgtgcgcggacggagggagggcgccttgggcggagggggctcggctcctctgccgtttcgccgcctgcgtctccctctccctccctccagctcccaactgactgctgcgaggaggaaaatgggcaggccccgcgcgcgcacgcaccctgcgcacacaccacacacacacacacgatcacacacacacccgcgcgctcgctcccacccggcagtcatccatcaatcgaaaagcacacatccagggccaggctcctccccgccctcccccgccgcagcccccctctcccgacgaccactcagcggctgcaagccgcctacagtttcaaaggtggaacctccgaggcgccgtcagcgggcacggggctgcgggggatgggagaagagggaagggggtgtgactcgacccgccaagtcctggctgtacacacacacacacacacacacacacacacacacacacacacacggcgaggatgcgcacatttagacgcacgcaccccggcacccgcggccccagctgctagtccagggtgggagggagatcttattttgccgcttggacgccttcccggggagtcagacccgtttccccccatcccccgacggcagcagcggcctctcggccccacccgactcgctgtgtcaattcttggttaagggaaaccctgtgcctgtgccccaggtagcatcctcaagccaccaaccttacttagcctggactttgaggatggagctttgtcgggggggagggtccacgaaagcgctaggcggagtacagtctccttcctacctcaatgcacccacttctcagaggggaacaagctagccgcatgcccaggatgagaatggctctgattggaacacttgctcagcagggcgtatttgtaccatacagttacacgggcttcttcccccgttgtagaagagagggacagacattaaggggacttggaaatctggcaaacgtcttcctccactcacaccagcgttcctccatttctgacaggtggaaacagatgaaaatgaatattccatcttgacatcaaaggagacagagagggctggcatagcgctgggcggcctgcttgggagagaaccccacaggccagccccgtcagacccaggcctcacacccggctgggtagggaccttcgtcaccgtaaggcatgtgtggacgtgggtgtgaacgggacatccaggtggggagagaattctcctcaaccccagaaaagacgaaagatctcctcaacgccaaggacagctgtggctcgctggggcagtgtccagcagtcggggccttgacgtgaggctgcttggcaagaggacacagctgggtagcccgagaagcacctcccgtctcaggagcggcctgggtccagacacagcatggacgcatttggtggggagagtgtcgggcagggtggggataggggaggttgatagactccacaaggttgaagccttatcacccaccaggtacccaaggctcaggcgttttctttgcttttcttttccatgttgatgagaattttgcagtctctctactgtcatagcacagtatgttacaatttaggtggctgattttatgggcttttgacagttcttttaaagttttcacacatccctgtccatgacctccatccggtaagtgggttcttgagcataagttcagtttctcagggggcagggctttctcaggggtgcctgtgtggtgggatattagggaagcttcccacaaaccaggccggagtctgagagggctgcccctgccctgcagctcaccagctcctgctccatggggccccagcccctctatccatgctctccccgcagcctcagagtgacattcctccatgcccgctgctttgtttatcccctcttagtacctgcagctgcttctccacacccctgcccaccccctggcatcctcactcgctcacccagacacacaccccagcacctggcacttagtaggcctgtcacagacagcactcaggctgttgaagatgtctccagccttctgctccagcagtagctccctggtcccaggacctcggagggccccttggaagccaagaccca

SEQ ID NO: 914091 - DNA, 4001 bp, Homo sapiens
cccaggagtgatcttcccactacaatgaagccttgcatcttatgaagctcttgctgaagcccatactctaccctccacacaaataacaaagcttattttgccaacttccacagcctatgatagcttccacgacagcattcatatgcagacaaaacacattctttcatttcaacaaataaacagacacatcactatacgctaaggcagtgaatgaacccaaatatgtatcataattttggcccttaattttattatagaaacataaacatattaattgtaataagtgacaagtgctataatagccatgtgaacaacgtgttctgaaagcacacagagaggagtagatattttagcctggataaagaatgaggactggggttttgacaagatgcatttgaggcagggcagaggcagaagtgtaatggtgcttagaaagtagtaggcagccggggacggtggctcacgcctgtaatcctagcactttgggaggccgaggcgggcggatcacctgaggtcgggagttcaagaccagcctgaccaacatggagaaaccctgtctctactaaaaatacaaaattagccgggcatggtggcgtatgcctgtaaacccagctactacgggaggctgaggcaggagaatcgcttgaacccgggagggggaggttgcagtgagccgagatcgcgctattgcactccagcctgggcaaaaggggcgaaactccgtctcaaaaaaaaaagaaagtagtaggcaaaatgctctcatttctaccagtgactgttaaaataaaaaacaatactaaatatgggctcagaagacctgagttcaagtctaggctgagactcatgtgactgtgaacaatttcaatatcttcatctgtgaaatgtggatactaatactgacctgcctacctcacaagatttttgtgggggccaaattatttgaaagtacttaaaaacttcaaagtcctgtataaacataagttattttcttacgttttcacttctaggcaaccctgtgggtccttcccctaaacgctgtctcataaaaaattcgcccttcaggatgaaaatactccaatgacatcattcatatgttccttaggagatattaaatagttaacattaatgccttcaggttgaaacgccaagcctctttctattgaaataaatacatgcgtgtgtgtttttaactgcttaagcgctgatactgacttctagtcaatgcttaccataaatatatttaaaactagtaccacatgaaggttttttggaaattttgtcagaaattccattctattttatagtatgctgtcaagcaactaactcaagaagagactgcaagtagcaatcactttgatcccaactagttctgtattagctctagatacaaccaaatatatatactggaccctaaaaacagaactgttggagtacaagcatgcacgcgaatgcagtcagtagacaaatccactgcaaagtgcaatgagtttctcattctaaaatacttgaagggcacaaccagacccctcctataaattaaagaacactctcatttcctttgaagtttgaaagagtagactttataaccctgtctccttttccaatcgctctttaaactccatccaggccccattttgttccaccgtaaacccgacttcttagctactccttggatgatcagccaagtaaagttgcatcgaaccgtaacagtcaaaagaaggacaggataaggaccaggggagcagaagtcctcccgccactccaggccagtggctgttttaccttcgcagtacaacttcccgttttccccctcttaccttgtacactttcccaaaggctccgtcgcccagttctcctataatctcccaaaagtcttcggggttcaggtccctcttcacgtgttcgtactgcttcttcttcttctcgctccccaacttgaagatcttacggaaattgaagaaggacatttttcctcccaacacagagttccttgcacttaaggactaaaaacaataaaaggcaaagtttctcttccctgctctcccgcgcgagcccggctggcggcggcgggcgcggcgtccctcggcccccgcagctccggccgggcggtcccgggagaaggcggggcggcgacccgggctccggcccgcggtgggggtgctgcgcgagcggcccctccgccgagcccggcccgcgagccgcgcggtgggcgcctcgcctccggcccaccctccgggagcggcacctgcccgcaagctcgctcccacccggcctgatccgacgggtccgagcggtcaggactcccgcggcggcggcttaggcccgtgtcacggcgagtctccaggggcggcggccactctgggagagagaagcggccggcggcctcggaggcgggcagtcgagaagccgagccctcccgcctcgggccgcgagcctagggtctcctccgccgccgtccgctcccgcggcgcaaggcccgcgcgtcccctcgggtctggggcgccgccgccgccgcctgtctccctccccagcccacacagcctcggcctggagcgcgcgccgacgccgactccgtagcgcgcccgcgcgctttcccggctgcgcgcccgcccggtcacgcgccctgctcaccgcgcgctcgcgtgggggcgtcccctctggccccgcgcacgcgcgctacgtccctcagactggctgcccccgagggttcgcgtgagcggagcacggggctcggggtgcggggggctggtgtgatggacgcatttgttcttcggtccctgacgattgtttctcatttgccctccaagccccaaatcctgtcagtccacggccttgatggagcggcccccgtgggacgaccctgttgattgtgctagcggatgttgtctccattctggatctgggaaaaactgtggagtgaaagccggacctgttagggttgggacctgaaagcggactttttcgctctcagacgggccccaggtacagtgagaggggagtttgtgtggtggttgtgagcttgagctttggagagagagatctgtgaccttgggcaggtgacctctccgagcctcggtttcctcgccgtaaaatgaagatcctaatagtccctaccagaaggttgtgaatgagacaatagatggaagccctttgcgcggcccctgcacccgtaaacgctcaatcttagttcttactcttgttgttttaagtgtgcaggcaagatagacacagatacataaaaactgtttaagaccacttctcttttttttctttctttctttttttttttttttttttttttttgagacggagtctcgatctgtcgcccaggctggagtgcagtggcgcgaactaggctcaccgcaagctccgcctcccggcttcacgctattctcctgcctcagcctcccgagtagctgggactacaggcgcccgccaccacgccccgctaatttttttgtatttttagtagagacggggtttcaccgtgttagccaggatggtctcgatctcctgacctcgtgatccgcccgcctcggcctcccaaagtactggcgtgagccaccgcgccgggcccccacttctcaactgatgactgcgacactcccttgagggtaaaactaacttctggccacctccacaactgtaaacctggtgtcactcttggtgactccacctcagctaaggcccccacttcctgatctgcctccagcccccttgggcagcactccctggtggggcagtgtggacgttggctggaatccgtcaggtggtgacctaccttcccctcctccaccagacgggagctctttcaggccagtggtttgttgttcatcaagatatccaagtacccggcaacattcctggcatataataggaaggcagatctggtgaatgaatgaatgaatggcggtatctggagcagagacaatgtatgtatatattgctatttatataatgtctgcccccccagtcattttgcccttcagccccaaaatggc

SEQ ID NO: 914092 - DNA, 4001 bp, Homo sapiens
gaaaactgaagcttctcagaaagtgaaaaagaacgtgtgccacaactgggattttttttttcgttgttgttatactaggatacatgtgcacaacatgcaggtttgttacataggtatacatgtgccatgttggtttgctgcacccatcaactcgacatttacattaggtatttctcctaatgctatccctcccccaggcccccacccccctataactgggatttgaaccccattctgttatgctccaaagtttatgctcttccaatctagctacatggtctgtccttagagacactgactgccggggtggggggggaatcctggcatctactttgtgaataaaaattgtctgtctctgaaataaggcaacagtcagcattttcactaggatatataacaagaacagaagagcggaaatgctttaaaacactcttacacacacatacaaggctacctagataaaaaatggataacttatgagtgtcttatccaaacattttaagtttataaaaataagcaattcatcagtgcaataagacagaaaagttatttcacgcagaaaaatataacttaatattcaaagacaattcctgtctccttaagccaatatagaaatggacagaatttacattatctgtatagactataaatatgaccgagtaaaccaagaacacttaccaatcacattatgttttgaactgaagggatctacaattgtttgatctctgtaacttcgaaaaccctggataatcacctagtaaataaaaaacatttttgagaacccaccccacaaaaaaaattaacatttttctcttgcatttctttcttgtttttcatttaatgcaatatagaaaactcgaaatttcatataagaaaaattcattttggaaagtggtgattaaaaatctgctaaaaaaaaaaaaaggtacttttatcggtaatctttgccaaggcaatgctgctgggttttatttttttttaggagttatgctgtcaacctgttaaggacctttcaaaatcaaaaacactgtgtgagcttaactgaaccctaaacgctgcagtacaatagcaagtctataaaagcaggccgacgggccccagctctcctgactccaagaccaccgagtgctgctttcagtcactcacgccggccagcctgaaagaacccacgttccaaagaaggagtgctcagagcccgacagacccaacagaaaaccgtctccaaggccgtgtgcctgggctcatctttgtggtggagtcccgcgcgggaagaccattttgacagaagtaaacaaccgagggaggcggcgctccgtatcctgcaagcaggagggtcccgctcacttcgcgggttaactggggagaagaacggctccccgcagtgacaggtgacgacaccccagccaatgcccccagggccgcccccgggccggggaagccacctttccacacatcccaggcacatgggccgtgtgaggccacccctgcaggaccacacagcccttcccgcccgcggccgccccggcggggtgccccccgccagctctggggccacccaggaaggcccagtccctcccagcggcccgcccgccggcccttccacacctctcggagatcctgcctctcccagacaagcgccagcagggaggccggggctgcaaaggagtgccccaattctccgcgaccccgcagccggggcactagcgggacccgggtctccctcctcccccacagtccccgcccagccctggtccagcctgtggagacaggggagaggctgcgggtggcgccgcaacactcccgcctcaaggagcggcccttaccggcccatgacggggtggagggacgcgaaggccttacctgctttatgtacatgattccgggcccctggcctggaaggagacctgccccggagcagcaaccgcacggccgcagggtcaggtgaggcgcctacgcgacccctcccccaaagcgccgctcgctcccctcagccaaacaaaatggcggcgctcgtgggggcggagtccgcgcctcggacggaaccaccttgcagccttcacagggcgtaggaggagtcaagttcaggtctgctctttcttttaggcaaaaccagtcctccacagcgttttttggtggatttcttttgaatctagaattctgtagctaacgctttcctgagacttagtcaaaagcttcactcggaaaatctatgaccgtagggttggtccgtaccacctccgagcgcggggccaatggtcgcgtccacaaagggggaaaggttccgcgccaaagccaagagggagactccgagggccagtagcgccgcgggctgtcggccacgtgattccgcgctgtttaaaaaagcggacctcgcgcgcactgtgctagccttggaacacatggaatgctggtgattcttggaattctgtgtgcggagtcactgctgcccctttgttatcgctctccataggaacgtttacaatcttagcacgccccaagctggttacgaattgcccactcggaggacaaccccgaagggatttgtcaatgctcgaaaatttgttttaataatgtgatgattaattccgtcgggaactgtttctgttctaccatctgctataaatctaggcagatctgtacaattgcaacaaagatttaggtaaggctgaaagcttttaatccactttaaaaacaaaagaaaacagcctgaaagatactaggtgctagtggcaaccctaggtctgtctgatccttgtcagtcttgggagaaaaacatcatttgtttagaaaatgaatctctgggctgctctgaaattacttgctgggaagagaacaaaataactacccaaatcatccccagccccacccccgcccgctgctggagacaattctggccctaattatttctagattgaactatttttagtagcctcctaactgcctctgctaaccagggtatctccctaggagtcctttatctggagcccggatcaaatcctatccagcccttggtttaaaaaaataaataggcctggtcgagtggctcaagcgtgtaatcccagcactttgggaggctgaggggggaggatcacctgaggtcacgagttcaagaccagcctggccagcatggcgaaacccccgtctctactcgaaatacaaaaattagctgggcgtcgtggcgggtgcctgtaatcccagttagtcgggaggctggggcaggagaattgcttgaatccaggaggcagaggttgcagtgagccaagatcgcgccactgcactccagcctgggcaacagagcgagactgtctcaaaataaattaaataaatatgtaagcattttcttttctttatttctaacttttttttttttttttgacaggatcttgctctgtcacccagggtggagctggagcatagtggctcggtcatggttcactgcagcctcaaactcctgggttcaagccatcctcccacctcagcctacaggctgtggccaccaagcccagcttttttttgtttttgtagagaccaggtctccttatgttgcccaggctggtctctaacttctggcctcaagcgatcctcccacctctgcctccctaaatgctgggattacaggaatgagccactgcactcaatctaaacattttacttctagattttagttgtattatttaaagcttaggacaggtatggtggttcacgcctgtaatcccagcactttgggaggcccaggtgggtggatcacttgaggtcaggagtttcagaacagtctggccaacgtggcagataggattatcttatacatcctgtttgtaattctaaatatgatggagttttatcatcttcattttatagactaggaagtggaggctcagcatggcaaaactccgtctctactaaaaatacaaaaattagctgggcgtggtgcagacgcctgtaatctcagctactcaggaagctgaggcaggagaatcacttgaacccaggaggcagaggtt

SEQ ID NO: 914093 - DNA, 4001 bp, Homo sapiens
tatacaaagcacttgtctctctttaggcatttttgtggtgtgttttcaatacaaaatgtaatccactagctttggggaaaaaaaaaaggcacgcattttcaaagaatcttgtggtattaaaaagaatcttaaggttctatttttctccttcaatctttgttactttttgaactaaatttcatttgccaggtcttaaaaactaaaagcgtttttcattgtgaagttacatgtacctctcgtcttgaaaatctgacagacttggaaatttctatcaactttagtttttaaaaattatgtaagcacacaagatttatataacaaagaacaatatttcactctgatgtacagaaacctgagaactggggaagcaaccctacttctacaagcaatggtacctacagaatttacatatatacatagggtggggtgtaacccctcaaaaggcgctttgggtacttagggattcaagcaataatttgaaaaacagagaaaaagtacaattgtctacccatacttacttgtaaatctttcttcaattttagcaaatcttcattttctccatttccagataatgcagcttcaacttgctggagctgagctttgtagcttgccagctgctttgctaaatcctctgacatctagggaaaataaaaagggttagaccatgaaaactaaaccaaaaatcaaggcataaaaaactaactcccctgtctgcctgaattaccagtttttgcctctaactccttctaacactgcagcttaatttaccaccattacctttactctcagtttagacttcagctaaaccacaaacttaaaggcaacagattctgaggattataaacttgagatacattccatactttaaaaaagcatacagatacaaagaaatttctaattttcttttaactcctatccacagggtaggtgctgaattcggctcaataatcagtgttatctttttaaaaagcactactctgttggaaaagtcgaaactttcaaaaacaatccaaatacttatttttaagcactacagtatgcttccaaagccaaacaagtgcgtttttaaattaactacacaaactacgatctttacttgaactattcaattaagagtgtatttaaaagtgcctctccaaaacaaaaatctttcgcccagtcgcttaaatatttatcggtgcattatcttcagcaaaaagaacagcacaggtactctcccatttaggcattctaacgaatgtgcctttcgccaaatccagctcagtcattttcctgaaaataagataccaattaaccttttttgatggtttataagcaaatgtaccacgtttccgaggacccttctccttcgtaaaattcccgtccaaccaaaggctgggagcctgcaaaggccccctaagagttacagcgacccaggctgctctcctccccgccacgcagcacctcaaagcccgccacaactcgatcattcggacgtggaaatccacacgccagctccaagaccaccgccggagccccgccgcgctccaacaggcaggctccacagggagccgcgcggcgcccagccccacccgacccggtcccctgcgggccgtgtttgccgccgccgcacggaggccagcgccggccgggccgccgaggctcagctctggctgagagacggccgtggctccgggatccagggccagcgcctgggcgtctccggcgaggcgggctcctcagccttgggcctccgcttcacctcgggagggacccgggcccggccaggccttactctctccctcaggggggttgttaccttgtgtggggctgggggcggggcggcgggaaggggtcggggcaaatgagcccagtggtagtggcggtggcagcagcagcagtagcagtagcaggaaaatcaccgcgacgacagcaaggcgacccggtctgaaaaggaagaactcggtcggcggcgagggggaagggaggaacgccgggcactggaaggaggaaaagacagagacggtgaagtctcgcgagaaatacaaactctcgcgcgaggtcgctcgactcacgtgactccgcgcgccctctagccagtccctggctgtcagggacacgaagtaggcggggcctaggaaggaaatggcgtagctgggcttcgccaggcgcggaatgcaggttatcttcctggagttccggcttggaatttattggaaatgcaaattctcaagccccaccccagacctcctgaatccagagactcttgttttaataagctcaccagatgataccaatgtccgctgacgtttgagaaccactgcttttccggggcggtggtggtgggtggcggggggtgttggtgggggctctctttacgttgccctggctggtctccagctcctgggctcaagctatcctcctgcatcggcatcccaaaatgctaggattacaggcgtgagccaccgcgcccagcctgagaaccactactttatatgatacaagccttagtagtaacagaaagctaattaaatcgtgacagaaataacctattggagagaagattgatttctttaaaatctgttttgttaaaacctacttggttttaatttagttgggttaatctcgcctgatagggaacaacgtccaagttagtctagaatggtaaagagtggtaggaatactcacatttgtgttcaaaaagaaatgccccttgtgtatgtttgtaataatatatacgctttctggacggatacacaaaactgttcagaggtttggagtggaagccaaatgttttattgattaccctctttgctgtttaccctttttccttttcttttttttttaaaccatatatatataatttatttcaattaaaaaagcaataaaggcctgagacacaaagttttatatagatgacaggaagcaacctttcctgggaggttgggagtttgttgctggatccataaaaaggcccacttctcgcggatcacctgaggtcaggagttcgagaccagctcgaccacgtggagaaaccccgtctctactaaaaatacaaaaaaaaaaaaccaacaacaacaacaacaacaaaaagccgagcatgttggtgcattcctgtaatcccagctgctcgggtggctgaggcaggagaatcgcttgaacctggaggcggcggttgcggtgagccgagatcgtgccattgcactccagcctgggcagcaagagtgaaactccgtctcaaaaaaaaaaaaaaaggcccacttctcagatgggctcttttgaactgtgccaacatctttagttcctagttttcttttcaaggagccttcccttttgttctctacacacacacacataacccttgcagtgagtcagataacctgtatagatggaaactaggtcgggtttgtgagtgtgaaagattgaaattgcagcagagggcagcagtgtgtagctagaattaagaaggcagacaaaacagaaagcatgtgcttttaaataaatattcgtttaaaataaaatgtagttttagagaacttctgttattgtaattgtgtgttttaagaaccgatgcgaggaggaacttccttgaatataaagtcaaccttattgtgtaaaaatctcttaaatgagaacttttcctgaaccccatagatcagaaaataggcaaatattcattataagttccatcatagatttctataccatcttaataattttttcaggattgtttttaggattgtttttatctatgcaacattcatttataaagaaaagctatattgaattttaattttcacaaagaaataacagtttgtatgtgccagataccattctaagcactttacacaggttcatttaattttcacaattgtatgcggtgttgctccagacaaaactggagcagacaaaactaagagcaatacttcaaataggctttctgaattactatttcctttgaagtgtcaaaatttactttcagtgtctgatttttcttaaaacatttgcattcaaacttaatc

SEQ ID NO: 914094 - DNA, 4001 bp, Homo sapiens
ggccctgggggcggggctggtgctactcagcccccggcctggtgaccactgcccgggaggctgcctgtcaccgtgtgggatcctgttttcacttataaaatggggtgtctcctaagtgctgagagccgtccggaagatgtggttttgagcctcactttccttgtctatgagatgggctcccaagtcccccgaaggggtggttgtggtgattccagacccgaatgcaggtcgaacagcaagcatggaccccaccccatgccggcgctcagtgggtactgaaactgaagccagccgcagccccccgtgttgtttcctggggtgtggagtggagtgatgccgcctccgcccagcagcctttctgggcccaggagaggactgggcaggtctgagggccggggctcaccttgcgcaccaccccggaggtgaccgcgatgttctccgcctcctccacggtcttggtggccacagtgttgacgctgctcaccacagcctcgctcacggcgttggcctgctccttggtcttctcggccactatgggaggacactggctggcctccaccccagccccagccccaaggcaggcctgctggagtcaggctcgcagccccttcccaggagctcagagccctggccctgctgggaccctcccctgctccctctgactccagggcacctctgatgctggtgggggtaaggagacgcccaccctagtttagcctcatggtctgcaggggtctgtagggcttgggaccccagttgggggtaaggcaggactctaggtttgagccccagcactaggatgcaggagccccaggggtcctatcccccatgtgtcccctggccctggggcttctcacctgaggtcacgctctgtacaacattctccttggtcttggctcctggggaggaaatggagctgtcagcccagacctccctcgaggtgttgggggcggtcaggacaaacacaacagaacagctggacaaactgtggggtcggtgggggggtaaggatggtgtctgggggccggcggccccttcagagggcctcttcctgctgtgtctggaagaagtggatggatgggaaggggacaggacagaatgtgggggacaagagagagcaggcctgaggtagggacactggctagacccagggtccagcccctgcccgggtgtggccgggcctcagaagcagcaacaggacaggatgggccagagctgagtcattggcttgacctccccttcctcctctggagagtgccaggagaggatgcgggggagggaacactgagcctaggtttcatcccccagcctgccccttctctctggggagggaggggatccgtgacctggctgtagccgctcccgtgtggagagggtgggggccacctgagcacaggctgctcatggcttcaggggctccaggctcaggggaggctggtatgcttgggaatgtgtgtgtgcgtgcacagacaggtagccagccctgtctgcggtctctgacacccagaggccccgaggaggccaaagacaaacacacataggtgtgcacagggcattgtgggtgctccagggtctggagaccccaccttgatagccagggcctcgccccctcccaaaatgcctccctggggctggggagtaaggtctggcgaaggtaactgggcactcaccctttggccaccacactgtcccaccctgccatgccccacttacccacatacatgaccccctccttggtcttctcagctgcttccgtcaccccctgcttggtcttttccaccgcacccaccacgccctccttggcgatggagaagcccttcttgaagacatccatggtgggtgtgcagggttgtgctgctgcaggcaggacggagctggatctccctgcgagctgcgggcttgagctggctcgagtgctgccgcagcggctgtccccgatgcctcctattgacgccgatgaaatattgatgcggaggccagctggagcccagccagccctgcgtgcagtgggggcggggagggagggagggagggaaggaggttcagcctcaccttcctccaggataggaaggcagagaccaggctccctgggctcctgctggctcagcccagctctcctgccccgtgccctccatgggctggagggggctggccacctcccaacctgtccctcattcatttactgccctgcccacccatgggggcagccctggctgggtgctcttggccccaggggtgctgtgtctatgctgcacctggacagacaggcacagagaggggaggcgccttggccattgtccccagcttcctaggtaggggtcagggccacataggcctgttaggtgagagcagccaacctcccgcggcctgggctgtgcagctacccaccagcatcctggatgccgctggaccctgggctgccatgaaaccggttggaggatctgaggtgggtgggggtggggaaatgaaggacttcctcatgccttggcctctggctgcatgctgtgtgaccccagaatagtcccttcccttctttgagccgcccagtgctgaaggtgctgaggaggcatgaattgccccccatttcctggccagcagtgtggatgggcagcaggtcccctgagatggacctgaccacttcctgtggccccacctcgaagtccacgctcttttcatggctcccagggagcaggttcccataaggatgcatttggtggggccaccccatgtctaccacattcccagagtccctgagccaagtcctcagggacaggaactggcttgtgtggttggcggcccctgtggggccagccagggtagttggggggcaggacaagacccaccgggtaggccggcccaggccacttcctctctttgttgtcctcgtattttcttttcctcctgagatttaacttgaagacaacgtcactagcagtttctggagctacttgccaaggctgagtgtgagctgagcctgccccaccaccaagatgatcctgagcttgctgttcagccttgggggccccctgggctgggggctgctgggggcatgggcccaggcttccagtactagcctctctgatctgcagagctccaggacacctggggtctggaaggcagaggctgaggacaccggcaaggaccccgtaggacggtaagagggcctggaccttggcagaggtcatggagtaggatctgagtcccagctcagctagagcagagcctctctagacctcactggggtcccatctgtgaaatgggctaatagtatctatctctgggccatctgtgaggctgaaaaagtagtctggactgggtgtttcaggatccacctaagaattgcagggagttccctgtcggagccatggcagggaatggggcttggggggctggcagggaggcacagctcctaccatcaatcacccagcatggggcactgggggactgtggctgaagccattgccagctggcctggctatgcctcctgttcttccaaagaaatcaattctgaaagctgagacccagcaaggctgccctgagattttgatctgagttccctggggacctgactctgactgcccagcagtgagcagagacggccccctgctctccagagcacagtccagggcgctctgcctcagcgacccagcaagtgggcaggatggtcttgcaactggacccagaacatagctttccaacattctatgtgtacagagccagggcccatcctgctgatgaggtgttgggcctgtaagtcccccctcatctccaactgcccctcagtcagagcagcaggtgctgtttacggggcccccagtctcagggccaggcaccttgccacgtgtatctcagttcatccctccaacagccccacttacagaggaggagcctgaggctcagagaggctgaggggcttgcccaaggccacacagctaaggagcaggatctgagtttgacttcagagctcatagtgaactctctgcagcacttggagccagccc

SEQ ID NO: 914095 - DNA, 4001 bp, Homo sapiens
taaatacacataacgtacttactcatacccccccttcatgtaggtgatatttttgtttccttggaattaagatagaaattcccaagagtgggatcatcaggtcaaaggctccagaatttctgaactcttcctaggcaacgcctccttccaaccccccacctgagagagagattctggggagcagtctcctgggcttttccacacccatacccttcttccaggcccctcccttcctccttctctggcccttgatgccaagagtagtaaagcaaagtgaggccagttctgccactggacgagaaagtagctttaggctacagagaaaaagttaaaaacaaaataaagcaaaacatcatggcctattttaaatgacaacaaaagcaaaaagccaaggagacaacaaaaaatgagttacgaagcaggagctactggcagtacccgagcctgcttagaggggaaaaggtgcacggcctcttcgcacacagcaaaagcactcaaggaattgctgagaagccaagtccctggctttgcagggaggaactcagctcataacagtaagagcccaaagatgaagcacttgctatgccttggacacagagctcagcactttaaaagcactgccttaggctagctaggcacggtggcggagaggggcggatcacctgaggtcaggagttcgagacctggtcaacatggtcaacatggtgaaaccccgtctctattaaaaatacaaaaatattagccaggcgtggtgatgggcacctgtaatctcagctactcgggaggctgaggcaggagaatcacttgaactcaggaggcagagattggagtgagccaagatcacgccactgcactctagcttgggtgacagatcgagactctgtctcaaaaataaataaataaaagcattgcctcacttaatcctcactaaatcccaatgaactggtgtttttattatgtccattttgcagaggagaagggtccaccacaggcccaaggctatgcagccagtaaacactgaggtcagggtgtgggcctcagctattccagcccagagccttcctaggtctgaactacatactgtcctactcagaacttgcctaaaacggcattgtatgcaaataaatggaaaagggtgatttttaatccacagaggtcactgacaacactcacgaaatacggcaggattgggagactccggaatgagatatccacatgatcatcttcccaccccacagcctgccccacctgcaggtctcaggagggtccagggcatgctcagtagcctaggtggggctgaatctccagatggaaacttctctgctccaattctgggttggaaagctgacagctcttagctgcatgatgagcagggatctgttcccatctctgtcttccctaacccacgttttctacctcagctcaaaactaaaaatactcaaaactgattatttctttaggtcttgacttttactaccaaaggcaaagcaaaagagggagcaaactactctactagcctagatgaaggaagcattagattagttcacatccttgggcaattatggccaatcagtttacttttgctgcagtcacccagattaagaaatgccatgaaggtgtaacacatatgtcaaattttatcaaattgtatactaaaaatatctgtggtttatagtatgccagttacatctcaataaagagagggctaatgtgcatgtaaagtgtatagcacagttctttggcaatagtagtaggcactcaaaaaatcattaaccatgaaggtgatgagagtgatgatgacaacttatgacaaagctttggcattcacccaggtggcaaaaaataaaaaataaaatgccagagtggggccttcagggtgcgtgggaaatctgggtaaactgcccagtttggtagataagagaaagatgagtttaaaatgacttaccagaactcatggtggtggcaggacaagtcgtctgcaactggggctctgaactgctctgtagaaaaacaaacaccacacaatgcaattgatgaatggcaggttcgcgataaatcccaatggttagtattaaaaatgcaaacactgtaacccttgataaaacagagctgaaccaggagtcacctggccaggcttctggtttgtggtcacccacatattattgtgaccttgggcacatcactcaacctcactggtttcagttttgttgcccatatttggtgctgatgttatccgacatccctttcaaacattctattaaaaacctcaagctacacgagtgcacgtggtttaaagagagggtaaaggaaaggggaaaaaacacattttaggagaaagaggtaaaatcacaacacaaactgatttgagaacttactgatcatactgaatgcttatatatagcttactatgcacaaggaaatgttctaaatgctttgaatatattaacgcatttgaccctcacaaccctaggaggtaaccactaatgtcaggttagttacacagatgaggaaaccgagacacagacaggtgaagctgtgtgcttgctgcagtggaggagctgatactggaacccagacagcctgactttctggcccaagttcctatgcactgtgctctaccacctggaggtgggaaccaatccctgatgttcaaatggataaccccttaatttagtagggtctcaaagaaagctgaaattatactgacaatgccctaatatatatccagatcttttattgagttatagtttgcatataaccaaaaatatccattttaattgtacaattcgatgagttttgacaaatatatacatcctataaccaccaccgcaatcacaatatacagcctttccatcaccccaaaaagttcccatgtgtatctctacagccaagtaccatctcaggtccctgttaacgactgatctgctttctgttactattgttttaccttttccaggattttatataaatggtatcatagtacaggtaatcctttgtgtctggcttctctcgtttagcataacacttctgaaaagcaactggttagatatggctgggtcaatttctggactcttttctgtttcagtgagctgtctttatctgataactcactgtcttgattactgtagttttacatagccttgaaatcaggtaatatgagtgatagagtttagatatttgtccctgcccaaatctcacattaaaatgcaatccccgatgttggaggtgggcgtggtgggaggtgtttggatcatgggggtggatatctcatggcctggtgctatctctgcaatagcgagttctcacaagacctggtcatttaaaagtatgtggcaccccccccccgcacccttacttatgctcttgtcgtgtgacacgcctgctcccccttcgccttccaccatgatgggaagcttcctgaggctccccagaagccaagcagatgcttcctgtacagttagcttacagaactgtgagccaattaaaccccttttctttataaatgacccagtctctggtatttctttatagctgtgcaagaatggcctaatacagtgagtcttccaacttgagtttttttccaaaatcattttggctattttagatcctttgcattttcatataaagtttaaaaccaccttaacaatttctacctaaaaaagtctgttgagattttgactggaatcatgttgaatctatagatcaatctgtggaaaactaacatttttaacaatattgagtcttccagttcatgagtatgacctatctctccctttttccaggacttctttaatttctcttggtaatgttttatagttttttcaaagtacaagtcttgtacatacctcgactaataaggtcttactgaacacatctgaaggtcacacaatctgaaaaacaagtcctcgggatatgtagaaccttgatatttcaagtgtggtccacaggccagcagcattcacattagctgggagcttactgaaaacgtagaagcggccggg

SEQ ID NO: 914096 - DNA, 4001 bp, Homo sapiens
taggagaaggaaaaggccaacaaggcgggtatcgtccacaagatgacaataccctcccaactctttaccccacagggtagacagcagttcatttcagttgctaattccctgcagggaagtcgccaaaggagtggtctcagggccctccagctgagaaatgtgctctctgcaacccctggagaactaaccctttcctaaccatctgctccaacagtgccttgggcaaaggtgccaacagaccaacccttcccttctttcccctcaggccaagaaagagacatcagagcttggttggcaaggggctatttaaggcagcatccagagggcggggcagaaaactgctggaggcatcctcctcctccacccctccccctcacagcccaaacacacgcccctcactctgtagacagccatctgcctcatcggtgtctgaaggctgtagatatgtccatcatctgtcttctgtcattgatgctgctgacccctctgtgtccaccccacttttaatccaaccctcctctcttcgatcaccaccaagatacctttccaaccaaaaccacagaattgaatctaagcagaggagctcaaaacacaaggagagtgaagacagccaatccatcccccgcctccacttaagaggaaaaaagggcgcggggggctgggcgggggggggggtgttgaggggagagatggagtcagaggcctgacacgccagataggttccatgatgtctctagatgaacctccctcctattgacgatgaaaccaattccagcaatttcagcaggtcggccctgtgacaacaggggcatcccaacgctcagtgtttaaaacaaaaatccaaaggctcgcccagaacatgctgggaaaaaccgaggactgaacaaaacgagccatgctcagtgggatcccttctgcttttacgtagcaatgtaatagcgtaataaattcttgtctgcctggagaaagcatgcactggtgaatttcaaagccatcttacgacagcggatgcatggggatgcagaattcgacagcacattcccccatgaaggaaacataatgacttcaagcctctttcccctctatcttgaatggcgctaccacgtatcaaggaagccacatcggaaagcagcgaggtggtagcaggggatgcccggggaattcggagaaaggagttgcttgctgtccatgtcggtgatgagctgcctagcaagatgctgtcagccactcggggagaagaaggggcacgggcggcacgggcaggcgccgtgtccccggcgcatactagtccccgttcattcaggcgggtccggccaaccgcgtcgtccttgcgcccctcccgccgccctctccaggggatgctgatgaatgaacacacctgagatgcctccatcccgccgctcgctccctccgccttcctctggctgctgcagaggtgcccctcctcggtagtttcactttacagcacaaacccattcgggctttgatgtctcctccacccacccaaattgcagccaccctgagacgggcggacattctctcctagcagaggccatgatcgtactaccccacacccaccaaaaaaggaaatttaaaaacccccaaccctggaagcccccagatcctccgcaccctggggaactttccttgaaagactggggattcgccgagcaggcaggatggacggttcggccgcgagggaccaccgctttccctgtgcccatggggggatgctctgggggagggggtcccccaagtccctccaacagctggccctttaaatgcgcctcctccgagcgcggaacaaaggcgccgcccgcgggggccgagccgcgcacacccccggcgctgccgccgccgagcgggcaagcgcggccgggcgggcgagcgcgggcttaccttgctggtcgccgggcgggcgggctgcgcgcgtccgccccactcgcactacacgctgcagctggccccgctctgtttttctgggactcagcgctgacttcaccgacactccgcggacaaccaatgggctgcggtgcccgccccctcattagcatgcctctggaaccgtccactctggcagcgcccggccagcgggcggtgccgggggcggggccgggcccagccgtgacaggaaggggcgtgtgcgcggatgggaggcgaagaagtgtccggcgcccggctcctggcattgtgagcccgccggcctccgccggtaacgggcgcgcgggcctagtaaccctttccgtcctggccgggccggacgctggcctggcgcgccttctggtccttcggaagggtcgcccacggggagcttggaaggaaccttagacgtaaaataacagtgataagttatttaactcctgggcctcagtttacccatctgtaaaatggcataatagtccgacttcgtaaaatctagtgaagattaacatagttaacataggtgatgcattttgatcagttcctggccgtcgtgctacataaacgtttgctgttgtcattcgtgtgctctgtaccagccagtgtgcttaatgcttcccggatatttcctcatttgatcctcttagcctgataagagaggaacgattactaatccatatttttctagtgagaaaactgaaaataattactatttttatgcaggaaaactgaggtgtagtttaagtggcttgtccgaggtcacacagcaagtggtgcaaccaggatttgaacccaggctctgagatttcactcatgcaacacacatatatttagaggctctgtggcagtgctggaccccagtgttaactgcagagaacaagacaggcaaggccttttcccttaggaagcttccattttagtggagacaagtaaataaataagatcctctacaatgtgaaaagtagagtgcatacaatgcaacaaggtcattgcaagtggggggaaggcaccgtgttagatggggttcagagctaaccactgtgctatgccattctcctgacctcctctagtccccctcagagttacagaaaaggaaacagagacagggatcagagtggggaatctgctggcccaaggtcgcagagccagcaagtactggtctggaacttgctccctccatgcccagcttcccacatccctgaagataagacactcgccctttgggctgagcacaactgatttttgtcagctgcccttgcaagcatcttcagccagagcacattctcagtgaacaggctgtgggtggcagggtaaagactggccttgataactgcacagactgatcggaaactcatcagcaaagattcttagatgtcagggaacggtgacaagtctttggtgaccacctggtgtcctctgctgtgtattaaaaaaaaaaagaagagtcctagccatctggaagcttactctataaatgagaaaacactggggaactactcaacctagggagcccccagcccacggccttcccctatctgcacctcatcctgcagcttttcaaagaacacttccccggctctcctatttatttactccacaatctgtgtaagacagctctctctgggctataaagtaataaaacagctagtatttattgagcacgtctaggctgctatgcaccgtactatacttgtgctaagagctttacatgcgttaactcacatccaccacacgaccccaggtgggaatagtgtcgttatcctgaggttatccacagaggtgtataacaaagggtagagagactagttacttacccagcaaattcagggcaacaccattttagaatagccaaaaaaaaaaaaaatcaaaacaatccaaatatccaatttgagtgcattggttaataatagtacaaccatatgacagaatatcatatattaatagctacaaaaaatgaagaggtttattgacacataaagatgctcataataggctgggagtggtggctcacgcctgtaatcccagcactctaggaggccaaggtgggcagcggtggatcacctgagctcaggagtttgaga

SEQ ID NO: 914097 - DNA, 4001 bp, Homo sapiens
ttcacaactctcattaaaaagctgacaatgagcacaactcactaaagtggcacttctctgggaaggtttctgggaattacatcacaacagaaaacgttttgaaaggttccagactgcgtaaattgtgcatattacaaacactacaatctcaattacctggttgaagctgtaaaacttgaaatttttttcccccattttacccatccttggttgttatgttcttgtctatgtctggagaagtttccacactttaaaatcacttttagttattacaatcaaagctggttctctactatttcaactcactgaagtttctaggttcaatttaaacaggaatagctccctcagattgcagacatgcaagcttttctgaaaatctaaaacctttcctgataggaccaaagctcatggacttgcatcctaagtcccctggaatccagcctcctggaattgagcaatccctttcctgccttcataaagggaatgttaagtctttatttgtgctcttcattagaggaggtcaggcaatgggggagaacagggagttgttgtcactgggatatatctgatcttcctgggactgaccatgccagagaacaaccgctcattcacgggctggaaagccccagttctcaaaacaccctcgcttagcgctgttagaagatgctggagagttcctgccctgaaacttgcatccacttggtccctaaagcagaggatacactaaagaacaccttatatactctccactgcagttctcccttgtggagaagaaggggttaggagctccgcatgaaattaaaataaaataaaataaaacgcctacatatatgggtcttcttaatcttctttgagccagtacataggtctggcaagtaaagggaaagtcacttgaggggatgtcagcttgcctggaaatttaaccctttcatctctgtattaggagaactttaacccctctgtttacctggtcttcagttccacacaccaatgcgaccaaggcaacaggaaatagggatttgactcctcagtttgaagctgtggcatttggagaggactctgatggtgttggtgggagagatggggaggttggtctcctagtaggtgatgttaactcttgggggaagtgggcagagaccagtttgcagcatctcccatgtccagaaaccctatttccccccaattctccatcagatcacacagccgactttaaccctttccatctttccacccctttaccctcagtcccattctactcacgctgctgttgtggccagaccagtggaccatggcttggttgtgtgctgagtctcccgtcagcgcaaacgtggtgctggtcagtctcagctcctccatccggaagcgggtggctttgtccgggtcccgctcccgagtcccaggctcctgctgccctccatctcttagcactccccgggggctccgactcgcgccctctccccgttctgccttctcctgatccgctccgctccgtctcctccggccggagcgtgcagcaaccgccatggatgccccagtgccccgagcccgctccagggatagcgctcggtccccgggggccactgagaacaggggacgcactacgaggggcaggggcgtggcaggagccctgcctggccgcccctggtgggaaaagcccctaggggtcgaggccgagcgtggagcggagctggggtgcggcgaggggcagcaggagccgccgccgcagacgcccggggcgcagaggatcaagagccccgcgccggcgaggagcgcgctcagccgggcttgggagccgccgccggcgccaacttttcccatcgcgggagcgaagagcagcggagagaggggtcccagaacgaaggtggcggcacgagctctgcgctggcggctgtggggggccggcgctcaggaccccaactccatccaagttgcgccgcggtgggggcgggcggaggcggcgccgggcaggtggcggccgcttgcccgggctgggcttgtgccgagcgcgggtccggacggagcgagccgccgccgcgcgggggtggagctgagctgaagtcactggcggagcgggcgcgggcgctggcgggcgacgcgggagggagggcaggcgctgccgggactccgggcgccgcgtcccgcggccgagctgcgctgcgcaccgggtctccgggcgctggaggcgccgccggcgacctcccctcggcctcgcaggcgctgccgccgcctctccccgccgcccactctgcgcccccgcggccgcgggtcccggcgctgagtccgcgcaccctgcccgcgggggcggtcgaccccgggctcccggagcagtcgatgtgtcgggagcttcctattcctgctttattgtttctatgagtctatgttgctgtttccttttttctccgtctttctggtcttttctagttgaggagatagggatgggtgggcttctgctccttccctctcttatgcttcctgagttggcatcttgaccttacccgcagcagagcctgtgtgtcccagcctggggggagatcccggaaaggcagcagcagagagtgatgtaattaaatgatctcgtgtgtgagtgtgtgtgtgtgtgtgtgtgtgtgtgtgttagtttgggggattttttttcccatcaattttaacgcttagatttctctcctaacctcctaaagcattcactgaatttgaacccaatcttcctgcatgcaatcatatttaagaaaacgctttccactacgcgttttttaagcgtatatatcttggtttccctaagagactgcaaactcattgaggacaggaagatcaaatttcgagcaacttggaggaagtgacctgttttttgtttaccattttcctcagtacgtggcacagtaccctacatgggaggaaatctgccagtcattagttcaataaatatttattgtgagtctaatgcatatctgcataacaaataaatacaggaaaggaggcacagtacttatagttattctgtgtcacttggtgcctggcccagtgctactgccacatgctttgagatccctaatagcaagtctgtgatggtgctctgccactggtttgctttgggacctcagacaaatcacaatctgtcagcttcctaagctttaaaattaaatggtcacattagatgacctttaaaatcccttccgctcctaaaattctataattgtatgattatagtatctgcccagcctagcaccctgctactattcgtaagttcagatgaagatttatagcaggtgaatgggctttgaaaacggcaaaggatttctcaaaatccaatcctttttaaagtagacagtttgcttctaagggttgaaatggtttcagatttctttgcagtcttcatatacgtaatattctcttaggtacatgttattacattatttaatgaatatttactgattgaataaatgaatgacacaacaaaatagtaccgattccagtttctagttacatttttgttcattttcatactagaataataacctcactgaaaaatctgtataccgtgtttgcgatgaggccaagttcaaagtaatacagagtgataattactcttcaattaatgaaattctttctaatgtccaagaaaacgtctgttatatcaatccaatccagagaggtgttgtaaaatatcggcctaagttcttgttcttacgaccagcgcagaaaaagtgcaaatgcaaggagggcaggcttctcagccattaaacttgagtacctaaaaggacctaaaagagtgtcctgtttgtcgttaaagaagaaatacaagcaaaagctcctttatgcctgaatcctccaaaacagaaaggctgtctggcaggctatggcctctagatggaggagaggagagccagaggtcctctctcctcctcaaattgcaaatgttctttgtcaaaacccagagcggtagttttttctttcctcagaaaggtttttagagctttgcaggatcatttacttaatgacttctt

SEQ ID NO: 914098 - DNA, 4001 bp, Homo sapiens
agccagagaagaggaaaggattttccaaatctggctctagtagggaccgcgggagggagggaagtcggggagatggtgggaacctgtcccccgccttttctttgcttggctgcacagcgctgggtgccggcgaggtagggggagcccctccgggcacgcgctgcgggccgctgcagctgccaggcaggcgcgatgctcagtcgggcgcccagttcggaatgccggagtaggccagaccgggctcaacgacgccacctctcggtacatccttgtccaggagaacccggtggcggggaaaagcgggtggagaggtgtgcaggaagctcaggcacccaactccgctcagggagccgtttgtggcgcaggacgcaatggtgaagtcgagagttttctgctgagcgacttccgtgtgcctgtgcgtgcgtgagggcgagcggtgtggcatgagcgctggatgggtgtggaatttcgcttcacgctttaaacttttttttacggcctctgctacggctttccagggccgctccctggactttgaaggaggaaccggggttacctgaaggccaaggctgggggccgacttggccgagcctccctcttgggctggaggactgcgcgcctggagcggatagcagcgaccccgaggcgagcaggaggctgggagtccgaatggccttccgggttccctttcgcgtgacgggagggggggtgggggtggggtgggggtagggggagcccggcagccgcaggaatcggtctgttcagcggctcccgccccaagtcagccctttttctcatccaagaattcaagcaccccgcaaacaggaaaactgaccctccaagccaagtattggagaaagtgagcacagatccctcccccactcatctttaagaagccccttcctccactcccctcccggcggccgaagcctagggtctccagtaaacaaacacacacagcgtctaacaacaaactccgttaacctgttgggggcgtggggggaatcggacaaacctgttatctcgaaaagtcgaggcgtcccccgcctcgacccccgagcaactatctgtccctcgctcccacccacccccccattccccttcggtgtcaggaaacaggcggacccgccgccgggtgggtactcacgctgctgttgtgtcccgaccagtgcaccatggcttggttgtgggccgagtccccggtcagcgcgaaggaggtgctgggcagccggaggtcttcagccgccgaccccccagcccgcggcgccttcacctcctcccgggaacccttagcaaggggacggcttcctctggaaccatcggccggagcagtggcccaggcgtccccgcgttcctgggtgattgggggctgcgcccggcgactcctcctcgcgccgccaagcttggcaggagctgggatgccccggccccgccgctcgcctgccggtgatgtccctccggcttccacctgcatctcaccgcctctgccgccgccctgctggggcagcagctctggtccggcccggcgccccagcacggcggctctccgcgccgacgccagctcctccggccactggctggccactgcccgcggcgagagtggagacaacgccggtggccgcgaagccggggccgccgggcgtccgggaccgcctgtcgcgtcccaagtgatctcggcgccggccaggacccacgtcgacaagagtaggagccccgtccggacaagcggcgcccccggcctgcctgcggggcgctccgtgcgcgccgcctccatcccgctgcggctaccgcggctcgggctgccgagtgtgtggcgcccgccgaggtgcgggtccggcgcggggggtgtgcgcgcgccggcgagcgagcgagcgtgtgtgtgtagggggagtggggagggggcggccgggaaggaggtggctccggctggcgcgcctcgccggtcctctccactcttccctcctagctcccgctcgcccgttctcttgtccagagggtgattccaaacccgaggaaaattaataattgccccttcggtgctttctttcttaaaatcagattccccccaatcctccccactgagctcctccagaaatttggtaaaaaggagtaatcaaaggtaataagaaaatcttcttaaaatatgaaaatcaagccggatccaggaggggccggcaatagaccccaatcccgagtctctccgaaatccagcctccaacgtgctcccggcgaagagttgggagccgcttctggacgcgtttgggggtttactcttcgggcctgttatgaggggcgggagatggcgcgcggggagggtacaggggtctcgggggagaaggaggaggagttgtgtgctcaacgccaactgttcgcgttctagagccgagagggagccaggtgcctccgcgcggggaggctgcgcacggaagccaagcgcgggatgcaccctggactctgctcgccgctccctggcccggccggctcccggccaaaccccgccacccaaggcctgcgcccccgcgcgggggcgtggggaatgcgtgcgtgcgcgtgcgtgcgcgcaggcaggcgggcgtgaggcgaggggttcgcagggggccggcgggcagaccgggcgctgccgcgtgggggcacctggctgagccgggccgggagcgcggctgggtgtgagggggcgcgcggttccgtgcgtgcgcgtttgcacgagcatgtgtgcacgttagtgtgagcgatggcaagtggggcgggggcgggaggtgtgcgctcggcttttggtcgcgtgcggatcacgcacgggctgtgtttgcatttccaggagcctgcgagtggtcaaagaggcaatgctgagaactaggcaggccgctctcggcagccccctcctcttggcgccccgagcacccacggcccccactacaagcggttagaacctgataaagcctcctaggggatgagggaaaagaggcggaaggccccggtgggatcggggacttgccagatcttctcggttgagggattctccttgccccgacctcccggccagaggtggggcgagagagtagtcgagatgtctgttcttccagggaggatccagacctcattttgctgcctaggattttgaggtcgtgccctcactctccccagtccgtttctgaacggactcaattgtttcaaagtgtcggccgccagttaagagggtactcaggcgggagccgcgtgggcttatctggtccccaatccgctactgcaggagtgtagcctgcgcgcttggtgcagctgagatccttcgtgaccgtaggaagaaggagacttcaggtgggctgaagggaaatgagctaaacccacagacgacctcgagctgcggtttacaggccccaggacatgtggtgtagctcgccgcctccgagaagcccctgggattctaggggttgaaaagtctgagactagaggagctagaggaggagctattaagaaaggaggaggcaggagggaggaggcttagggagagagagacagcctccagccctgctcctccccttcgggagtagatagagttcctcctctctagaagatggttaaagtggagcgagagggaggggaatgcgcggagaggaaagaaaggtgagaggaaggaatgaaggagaaaatagagggaaaaggggagagaggaaagacaagatgaaggagaaaaggggcgagagaatggtgcaaaaggaagagggagatagaagaggaggcgaaagggcgccaggtaagagccaagagggatggaggaggcagaagaggcgactgagaatctaagctggccaaggaagaagacatccagcgattcccgagagcccccgccctcttgaacttgcctttccacccggtgccaaaatggcaattagcagcgggggaggctgggccaaagaaccaagccagcgacaacgtccggcccagaatggtgcgggtcctggcatctgtgggtttccaaagacagggagtagcgggtattcctaaga

SEQ ID NO: 914099 - DNA, 4001 bp, Homo sapiens
aaactttaaaagtttacactttaaaattacttttaaatacacttctaaaatgtaacatgttctaataccttagtctgtgttagtctgtgtatatgaaatactgtgtgcccagtattgttctgggtacttggaggagtacgggtgcatacacacacacagaatacagaaaatcaacccatataaaacaactatagaacaaaggattatcaattctgaaatgacaaaattttagaaatggagaagagattagtggttgtccagggttagggatagcaggaggtgtgtgtggctataaaagggcaagagagaggatccttgtgacaatgaaagtgttctgtatcttgactgtgctggtggtggatacgcacggaataaaattctataggacaaaacacacacacacacgaacaattaaaaggaggaaacctatataagatcaacgaatttttatcaatgtcaatgtcctccttgtgatattgcactacagttttgaaaaatgttaccattggggaaactgagaaaagggtacacgggatctctctgtattatcccttacagttgtgaatctacaattatttcaaactaaaatgcgtttagaagattataaaatatactttattgtaaatacatgccccccaataaaaacacacaaggaataaatgccaaaaatcctagtgacaaaacgaagtatcacataggtgcagtagtaattcccctcaaagaaacccagagtaatcattacacttaagtattcttgctgtcaacatgttaattgtttaaattatgtgttagttttaaagatcacatcctataaactgaagatttctcatgacacagtagtgataaaatgctaccttacagttcagatggtggtagaatcatccaaaaaaaaagaagaagaaagaagaaagaagaaaagaagaagaagaagaggaagaagaagaagaaagaagaagaagaagaagaagaagaagaagaagaagaagaagaagaagaagaagaagaagaagaagaaccattttctcttatcagtttatgttatgagataagaagatctctctccctccctctccccctctctccccctctcacatctgcaagagtccggactgaggagtagaaggaacgcgccataaggatttcgcaaagtctggtctctacctacttggaatttcttggaaaagattcaagcatatcattcccctttcactaaagcaagacgagaaatcacgtctaaaccactggaattgctttgctgtgaggaagtcgaaggtgatcaaaggcagggtggcatgcaaaatggcacttggataaaatgggtctcattagggtagagtcccattcacgtaaaatgactccaggcaattcctagggcctcgactttcaacctgacacttgcctgtgtgcaatgaagatggaaacagggacaacgcgcacctcccacaaccatctggaagcttcaccctctcggcctgacccccaaagacccgctgaaaagaatggatgcttttgcgaactccggtccccacactgcggctccccaagagctccacgggcagggcagcggggcggaggcgtcggggactcagtgcgcggggggcgacgggggttcgggctccgggctcacccgcgttctgcagcgtctcgatgttttggggtctagtcgccagctccgccaccatctgcacgaactgggtcctggccttctggtattgctcgaacactgcgggagagagagtcggtggagcccaccgcacccgggtctcctcggcgccagctagttagggcacctgcccgcctcggccctaccttgcagcacctgcctctgactcatggcgcccccgccgccgtctgccctcctcgagctctgcggggaagccgctcggcctgcgagtccaccaagggggcgatcgtggcgacgactcggcctccgacgggagccgcttctctgtgtacccgcgtctcccgggcaacctaccggaaccggaacgcggccgtcttgctgcaacggccagtcccgggcgtgacgtcacggccgcggtgcctgggcgcactgagcggggcggcggcgcgaagacgcccgagctcgaggactcggactgctggggctctcagcgcgccaggctcgcggagccgccgggacatcgcgcgccgtcgagtatccctgcactgcccggaggtcggagctccttacaaagcgaccccagattgccgtggtatcctgactgcggcgcgggtcgggaccaagcgccgggagagccccacgcgccaagggagcctggttcgagggcagccagacgagtaaattgcagccctggagttgtctgagcttcgacggtcccgagaaatctcacacgtcacattgtacaatccgatcaacacatgaatgtcaatgcaacttaagtgttgcattgacatttaacactgcactgacagtaaaacactgatttaggaatccgtgttttcttttgtaacccgctgttatatacctggcattcctggtttcaagattcctggaggagcatgacaaccatgttcacacacttaattacactgtattgaaagcatttaatgagcactcagagactcagtgaggaaagcagatgaggaaaggatgtgatgaatgtcctgtcttccctggctttctcctaatgactactaattttgctgtttcctcacttttatgtgatttgtaaatattttgtcttagtcttttaaatttaggcttcgttatgttgatgaatgacatctccaacagaaaaagagagagaacctttacctggaaaaccagacttccctatcttatataacttgaaccctttacccagtttcttttaacaaaattgaagtacttagtctattactggtttctagcttgtctttgaaaactatataccagttgtttcaatgacagttgtcaactttaaatgttcctccatcaaaaactacaatttcaccagatgtcaagtggatacatagccgcagctgctgctaagtagtgccaagacaggaaaccccttgatatttcttcaacagaagggagcatgcaaacttaactggttctatatttggaatgagtcctctatatttatctttgagatctcacccttcactgagctcttgatgaagtcctgatactttgtggagctccaaatagttggggaatggtccagcaatcagagagaagaataagtgtgtttagtcgggtccctaatacccccgaagggcaggtacatgtcttctgcttctgcagctcaaaagccagtgatggccacaatctttttacttaattcaaagtcgtaagttttacagtgatatctatatttccctatgggaatatgtcctttaaaattaaagttatgcgttcccatttagagacgtgggaggaaacagattgagtaaataattaagattgcaaataagccttgtaattttcagttccttgttgaatgatgaaaaaaaatccccttaaaagtttttatatttggtttcagtccttaaacaaacaattcaaactcttaagctactccaactgccatttttagcaactgctttactatttgttttccattttaaaagtgttaagagctcaatagagggggagaggtctaaacctataaacataacacagtatgggatgctactaagttctttgaaaacatacgttcaaaagctatgtaaattactttagagtctgagtatctgttattaacaatatcttttagttaaattgtattattcctgataaaacataatataggatgcctacttcatatctgaaattggacatattaaagaagcttgatctttgctctttattttaggttccttcttaaaaaaatcttaaaaactaaatggagaaatgtatgtaacacagagtgattacaatatgcatataagtgaaattattagtaattcaagcataaaatatggcagattacttttactgacaagaaaaccaatctgtattttctgacccatttttcaatgtactaactcta

SEQ ID NO: 914100 - DNA, 4001 bp, Homo sapiens
tttctggggtcagggccgcggtgagcaccaggtcgccaggagcagccggcgtcgcctctggcgcatccgggcccatcccccacagcacccccaacgatctcggggtccagccacaccctccgcccgccctgcctcacccctgcttccccagcccccaacccggcccggccgagaggaaggagccagccccgccgggccgccgcctgcgacttcccctctgatccacaggtgccggtaaacaaaagtgccgcagctacccccccgcccccaccccgcggagttcggcccaaggttacgccggggttcgggcggcgcccgccgggggcccccaaacccagcttctggactctccccggcttctcaagcccaccgggccgggagccttcctctggctccgagctgctcccctcgctccaggctggattcccccctgaaatgttggtccgggaaaaccagcctgggtcctcgcgcgcccttctgcacggggaccccagcccacccccgtacggacacgccttccaccatctcgcctagaaggctgctgggaccccagacccagagccccggtcacactcccgtcccatgctgtccccctcccgcaaagcccacggtgggaacagagggcaccgcgcgagccgatgccaccctcactgccggccccacccagacctgccggtgctgcagtgccccgtatgtgcagcctgcagcatcccagcggctggggcaggcccgggggcggctcgcacaacgcagctggggaccgggtcggggtccagcggcagccggggtccgggtccccccggccccgcaccccttcccactcccggcccgcaggggagaccccggagcgcgcgaccccggagcgtcgggcaggtgtggagctgggggtcccggggctggggggtcccagggccgccggcccgggccgcagggacaggggaggggcgctgggctgtgacccccagtactgtttactttccgtgtaattagccggccaggctgcggagcctcgggctgcgacgtgcggcggccgctcccgcagaccccggagctcaatccccgaacccgcaaccccgggtctctgccttggcagccctgcggactcacgtctcggaagcggttccagtgcttgatcttgccgctgtactgcgagatggacgacagccattgctcgtcctccatgaaattgccgggggtctcgccctccttgagccccttggcgtcgccttcggccagggctgccgcggccaggagcagcagcggcagcaccagccgcccgcagcccggggcgcgcatcgtggtctgggttcgacctgggggggtcttgacttctgcagtattttaatgtccttcctcccaccccgctgctggcgaagcgcacgcggctgtcctcagctctcctcccgcggtctgcctccggtgactggcggagagtgggtcgcggctgaaatgtgacctggttaggagatgcacttgtctgaaaaagcccagcactggacgcggagagggagagagaatcagagaggctgcgccagcaggggctgtaactgtagcatcagcatcacgtttgacatcatcatacctggtttaaaaaaaaaaaaaaaaaaggagtgggtagatttcaaagcgaagcgctccctcgatgagagcgccaaacgccagccagccgcagcggggcccagccccgcctggcacacagggagttgcagaccaagaaatccagaatcccgaaatgtccctgagctccctcaaaggatggagagcaagaagggccccaggatctccccggggaagatgggatgggggagagggcacaaaactctccggttacaaagccagccaggctcaggtgtcggaaagggaatttggccagacactgtttttctccccttgcctcccacccagaggggcctgcgccacagccctgacagctggcttcctgcgagttatggctctaccgtaatgggtggcttcgttaagacaaaagccgtataacaactggctgctcagaaccattgctccccagcggcaccgcgttgcgcaaggcaaggcctgagcactgagtggctggtgaaacagaggcagatgtcctcctccccaggcagctgtttaggggctgtcacccgttttgtcagctcttcccaggacaaccctaaaaggcaaatgtctgaccatttcatctgccttggaggctgcaaatttggaaaaggcatatttgcttatggttttttgacttcaagttagtttgaataagccactggggaagccggggagtggggggctggggtggggtgctggttttgtttgaggtgtttcgggttttgttgaaactgcgaccctccttattggctgtagatttaaatgttgacataccagcggggaaggctggaggctggccacagtcccaagagcacagcagaaatggggacaggtttacattacaaatacattaaagaggaaacatcatctgatgggacaaaacctagtgaacttttgggacccaagccctagattgtgtttttataaaaagacttagctgctgtgatctaaaaataaaataaaaatttaaaatgctttaaaaaacataatcttaatcagtaggaaaaaacatagcttacaaggttccttgtcaccctgaatctggcctatctgggaactctgaatgcctcagtggctcaggccggagtctcgttgggaaaacagaaaacaatagctccctttccatgttttcttgtttcctttgctgttggatttagtggtggtgctgcagtgaggccctggccattgacgtcttcatctcacagtaataaagcattcttcctgggtgtgtcctggcgctgtacagtgagagagcacggcttgctgtcgtggagactagaggacagaatcccacttactggctggattcttgagcaattacctattttctatctaaaactaatggtaataccatcattaaaactgctgtaaagtgcaagcaaaattacatactaagtgggcataatgggcatttttttaaaaagttagtctttcctctggttgggaagagaaggctacggtgtcccatagttctgaagattcatcaaaatttgccatcttttccaccatctcaatcctacaatcctagttttttgttgttttttttttttttgtttctgttttcgtttttagcaaagctagctatatatctctaaggcacttaggagataggtaccagataccacagctctcccattcctgtgctatcttaggggcttccagagttaccaaagttgctgaataaagagtttggaaaggtgctgtcaagatgcccatcaatatgacaatagctgtctccagactctgagggtcaaaatggctcccacagtcccaggtagcttctccagtgggacttgccttctgtagcaccttcaagctgggtcaatactagtcctgtgtcgaaagctaatcaacaacattccagtcccattagtgaagccaatagtaatgctatttaggaagaagaacccaaatttccagatgactggtgtaaaacttgtaggaaatggccaatagttttagtttacaaagaagaaaaaaagggccaggtgtgctgactcacacctgtaatcccagcactttaggaggccaagaggcaggaggatggcttgagcctaggagttccagaccatcgtgggcaacatagcgagaccctatctctatacaaaatttaaaaaatgagccacgttgcacatgcctgtggtcccagctactcggaggctgaggtgagaggactgcttgagcctcggaattaaggctacactgggctagcatcgtgccactgcactccagctggagaaacagagcgagactctttctcaaaagaaaacagaaaagaagaaaaagaaaaggtttttcaattttttttttttttttttttgagatggagtctcactctgtcgcccaggctggagagcagtggtgcgatctcggctcattgcaacctccgcctcccaagttta

SEQ ID NO: 914101 - DNA, 4001 bp, Homo sapiens
caacctgccagtttgactttggggagaaacagtcacttgtctgacggtaacaaaaagatccaaatctctgcctcttcccatcacttggctggatagcctatgaagcatgtgtgttttaaacaaatttccaaggaacttgtggatgcacgcagtttaaggagaaaacgggagaggtcatggtgtggcctgcgttgtactgggtgggtcggacgagggaacctggggaaggaggagtaagggccagggtcctagaagaggttttctggggtcagggccgcggtgagcaccaggtcgccaggagcagccggcgtcgcctctggcgcatccgggcccatcccccacagcacccccaacgatctcggggtccagccacaccctccgcccgccctgcctcacccctgcttccccagcccccaacccggcccggccgagaggaaggagccagccccgccgggccgccgcctgcgacttcccctctgatccacaggtgccggtaaacaaaagtgccgcagctacccccccgcccccaccccgcggagttcggcccaaggttacgccggggttcgggcggcgcccgccgggggcccccaaacccagcttctggactctccccggcttctcaagcccaccgggccgggagccttcctctggctccgagctgctcccctcgctccaggctggattcccccctgaaatgttggtccgggaaaaccagcctgggtcctcgcgcgcccttctgcacggggaccccagcccacccccgtacggacacgccttccaccatctcgcctagaaggctgctgggaccccagacccagagccccggtcacactcccgtcccatgctgtccccctcccgcaaagcccacggtgggaacagagggcaccgcgcgagccgatgccaccctcactgccggccccacccagacctgccggtgctgcagtgccccgtatgtgcagcctgcagcatcccagcggctggggcaggcccgggggcggctcgcacaacgcagctggggaccgggtcggggtccagcggcagccggggtccgggtccccccggccccgcaccccttcccactcccggcccgcaggggagaccccggagcgcgcgaccccggagcgtcgggcaggtgtggagctgggggtcccggggctggggggtcccagggccgccggcccgggccgcagggacaggggaggggcgctgggctgtgacccccagtactgtttactttccgtgtaattagccggccaggctgcggagcctcgggctgcgacgtgcggcggccgctcccgcagaccccggagctcaatccccgaacccgcaaccccgggtctctgccttggcagccctgcggactcacgtctcggaagcggttccagtgcttgatcttgccgctgtactgcgagatggacgacagccattgctcgtcctccatgaaattgccgggggtctcgccctccttgagccccttggcgtcgccttcggccagggctgccgcggccaggagcagcagcggcagcaccagccgcccgcagcccggggcgcgcatcgtggtctgggttcgacctgggggggtcttgacttctgcagtattttaatgtccttcctcccaccccgctgctggcgaagcgcacgcggctgtcctcagctctcctcccgcggtctgcctccggtgactggcggagagtgggtcgcggctgaaatgtgacctggttaggagatgcacttgtctgaaaaagcccagcactggacgcggagagggagagagaatcagagaggctgcgccagcaggggctgtaactgtagcatcagcatcacgtttgacatcatcatacctggtttaaaaaaaaaaaaaaaaaaggagtgggtagatttcaaagcgaagcgctccctcgatgagagcgccaaacgccagccagccgcagcggggcccagccccgcctggcacacagggagttgcagaccaagaaatccagaatcccgaaatgtccctgagctccctcaaaggatggagagcaagaagggccccaggatctccccggggaagatgggatgggggagagggcacaaaactctccggttacaaagccagccaggctcaggtgtcggaaagggaatttggccagacactgtttttctccccttgcctcccacccagaggggcctgcgccacagccctgacagctggcttcctgcgagttatggctctaccgtaatgggtggcttcgttaagacaaaagccgtataacaactggctgctcagaaccattgctccccagcggcaccgcgttgcgcaaggcaaggcctgagcactgagtggctggtgaaacagaggcagatgtcctcctccccaggcagctgtttaggggctgtcacccgttttgtcagctcttcccaggacaaccctaaaaggcaaatgtctgaccatttcatctgccttggaggctgcaaatttggaaaaggcatatttgcttatggttttttgacttcaagttagtttgaataagccactggggaagccggggagtggggggctggggtggggtgctggttttgtttgaggtgtttcgggttttgttgaaactgcgaccctccttattggctgtagatttaaatgttgacataccagcggggaaggctggaggctggccacagtcccaagagcacagcagaaatggggacaggtttacattacaaatacattaaagaggaaacatcatctgatgggacaaaacctagtgaacttttgggacccaagccctagattgtgtttttataaaaagacttagctgctgtgatctaaaaataaaataaaaatttaaaatgctttaaaaaacataatcttaatcagtaggaaaaaacatagcttacaaggttccttgtcaccctgaatctggcctatctgggaactctgaatgcctcagtggctcaggccggagtctcgttgggaaaacagaaaacaatagctccctttccatgttttcttgtttcctttgctgttggatttagtggtggtgctgcagtgaggccctggccattgacgtcttcatctcacagtaataaagcattcttcctgggtgtgtcctggcgctgtacagtgagagagcacggcttgctgtcgtggagactagaggacagaatcccacttactggctggattcttgagcaattacctattttctatctaaaactaatggtaataccatcattaaaactgctgtaaagtgcaagcaaaattacatactaagtgggcataatgggcatttttttaaaaagttagtctttcctctggttgggaagagaaggctacggtgtcccatagttctgaagattcatcaaaatttgccatcttttccaccatctcaatcctacaatcctagttttttgttgttttttttttttttgtttctgttttcgtttttagcaaagctagctatatatctctaaggcacttaggagataggtaccagataccacagctctcccattcctgtgctatcttaggggcttccagagttaccaaagttgctgaataaagagtttggaaaggtgctgtcaagatgcccatcaatatgacaatagctgtctccagactctgagggtcaaaatggctcccacagtcccaggtagcttctccagtgggacttgccttctgtagcaccttcaagctgggtcaatactagtcctgtgtcgaaagctaatcaacaacattccagtcccattagtgaagccaatagtaatgctatttaggaagaagaacccaaatttccagatgactggtgtaaaacttgtaggaaatggccaatagttttagtttacaaagaagaaaaaaagggccaggtgtgctgactcacacctgtaatcccagcactttaggaggccaagaggcaggaggatggcttgagcctaggagttccagaccatcgtgggcaacatagcgagaccctatctctatacaaaatttaaaaaatgagccacgttgcacatgcctgtgg

SEQ ID NO: 914102 - DNA, 4001 bp, Homo sapiens
gccgcagagagccaggatggacgttcctcggacggacggttttcctgcttgggaatgttcctgggctgtgagatccactcttctgggcaggtggttagcacctaacgtttttccctcacttccccccaaattcttaagtcctttggtccatttcactgcttcttttggggagggtcagattcctcaggggctcagtggcagaaccagcctgatgtcgcctccctgcccgtgagtcaccacggcccctgggcaggcgaggggagccggggtggcttgggttcctggccttggcacctccctttgggcggcgatggagcgtggctgggcggttggtacaggagccacaggcagctgcctttttggctgaggggaccctaacatcctggagtgggtggggcagggcccatggtctcctctaggtgggaggtggcaggctgaggcggcgtgggcaggacggtggatggcgggtccacagggacagccagcagctcctgcacccagtggggctccaagaccgtgggcaagggaggaagggggagcccaggccggaggatcctgggggatggcgcgggccgggggccagatgtggtccccgagcccagccaggcctagggccgcagcagccccagggctccgagggcgccgcccagcacgagacagagacgcgggccgcgcgtgggtccagcgcccgaagtccacgcccggtagctgtagatgccggggcctgtcccgttgcctccgggcaccccgtcctcctcgtcctccaggccgcgttccccgggtcccgcggcccttctccagcccgagcccgccgccaggcccgcggccgctcccgccgccgccccggctgccgccccggcggcagccacgcgcagggaggagcccggggcaccgtagcgctgcgccggcctcacgcgcaccctcgaggccccgcgcgcacccccgcggacccctccccgggcactgccccgcgcacctccgcggccgcccttggctgcgccgctgtcgcagaggaaggcggccgccagtagcagagcccagcacgttgcgggtgcccagttcatcttcgtggggctaaacctgcgggaagagagggaaagggcccttagtttccatggagatcgggtgcccaggggcggagggctcaaggctggagagcagagggacccccatcttttgtgggatcagggtgcccccagcatcttggaggcccactgaggcctgggggggcgcggtttaacctctagcatcagggacttaggcctgggggaggcgctgggaagtggcaggtggggcaggagggttctgcacctgaaggttgtgcacctggattgggggtgtagaagcggggcaggagcgttcaggcctctgggggcgtccaggcccgggcgggggagcaagcctgggggagggagctctgcacgcgttgctgggatgtggggggcggggggaggcggcatggggggaggggcgttgtgtttggaggacgcggtagccgggaccaagagctggctcagatcagggtctggaacggggacgggccgtgcctgggcctggtccccacctttggggccaaagcctgggtgcgggccttgcggatgctgcggaggacaagcggctgctgacatcgtgcggactccgccccagcagacccgtgccccaggggcagtccctcccgcgcgcgcccggcgctcaatgccgtccccggccgcctagttcagcagctggctgggggcgggacggggtcgagttgcggggccgcgtccagacacggctgtgcgggcgacagctgcatcccctccccgcgccgcccctcgctcccggccccgtacccgccccagcctcccggccttacccgccacgggcctcggttggaaccgcgcgctggagtatccgtccctgaggccgcggccgagcgggaaggagcgggcgggcggcggcgcggaccctcagccggagcgcggagccgcggcgcctgggttttgcgcgaggcctccgccctgggattggggcgggcagtcgcggaggcgcatccctggtgagccggtgggaggggaaaaggatgtcgcgtcccccatccttgcggcctcccgtcctccgtcaccagccccctccgtctcctgcatcacaaggccccgtccccgcggtcccccgcgacccccgcacccggccccgctccacccgccgtgcttcctgcccctccacaccctcgtccccacccgggcccatccccctgtgagccctggtgccctgggatgagggccgaggtcctgagcggagagggtgcttgtaccagccccatggtggctcgagcccaccccgcggcccctcccgtggcaggtgcggtttctccaccggttgtcagctgcggggccgggcggagacctcctcaacctccggccttgtttcagggaggatggggtcgacccttgcgatccccagaggccccccatggctcctcctgggctggctgtcttcctcctgtgggttctgatgccacctgggccgacggcgtcttctcagcccagggcggccgcgcctccggtgagtttcagctgagggcgcacggccagctccgagcctggctccgggtgcagcaccggcctgggacctctgctgtcccgcgtaggggtgccctgcaaatatgtgatgaataagtgaagaaatacgttctatcttctaacttgccggatgttagaaggaaaccaagcttatgcttctcatttatagctaccgttaaggattggacagaagcttagctttttgggtgagacggacaacagtgtttttagaacctttggcaaggaagagctggaaagaacatgtatttgaaagtgactgacaggtcttctggccctagggggccacctgagcaggtgcacccagcttccctccaagacagaaaataaattaagaaggagagcaggaagggccccggcagactccagacgggagggggtgctgcccatcaggcagaaggagcttggaagggaggggccgtggccatgggacgtggaggtgggagcgggggtcatcataggtctgcacactcgggttgagtcccccttccccatcacacacaggacagccagcagtgagctgcttaccccaaggagtcaagggggttcttgggcaacccctggtgctggagccggcagtggacagcaccgcagccagaccttgcttatttttggctcatgaggaacatctgtgaccgttccctcccctggccctgggaggggatgtgtgacctccactcaagacagccatgcggctcctccggctgcgggcggggagggcatgtttcccagcacaggcccaggactgccagctgagaggctgggaggggcccctcacccctagactttgcatgtgaagccaagcgtggagcctcacagggaatctgagatgggagccagtgagatgggggcaggacccagaggggagaagaggtcctggggatgctgtggatctggatccagcgtgcgggagctgaggttccggagtgaaacactgcctttcatggaagcacgtcttcctgtcacccatcggcttcattttaaaggatgaaaatgtatcagacattcaaggagagctgcatcacataaaagaaagaccaggcaaagaaacggaaaataaatggattgagaaatgtgaatgactccaatcattccaatcattggaatgaatggattggataaaactccaatccatagactcagattagggagatatatttatataataagaacaggaaactgtgaagatgaaataagacaaaaaagacacttttgagattaaaaaattactgcaaaaaaaaaaaaccaacagaaggatggaattgtatatttaaggaaatgtttctggcaaaaaggcagcaaatatgaaagaaaaggggatagacccaggggatccattttgggctctaacatctaacagttgttccaaggccgagaacacagaatgggaaaaggaagggggaggcggtgctccagctgatt

SEQ ID NO: 914103 - DNA, 4001 bp, Homo sapiens
accctagtttgtcagtttctcccttgtctctttctatggtttccttttctaacaaagagctaaacctacgaggtcatgacataaatgctagtattctatacaatttcatgatgaattattttctttccttctctttctttctttcctttctttctctctctctctctttctttctttctgacagagtcttgcactgtcacctaggctgtagtacagtggtgcaatctcagctcactgcaacctccacctcccaggttcaagcaattctcctgcctcagcctcctgagtagctgggatgacaggtgtgtgccaccatgcccggctaatttttttgtatttttggtagagacgggatttcactatgttggccaggctggtctcaaactcctgacctcatgatctgcctaccttggcctctcaaagtgctgggattacaggcgtgagccaccatgcccggccttcttcatttctttctaatgaatattatacaaggaacgtttttgttttcattctagttttccttaatgaatcttagtgggaaattcatgtttctgggaaattttgacaacataaagacttacatatctctggttggggtatgcccagcaccatctggccattcaagactgtactaaagtatgggcctcattactctcgatcttgtcagaccacttggctattcgggaattatttcatcaagctgaagatattccctaaaagatcccagtgaagcctgttccctacaattgacaatgttttatattttaaaaatacataaattaataacgttccagaaacattacttgctcttttttcagcattagcataactagaagaaaatgattttataaatttccaacataaaatgaatgtctctgcgatcatctgtaagatttcatctccaccggaagtaagatcatgacaaccaaaagtcgctttgacgaaacaaatctaggacatgtgtgtcattgtgactcaacatttcccttaccatttggcggaacctagtgtttttctactataggttcagccatctctctatcaagccatgacctccgtcttatttagacatgattccttatttgccaaagaataacaaattgtatttttcttacaagcctatcattttcattgtcttagtcattacaggttttaagttgtttcagtctgactaaacaacactaaatggtagataaacctaggaagatatttccgaatatgatgcttctctgagcaagagcacaaataccaaattatttggccttctctttaaaatctgagaggttttacatgaactatgtctaaccataattgagttttcagtaagaaccaagtttatctttaaaaaaaaaaaaaagaaaagaaaatacacacagtcagattcaccccaattggaatataacgtctcccagtgttaaaataacaatgacaccgtcacagcgcactaaaacttggggctgatgtagacacttaggggtaggcagacaccccccaacagtcaaaggtgccatctcctccatgcaacaggcacaggagtcattttctagattccttttttgagcttttaaaatttataaacctcacattttcatcccaaaatagcacatttcaatcattgtaagagtttacaagactgcacacgccacagagtttaatttttcttggtaccaaacttaacagaactcatattaaagggttcagcgaccccaaatccttcttctttgcctcctttctcacaatattatacattctatgccttaaaatgaatataatgacttgcatggaccacagggcttacagagaagatggctggggaacaagactcctgagtcttaccttgaactgaggattccagaaccaggatgagggcaagagccaggacaagccgactgcatttgagtagcttctgcatcatgaccaacttagtctagctctcccagctgcacgccaacttcttgattaggaaatgtagcagggtgctctctgtcccttttagaaaatgttccaaaacctcaaaccctgcccagaacacacgtcacaatttcctgaacaaatagaaagacatccacatcaaaacccagaaagaaagggggtggggggaacacagtaaaataactattcatacccattatgaaactgtactggactccccccaggcctgctttttcaaaagttttgttgtttgccacttgcctgcaagacatttttttttcccaccgaaacagtagaatcagcatttgggacagtttgtttttcctttcttcaggtaacaatctaaacactagattgctaatattaagaatctgctgcattttttatgagataagggatctaggtgctgccttttcgtcaccaagcactttcaacataaaacattctcttcattttctttttcaccggggagtaacatacctcactgagccaagctcgtgaagtgaaacttcaaagctgagctctaaccttcaagaatgagttgtcggatttcagatgaacagtttcttcttcttctttttcttcttttttttttttttttttttttttttgagatggagtctcactctgtcacccaggctggagagcagtggcgcgatctcagctcactgcaacctccatctccagggttcaagcaattctcctgcctcagcctcctgagtagctgggattacaggcgtacaccactgcgctggactaattttgtatttttagtagagacgacgtgtcaccatgttggccaggctggcctcaaactcccaacctcaggccatccgcctgcctcagcctcccaaagtgctgggattacaggcgtgagccaccgtgcccagcaaacagtttcttcttaaactcagtttcttgcattggatcattggctctctctctatctcaagaacataggattttcagttacaaagactgtggtaaaacagaaaaactattttgcattcccctctccttcacattgagcatttcttaagatggattccatttctatttttatctgttctcctagtcaaaattttcaactcgagttttgggtcctctggccttgaataagccagaaatcaggaacgagggagaggttgtcctcacagtgagctgctggacctcagcaaacaacacaaacctctgcctcatgtaaataaaggaacagcattttccctgggcatggtgcagatttctggaggactaaggctccatattaaagttatacaataaaggccaggtgctgtggtccacacctgtaatcccagcactttgggaggctgaggtgggtggatcacaaggtcaggagatcgagaccatcctggctaacaccgtgaaaccccgtctccactaaaaatacaaaaaattagccgggcgtggtggcgagtgcctgtagtcccagctactcgggaggctggggtaggagaatcgcttgaacccgggaggcagaggttgcagtgagccaagatcgtgccattgcactccagcctgggtgacagagagagactctatttcaaaaaactaaaaataataaaataaaataaaataaagttatacaataaatacaagcctatcatacatccttgcccttgtggcatatacattttccttacttcctttcaagattcaaccactctccatttcaacatgtctatccctaccgctcccccagacggcttaatgcacgtgccccactttccattctcatcctcgcccttgcctggcctttgataggagggaggagtttcccttcccttgttttaggcttcctgctgattcctttaccatttcctgctaaggacagagtctcacagtctaatagccgtggtgcaagaacacaaagagtgtacattttggccctcctcagaagcccctcacatcagccagaagtgtgtcctccaactcaggggcgtctccaagcacagtaaccaaccccaaaatgcactggcccggaaagttttccactgagaaatgtcggtttctgtttgaaatatcagatgtcatctttggtccttttaaat

SEQ ID NO: 914104 - DNA, 4001 bp, Homo sapiens
gtggtgttcctcaattcagggtttatccagccacttccagacccttcttagagccgtgctagagcttcctggagttacaccatcagaagattaaggtggatccaagagccaagaatatagagaagcatacgcagaagaaaagggatttgcaagagataaaaagaggaaaagagaccgtatagcagattgcaatcataatagcaatgctaaggcaggaagcagtacattctgcttgtgaaaatgtaaattgattcagcccttcgaggaagcaactgacaatgtgacttagaatctaaagagtacatactctttgacttactaatctcaactcctgtctgtccatcttgggtaattaatttgaaatgaagataaagatttacatacaaggatgcatttcatagaattactgatggcaaacaaaataaaacagaaacaagaagcaacctaaatgtctgaaaatggaaactattaaatagattatggcatgttcagataataagttatgcaacaatccaaagcaatgtttttgtggggggaggggaatgtaatgacaggtataggtctaggatttttagaaaaaaggcagaacataaactgcaatgtataatctaagttatatttttgaaatatatgtatatagaaaagactactggaagaaatatagaccaaaaccaccttgaatatggtctctgagaggtaaggactctgaatgaataacattttcttttatacagttctattttctaactttctgcacaaagctgtattacttttacaatctgaaaaaaaaacaattactgcctatgaataaaaacacatgtgaatgataagaaaaaaaatttaagcctccagtcactaaggacaaaatcattcctagcacgcaaaacaaacctgaatcttaacaccggtgccctttaaagcatagaaaagaaaaagcaaaccaaccaaatccctccataaagacaggctgagctgcttctctccaaaggtggcggggtcgggggcgggggtgctttcaacacaccattgtcgagaggaaaactcagcacccgtttttcaaatgcagctgctggaggatcccccttgattcaaagaccattcacatccaggcttagagggttgagggagtgtgaagggtgcccccccccaaccccgcgccctcttcaaacacacgcacactcttacactcactcgcgccgtcccagcctgcctactcccaacgagtccaagccggtgcagccgcgccccatgcccggctcgcagctcccgagccccagtccgcccgcgctgggcgccgctgtacctgttagtggcgcgcggtaccgcggtcgccgggctccggagcgtcctcagcgctgcgggggtgccgtgggtggcctccctgctttcctccaccagaatcctgcacagccggggagaaaacttaagttgctacaccccgccgggagctgttggctgaaaggctgggagtcgcgctccttgcctggcagggagatctcgcactccccggctcccaggccaggtccccagccccagagttggaagagccttagggcgggaaggaagagacagcaaggaccagaatggggagcatgagatcctgatgcggaacccgacggcaggtcccgctccacagctgcctcgcccacagcgatgcgcgctagagcccccgcagccctgaccggtccctctgctccccagccgccgtccaccggtcggagggtcgcctccctgcgaccccctcccccactccactctcaggccgtcgccgcccgtgggctgctccccgccgcggccaaaagtctccgcgcccgaggggaagcgatgggcggcttgggggtccgggggcgccaggcggggcgcgcggcgcggggcgcggccggcgggtgggtgggttacctggcgcggccgggcgcgtctgccgggcaccagagcaggcgcagcagcagcagcagcagcaggctggcgagcagggcgagcagtgcgccccccggccgcatcctgagccacaggcgccgccgccaccgctgctgccggggcgaagcacagcccgggcggccccgactcgcggctcccgccgccgccgccaccgccgccgtggccgcagccccgcgcacccacagcgttcacaggcggcagcgaggggcgcccgcagcccacccggcagagtctccgcggcgggcggagaagaagccgcgttcgggctcgccccgggctcccggccccggcccgcggagcgccgcgatcggctggcagatgacgattcgccgagctcgccgcctgtcctcccggaggcgctcggagctgctgcgggctccggtcgccgctgccactgctgctgccgccgccgccgcgcggggtcacctgaaggttggggcgcggaagctcaactccgtgctgattgggctccaagttttctgcgccctcgcctcgtcccgagtgcccgcgaatcccccggacgcccacgcagaccacccagccacaccacaactctgcctgcggagagaggagaggagaaaaaggggccgcttcaaaaactttcaaaactgtgcagtcgcttggctggatcctcccacgcatgaagaaagctggggactggggaattgctgggtggatcatgacactgaacagaagcagtaacctgtgcttacttcaacccagattcagagggacagcgaactggtatgaggggctaggagacctttaggcatgagcacattactacctggagacccgtttagcccctgcctgtatttgcaaatagttttattggaaaacctccatgcccatggctttgtattatcagtgactgcatatggctgtatgatctagggctgcaagggcagaattgagtagtgatgacagaggtggcatagcccacagggcctaaaatatttaccatttgaaactttccaggaaaagtttgcatactgctcttaaataagcaagaggccattagcttgaggctgtctctgtacgttgagttcccacctaacaatggaaacctacattaggctgtaatgaacagggggctactggccaatcatgggcaaccaactcattataccaggccccacaaggcagcctgcatagctatagccaatcagtttctccactgtgcttctgagtttggcctatcaggctttgctgctcacaccatggggtggacctcactggacctcctctggttgtgagtgctgcccaattcatgaaccctttgctcgaataaactgtgctaaatttaatttgtctgatgtttttcttttaacactgctatgggctgaatgtttgtgtctctacaaaattcatatgttgaaacccaaatccccaatctaatgtggtggtatctggaggtggggcctttcatacctgattagttcatggggtggaggcttcctggtggaattagttccctcataagagcaggcagcggggaatttgcctcctctctctctgctctgtgcagtgtaaagacacagcacgagggcagctttctgccaagcaggaagaggaccctcaccagaacctgaccatgctggcacactgatcttgggtttcttaccctccagaactgtgaaaaataaatttctgttctttcggtcacccagcctatggtatccttcttatggcagccagaactaaaccacggtctagatcatattggttagtatctcatttacgagtatctcatctgttgcaggagagtgatccaatgacactatgaaacagactggctctctatttttttaaaagtgggtctcaactctctatgccctaaactatcctgactgcccaagcccccacttagccacttccctaggttttaattccattgtggttatatgcaggcttataaaattattcactcttacttttgtatagtttcgagatttttccaaatgcaacccttggattccaccatcttgggagtaccttgataagatcttttgaaatgacttcaattttgaaaaggctttcatgagttaactttcccaagcaac

SEQ ID NO: 914105 - DNA, 4001 bp, Homo sapiens
aacacacaaggatatgttgaaagataaaagaaagcataagcgtaggacaaaagcataaaggcaagaaggtgcctgtgtttgaactgggtggtacagctactaggaacgggtttgacattaagaaatttacctgaatccaatgcaaatatgtgttcacaaagtcagtagaatataaaggtgattgggtagttgctagctaaattatacaggaccaagaaaactagacaaaggtgctgtaaacagaagaagcaagtattaagaagctgttttaagtatttcccctagagattcatgtagtgagatgtaaaactgcttgagaacagcaactaggccttgctcatcactgtatctcttatgtcactgagctgctgtgtcctgtagtgtgtgctaactgcttattaaattaaatgcaattttccaattcattaagtataatcggtgatctccaaggttctgtccactgctaagattcaggacactcatttaaggtggaacaaaaaaggtagcatctagtaagtgccaaccacataaaggtactgtagcaggccctctagacatattatttaactgcagaatggaatgatgtgttttcccctctttaaagacaagaacactggaactcaaagaatttaacttgcctatgatttcaccgtgagctgagaagtggcagaggtaaggagtgaacttttttctactcttatataaacttccaagtttcagtgacatgctctaaggaagagtttaaaaagaaaaattcaacatccacctttcataattaaaatacacaaagacaagtaaattcataaggttgtccttattcacagtaatgattacattctgccataagggatttggaaatggtatttggcttgctttcattccacacttgtgtgccaaggtagttcctacgtgcgttcaaattaaaccaaaattctctccccggaaactcaaattcccataattattatcttcaagtcagaaaaaaataaaataaaataaaattaaaaaccaaaagcaaacctattgaattgacatcatcagtacctaataccagtgattcagaaaacaacaaaaatgtagcatttcaaactctttccagattcaacaacttcttccacacttctttacaccttttaaagtgcagagacctagcctaagagagacatcccaaaggctcaggtcctcaattcggtttcagtcgttgccaagtatttcatcttcatcgctcctaacatgtttgagagtctacccttaaccagagctccctccttcagttaccgttacaaaagattttaaaatcctctaaggaaccttacctaaaacattctgccagttccagacgctcaacatttatttgtctaggcaagcacttttggtacagggtttacaatcctaatctagccaacatacgccttaagcccttcgctgttcttccagaagcacagtccctgcaccagatgctacaccagctgctcctcccaggccctttacaccaacccattcagcagttctttggcaacctacagtcctagctcaaggcccatttcacaggatgagtcccatttctttcaaagaggatgcgccaagccctcaacctcctcccagctctgaaggagggagcctcaggaaaggggaagagcgagctcttccttggccctggcccgagggtcctgaatgcaggcaggggctggcagagtgagcgtgcagtccggtgaggaatgggcagggagaggcaaaaacacttaccaacatcctgatcgaagggattggtggcaaaaagaggcatctccgctgcgtgccgaggtgtccccggggactccctctcgacagcacgggagtcagagctcgacgtaggatggaagactcctcaggcaaaaagagcaacagagaccgactctacagggtccgcgacagctcctcctctcacccaaccccaccaaccgcggcagcagctgcggcggcggcaacagcaaggagccgaggaagcccccgcgcggagcttgtcgggaatctgggcgaccttggcgctgcctgtctcaaagctgccccgagcctgccccatcggtaaaggctgaacagggagtcccctctgcctgactcctcttttaattagtcacacataagagtggaattagttcttgtgttttctgcttttcccttggctaggagtctccgtaggacggggtccttcaggcgtgctgaagcctactaacaaccccaggagtgactgggagagccaggagaaagaaagcaggttgagttcgggtcgagctgtgcgccttttttcctctcgctctctcggttatcataaccttgtattccctctggaaggaaatggaaattcctttggatcatcttctaggtaaacagtttaattagctgcgtgaggtgacaaacttgctcggatgaagtcatgggagctgaacgaattggcctgaatcccaagaggggagtgttcagggcgcgcgtgtccctcggagaggctgaggtaacgctggctccttcccgggagtccctgaacgcccggctttggaatctgcagacagctcttctagcagggcgttggcacctactgactaaccgtgcaatcactcagcagctgtgatggttggtgacatgtctttcacagcccaagatagcctccctagactgagcaaaaaaaagaaaacagaaaaaaactggagctaaaagttgatcagtgagtgattcctagcaacccaaaatgttggtttatttattttacttataagtttagttaaccaataaaaattattctctgtgtgatggagaagttttaaggagcatctactagagatgttgcgtcccacttggaacaaacttagtaagcacatcttgtacgtaaatggaaattatcccgcaaattacggcatctccaaatgtagcgtggaaactaatattgacatgtcaacacaggattaatacatagtaatcaaagagtgcttaaaaattcattaaaaatgaagtcccacctctaaaagtgaaatgtgcaaattaaagtagcagttagataatgttttgtcatttaggtaaaaattacaaagaatcggccgggcgcggtggctcacgcctgtaatcccagcactctgggaggccgaggccggcagatcacctgaggtcaggagttcaagaccagcctggccatggtgaaaccccgtctctactaaaagtacaaaaaattagccgggcgtggtggtgcgcgcttgtaatcccagctattcgggaggctgaggctgggaatcgtttgaacccgggagcgaaactccgtctcaaaaaaagaaaaaaattgcaaagaatcagggatgtgaggagtcagacactcacatactgttggatgaagtgtaaatactgtataatcttcctaagggaaatatttggaagcatgtaaaaaaatttttaaaaccttaggacccagcaattccatttcggcaaattaatcctaaagacattcttttaaaacatgaacaaaggtatacatggcaacattgtctaaaggatcaaagcattgccagccattaaatgtcccacattgagtgattggacaaattgcttcacctcttggtgtctcagtttcctcatgtgtaagaaacaggaataatagggttgtgaggatcaaatgaattagtacaagcaaaacgcttattacagtgcctggcatagagtaagcactaaataagtgtaactgatcactgtaatttacactggtcagttaaatcatagtacataagatgtgaaaactacacagccatttaaggtgcataatacagattcatatttacatagacatctgaatacacaagttttcagaaggaagttacaaaccttataaaattacaaatgcccacaattttaaaaatctgaaaggaaatacatgagaatattatgacatgattgtctctgagtggcaagattctagacaatgtttttgttctttgtgcattttattattcaaaatattttaatgatgagcgtgtattcctttc

SEQ ID NO: 914106 - DNA, 4001 bp, Homo sapiens
gaggtaaaggacttaggttatctgccttataatttaaattttggtgcttactttataggtgaggataagaaaacaagtttcttcttgaaattcccaagaaccagttgctacataaattacagccaacgtatacgcaaaagcagattcttagtggcaatttgctgtatctgtgtctgaacagaaaacaatcagccaattcattttgcaggtagattccaataacattttatgcctttgaatggagaagctctcatggtgcaaatggtaaacaaaaagagcctactgctcagcgacacattaacttgtattaaaaataaagatatgtatagtgtagctacacaatgcccactacaatccagtggcagagtatatttttgaagtgcaatgtagcatccatcctgaaaacacaaaatttccaatggaaacaaggtcgggataaaaacaaaacacggtggcttaatttctgtgtaaaacaaccgtcaaaacctaccctcaaaaaaattgacacgaacaatcaaacattcaggtataatttatctgctggaacaaatctacgttattgaccttgacagggccttaaatcatgagaccataaacaagcatcctagtgatatctattatgtcttcggaaatagcttaaaatccaggacttcatgttattgtcagtaatgagcaagatgtttggaaagcagtgtgctcactggggcttactttgaaagctgtcttttttacttactaccgaacactgatttccaggaagcaagccaccccaccccacttcccaggcacttgattttttttttcaaacctctagattgggttccgtttcctgaattacttattccttacataaattttcttttaaacttcagcaattatggcaccttaggctctgggggtatcagcagcgtgggttgttttagagaaagttctgaaaaaaatatgttttggagacattccatttctttgtgcatctcactgggggctttcagcgaaagctttaagttattcaggtgaggggcaatgtcttagtcgctcataaagggcataaaagtaacatcatctggaaaggcatggcacctgctcggccggggtaaaggtccgtttttctaaccctcgcccctccctcctccacaccgcgccgctagagacagtgcagtggtctctcccaaggtcgacatcatctccaaggctgcaacccagggctgaaccaaaaaaacaggcgcacccacgtataggtcacggccagagtcccgccctgccaccagcagccaggtcttcctgcctccctatcaaggtgaaactaacccagagggcccagcggaggggcgcatacaggcggcgccgatggaggcggccgattgcatgactggcaggaaggaagcgatcagccgccaaagtgcattttttcctcccctagagccagcccgggaccggacgctgccagcggaagggccggcgcgcgccaggccacgaggcagacgcacccgccgtgcgcacttccccgtccggtgcgcgctctcactcacgcgcgcgcgccgctactcactagcaacccttggtgtccgcagcccgtgtgggacggcgactgcgacggctgcccccgtggctgccgtgtggccttggcatccgtccggctgctgcaacccgggccgcggtggcttttgctggaaggcgttgcagcggggtgataccggcacccggcgacgaggcgtccgctcgtttgcctcggccgtgcctcctcccccttctcctctgccgacagatggagctttgctggttccagtcgcgcgggctccgtgcgtcgttctcctcctcgctgtcggacaccccagcgcaggggacgaacagcgtcctcgcaagcccacgcgcaggccggccgaccccgaacctgcagcaaccgtccctgctgccgctgctgcaggaaaataaattgtcactgcgatggtcccggcctcccctgccccggcccctgggtgccgcctccgcctctgcctccgccccctcctctgtggcggcggcggcggcttcccgcattctgcagaaaaagctcgcaggtggaaggaagcagggcccctgcggatggcctagagcccgagtgaagcggttgggtgcgactttcgcatctgaaaccctgcacgtcttctccccagaccggaaccacctaaactcccttttgctccaccatcaatttcaccgagatggacaggagtggtgccttttaagactgcacagtacacaagccttgatgcagctgaccgttaaactgtcactggagtctggggaaggatagggttttggtgaaaatcccacttatacttcatgttaggattccctttttgatatttatccacaactggctacgcccactattaagcatcttagcccttccccctacccccaatttgtgtgtacttggaaaataagaagtattagaatatctcctggatgttatgttactatcacgtgtggtgttcttactacagttctggcactgtgtcaggcagtcggtacacaaaatcttagtccatctgccacaaccctgtatataaaagggactcattttttgtttttgtttttgttttttccatgaacgagagacagagaagtaaaataatttatcccaggttactcacctagaaagcagtagaagctgaaatttaaactctgatccaacactgaaagctgtttctattggcttcacaggttctattaactgataaacattttatggagactgctgctgctggatgaaatagagtcgcttttcttgagcttggttgggagcttacttccaagtgagagaaatggctgcagagtggggtggggaaacactggcttttcttagttagcctttcctctggaaaccaaaattctagccctggctcagccaccaactgagttatttggtctcaagcatttcaccttcttaagcctcatctccctggattctttttttttttttaaatgaagagtttgattgttggaggcagcctgcagccttgatttttaagaagcaacagtgttgttttgcttagttttaagttggttccaaatgttgaagttaggaaatttcacagaaattcagacttttcacattttctgtaaaatcgtaacatcagacatttggtccatggcgagttctagcaaccatcagctgaagctgaatagcaggtgtcgcctttagactgtgaagacactcttcagttttccacagtccccaccactcccatacacccccacctcactgacatttgagaatatggtaggcatttgagtttgcagtattgaaccagataatctcatgacctactggacaatttaaaattcagtggtaattaagaaggttagccagattcctaaaaagcattatgaaacaaaaaattccacgtacgtatttagagtggtcattgatcatggtcttgctatctagcatccaaattctcataaaagccaaaatggcccaatacccatcgtcccctgctccccagcggctagagtaccattttgtgacccaacatcagcctcagagactcctgtacagttatttgaatctggattatgtgtttcaagaagaaacattttagaaatgtctccattatctgtgaagtgggttttgtgttcagggacagtagtgccagaggtaacactgcggcaatgtcagtggtgtcctaagtgagctatttgaatggtgtgatgacccacctgttgtaatttcagctgctaagcttcccttcctgtgtaaggagacttatttgccaaacttcctgtctctttggtatgctacttaacgactttccaatatatttctcttctgattcagttagccagaaatgatttcagcgttgtgaccaagaactctgatatagcaactttaggtgtgatttatttcccttttattaattgagttaatgaagagcaagcaccagtgtatttatacaacttttatcttagagaatttttaagtgacctatagttttacttgcatttttaaagattca

SEQ ID NO: 914107 - DNA, 4001 bp, Homo sapiens
atacggtgatgctggggatgtgaaagaattcccaagtcagaccgtgagccccacagacagactctgtgcttgctctttttgcctttctagtgatccttgaattctgtgacataacacactgtgaacacacagggaagtctaccctacaaagctgaaggcagcccagtgccacaccactgtctccactcccacccccggagagcacggtgccgagacccagaagagcagccagctcttggctgacaccagcaagtgctaaaccagatgcgtttctcagacgttctctcaacccgcagccagaaacgagaggcaaatctgcctcctgatcagctcctagttcactctgggctttctttactttgaatatttatgttaaaaacaaaaacatttctcaaacattcaccatcgtgagttctgctgtcccgaagttcaggacacagtgacgggccaccctggagcgtgtggggcctggtgtggctgggccttcagccctccttctaggcagcacaccatgaatccccggtgccgtctcccggaggaacggcggtgcacggccccacactcaccaacgccggcctgaggtcgtattactgtaatttcccataatgcttaaattatttatcgcaagtaaatagcctggctcctgagcgctgggctctaaaattttgaaggatccatcatacctctgcacgctatctataaatgaaaaatgcacatttcaagtattttaagaaaatgtcaaaaaacatgaaatgtgtcatcaatgtacgattttaaatgatttgcatgttacctgtagaaaagagctgtatgtctgcatgtgactgtattacagtgcccacaggcagacgcggcaccacatctccctgcaggtgataattcgggggtccccggggccccctggcaccccgggaggtgtccctgcaggcctgtcccatgtcacctcacctgccttctctgctttctatggcgcccacggctgcacggtcactcaggagacaccagtccccggggttggcggctttatctacaggactcagcagcgcactcgttcctggcagggcaggtctttgcacaacggcctggccctgcctccagcgcacatgggtgagcagaggatggacaccgcgcggtcaccaaggagactgagcctctgagcggccgggccccgccacctgtggggcaggagcctcactcgcactcgggcggcacaggtgagcgcctctctaactgcaaagtacaaacgagcccgcacgtgggcccgagcggatcacggaaagcggaaagcagggctgccacgggcggtgggcggaggcgcgcgcaagcccggagacgccacagccgcgggggaccctcgccccgagggcccgggcccagcctgctcctcctgcggcgccgccactagaaacggaggacgcgggcgggcgcccagaactcgcgtggggccgcagccacccggcgcgagcttctccggaagccggggcgccccgggaagccgtcccggacaccgggggaacccctgcgggaaaaagccgcccagccgcgcccgcccctgcaatagcgcgcggcccccacgtcgtccccgtgcccgcactcaccgtcctccttgtcgtcaaacaccggcctccgcgcggtggccgccgacatggacgagcccatcctcttcttccacttgctccactgaaacagggggcgcggctgcgagcggacatcgcccgagtcccgggcccggggctggccagcagcgggcggcggcagggccgagggcgcgtcggagccggcggggcgcgcgcggccggggggcggcgagcccggggacgccgcggcgctgctgcccctgcgctcggcgccactcctcatcgccgggtctgggtgcgcgcggcagccggaactcggggcatggccggccggcagggccgggagcggcagtggtagcgggagcgctcggggccggcagcgcccgccgtgcgctcttctgggcggtggaacccgccccgtagattgcgagcgctgggggcggggcaggggcggggcttctggaaggggcgggggcggggcggagctcctggaaggggtcgaggcggagctgagcgccggggcgtggcaggtgcggagcttcgggaagggtaggggcggggccgagccgggggcggggcaggggcggggctagtgcctggagtgtcgctagggagtgggtggccgccaccagtctagggatgggggctgtggttcgccgggacacggggaccacggctcagactagacggcgggtacgagagcgagggaggcagggagcgtccccacgggtatcctggggccccggaggtcggcgtccctggcacggggactgctgtgcccggcacggcggcgggaccttctcgcggtctccgggggcctccctcccctgccttcttcgtgaaaacagccggcgcgcgggcttccgccgcccagtgcggggagccctaaactccagccttctgctttgcgcagggtgaggccgggctgcaggcccgggatgcgggcggcgggaatctgccgggcagagcccggctcacggtcaggaggcggcaggctgagtccaagcgctgcgccagagggtggggtggggcagggcgggcctggctgcgcgcgcgcacacgcgggcgcctggggtgggcgctaagccctgagcacgtgcgcccgcgctctcgggcacccccgtgccatcctcgcgacccccgtccggcctgagaccgcgtgcccgagtcgcccagggtccccttgtccagatgcgacaggggcctcggcactcggcgtatttcggaggcctggggcgcggcttgacctccgggcacctctgcccctgcgcagggccaggcgcgaccttgcgcggaaagtgctgggcgccttggagtgccctggagaaggcgcggctctgcatggagcctcgccgcctgcccctggcgcttgtcactgaagaatcagtttttgctaccgggctgtttgactttaggaagcctttacctccttaagttctgccctgtaaccaggacacaaagacggggtctcttcctcctcggtgaaatcctagatgggatttcctgctgcccgcccggacgatgagcggatccccaacatggctccaaggccagtgtctcccgctcccgtccctcccaccgcacacaactgtctaccctgtcattcagccactgtgagccctgcctccccacggcctttgacattcagtgtggccgcccgccctaaccgcctgatgcatgaaatgtgagcacgggaagtctgtgtggcttctgggccaacaggagcccccatcccttggggactataaggaatggaaccatgcccatctacctaggacatgcacccgcctggacatgcacccgcctggacatgcacccgcctaggacatgcacccacctggacatgcacccgcttaggacacatggcatgcatttcactactgagatttagagggtatttttatggcagcataacctaggttacctgaccaaccagccaccgcagctctccctgcctggctagcacaaacgcatcggtctctaacttccagtgcacagagccgagttttcagcccttgcagctgcgaagctctgttccctgctctccctcaaagttgccattctccagcaggcacgcagaaggcagtgggttcagcacctgcctcagaggaagccctcggtgcccatcccagcaggagtggtgaaggagcgtttggaaggggaggtaccaaggcagggcagtgcctggaaccctgcgtacccggtgcacacatcagactccccagggctcctcccaaaacacgcagcctctgaacttacatcatcgcctctcctcctctccctctgacccctaaaagtggcagaaaaggaataaaagatataacgtccccaccaccacctaagagggaacaggagaagggaagacatgttaatagacttcagacagcaggtagaaagctgactctgaagattggagaggctgag

SEQ ID NO: 914108 - DNA, 4001 bp, Homo sapiens
ttcttcttctttttccttttgagacggagtttcgctcttgtcacccaggctggagtgcaatggcctgatgtcggctcactgcaaccaccacctcctggattcaagcgattctcctgcctcagcctcccaagtatctgggattacaggaacctgccaccacgccccggctaatttttgtatttttagtagaagcggggtttcaccgtattagccagactggtcttgaactcctgaggggtttcagcatgttagccaggctggtctctaactcctgaactcaggtgatccacttgcctcggcctctcaaagtgctgggattacaggcgagcgccaccgcgcctggccaaacaaatgttttttatttgcgactccttctcctcggatggaagaggatgatttatggactaatacagaggggttccttggtaagaatgaaaattaagcgcggaacaactggtgacttgtcaacacaccatcaaatggcccttgcagcctcacataaatgcagacaagaacaaggttgttacagggagctgacacacctgcctgggtttagtgcccagagtcagagaccactcacgggtgcggtggtttagtttctcaaatgagaagctattttatgaaaaaaggcaaaaagctgctgttgtctaacaaacagttaagtttgaaaagactgggaaggtggaatcctgtctattcagctaaagggatgagacgctacttgttttccccaagaagttaacgaccccaaagctgctaggtcccgacccaagaccaccacactgcagaacatgaaaaccagaatgccgttcgctgcagatctgtagttcaaaaaataataataataaagctgccagatatggtaaactctggccattcccctggggtacccttcctaaccgccccggtggagcctagacagtggcccctagcccaaagcctctctatccagagcatcacttttctaagcagaaagttccttctgtgcactccacgggctttaagagttgaggaacggactcagcccggagccagtactagcagcggccaggcacaccttggggactatagctgcagtgtcctagcgggagggaacgtctccggggcgtcttggccccccggaccggccgcccaaccgcagcccccgggccctcagagcagcgcctagcctctgtggcagaagacggggccgcgctcgcccctgcagcgcggagctccgcgctcacagctggcgcgggacgcccctcccctccgggtcccgcactcacccaccgccctgatgcggaagccgcgcggcggccgcagggcccggcgccgccaggcatcgcgcagcacctgcaggcaggcggggggcgcgcgcaccagcagcaccccccgccgcagccagccctggaaggccagccgcgaggcggcgcgcgccagccgcgcgttccagaagcagcgcgcgttggcgcgacggaaagcgcggaacaccgcgcgcccaccaggctcctccgcggcccccgccgccttctgcgcctccagccggcacagcactagcgccagcgagcccggcgccagctgcacgggccgggacgcccctcccctccgggtcccgcactcacccaccgccctgatgcggaagccgcgcggcggccgcagggcccggcgccgccaggcatcgcgcagcacctgcaggcaggcggggggcgcgcgcaccagcagcaccccccgccgcagccagccctggaaggccagccgcgaggcggcgcgcgccagccgcgcgttccagaagcagcgcgcgttggcgcgacggaaagcgcggaacaccgcgcgcccaccaggctcctccgcggcccccgccgccttctgcgcctccagccggcacagcactagcgccagcgagcccggcgccagctgcacgggccgggccatgctttcgccggcggccgggagcccgcaacgcagggcctcggcgagcgcggcggctacgacgccgctcgctcggcgggaggatcggccgactgcgcgcgggtccgcggcgctggctgccgggggaacggagctccagggggcggggccgactgcgcctggcgggccgggggtggggcggccgtgcttaggccggcggagcgctctggaggagaatccagagcccagcgttcggcttcgttctccacacccgggcccaactcggccccctggcgatgccctcgacttccagccgcctcgaggtcccgagctccccttcccccaggggcgcgctctggggtttttccaagtcctggggctcctcgcagctccctggagaacctgactgcgtccatccgccgtgcgaactgcagcgccaggagtccccagggcggggagactcgccttcgacctggctttggggccgttccaagttagcaaccacgaggaacagcctgagggtgtcagcgggggcctgggaggtgtgggggttgagcaggaaacctaggtttgagtctcagttctgcgcctaagctagttgtttgtttctatttttgttttttgagtcgaggtctcgctgtgttgcccaggctggagtgcagtggctattcactgagttctgggctcaagcgatcctctgatctcagcctcccgagttgggactacaggtgcccgccacatcgcctggcctgctcccaacctgttcattcaagttatttcccttctctgggcctcagaaatgtcccagctactatttcacaggataataaactaaggaccctttcatccatgactttctttttttttttttttgaggcggagtctcactctgtcgcccaggctggagtgcagtggcgcgatctcggctcactgcacggtccgcttacctggttcacgtcattctcctgcctcagcctcccgagcagctgggactacaggtgcccgccaccacgcccggctaattttttgtatttttagtagagacggggtttcatggtgttagccaggatggtctcgatctcctgacctcgtgatccgcccgcctccgcctcccaaagttctgggattacaggcgtgagccacggcgcccggccggcctcatccatgactttctgaagttgtaggatctggtcctaccccggggatatcccatactcttgagtgctgaggaaagcagagtggagaggtgccaccctgattggtgtggcgctgtggtgatatcgtaggattctgccctgggttagatgtggacattctgaaaagacggacaccgtcctgccccagaggcaaagggagagcttgtgatgcgtggcggtagaatgtgacctgtgcctcaaagcagtgaaggccgattcagactgaggacccagactgaggcccagcgggagggctccttgagaaaaaaacccatttgaaaatacaacatgttaaaagaagaggaaggggccaggcgcggtggctcatgcctgtaatcccagcactttgggaggccgaggtgggcggatcacgaggtcaggagatcgagaccggcctgacctacaaggtaaaactccatctctactaaaaatacaaaaattagccggatgtggtggcacgcgcctgtaatcccagctactcagggaggctgaggcagaagaattgcttaaacgcggaggcggaggttgcagtgtgctgagatggtgccaccgcactccagcctgggtgacagagcaagactccctctcgggaaaaaaagaaaaagaagaagaagaggaagggcattatgcttggtaccagaacacagtactgtgagggagcagaggtgcttggcaaaatctaggagtcattccagacttcccactccctcagctcatcagtcctcaataaaaactataaacatggagataatttataccctgcccccagtaagcacgcaataaatgatagataataacaatagctaacatttattgaacactatatgctggggccattaatttcaagactgtctttttttttttgagactgtcacccatgctgtgccacccatactggagtgcagtggcgaggct

SEQ ID NO: 914109 - DNA, 4001 bp, Homo sapiens
cccaaagtggtgggaatacatgcatgagccactgtgcccagcccaggcccacttttctcctgacacatgacaacaagttcatcacaacacatagttaaatataaaggcacaatgagaatgggtcattaagctagcaagagctgctttccactcagaagcgctcttcaacaactcctctcaaccagagaacagttcgccagtgagagaggactgcgacaccagttccacctcctcccgtctactctgacagaggaggctgttccctacaatcctccctagacagcaggtggctggtccccaggctctccacgctgttggcctcttggcatcctcccattgatgcgggcagctggcctcagccctgcacagcctactgacaccgatgtccaggggaagcaacaggttttcaccaggaggaagactcagtcctaaaaggagaggtaaccagcaaagatgtccacttgccccttcaggtctaccctttggctacacccccaagcagctgcagaacagtctttcaagactcattgaagatcatcttacacaatgcctgcatgaatgtggtcctggacagtttcaaccaatatctcagtttttggtccagcaagactttgaggacaggttcttttccagagtccccagaacatctgttctgcccaaatgctgaaggaagaaacaggctgcaaacaggaatgggaaattagaaaagaccattcctaccctaaagctacttgagggttactctcagctccccggagaaactgcaggccatggccgagaagctcctcttaatgtcccactgcacaattcctccctgctggggtcccagagtctccaccatttatttccaactggaggtgggaagctgtcggccccttcaatcctaagccaaaccatggttctctctacctaatgccctaaagcgaagcaactgcagagctaggaggaagctctgcacggagaaagagaacagtgcagagtaagcaaaaagtttatcaggaagagctgctccgtcaaacttcaaaagcaaaagctttgccctgatacgacgtctgagctaatcgggaaggtatcaaaaggagacctcctcctctctccacaagcaccaggccctcatctttggccctcctacccaccacaggagagccctgggccccccgaaccccccattctatgcagtctcgtgccctctgagcttcttcggcttcgctcctccaaagccctctcaaatgctccccaggccccgcctcgcctctcccatcccacttcggccgcccccgcttggcttcccctcgcccactaatgaccccctacaggcgccccctcttttcaccacgtttacagttccctcgctcctgccgttcccccctctgctcctacacacacccccagtcctcactctattctcctaatcccggttaacccctcagtacccacgggctccgttaacccctttgtccccattcccaacttgagccttaactccttccctcgcagcaagaagccctccttctgagtgctttaaccattctctacccctcctcccacctcccacaaattacttcgccctcggcgctttaaccctttccagcccgcgcctgtccgtctccccgcggcccagagcataccagtacttgacgatagcggtaacctggagcgggttcggctggtcagggtaaaggcggcggcactctccgtagatggcgtgcagtcccgggggaaagagcgaagcgaaggccgggggggcagtcgggccaggggccgggggcgcggtggggccgggggcgccgctaggccgcagctccgccatcggggtgcgtagggcaggcactgggggaactggagagggcaaacgacggggagagcactgacgggccagcgggcggactcggtgggtgagactccccgaggcgatgggggctgcagcgaggtctagctccgcgcctgcgcacggcgcactgtccgcccaggctgtcgccgccgccgagtctgccagagggtgcctcggggcggcggggcgctaaggggggcggggcgccggcgcaccctatccaagcacccattggctaatgtctgtgccagtcacaggcagggaaggtgtgacttgacaataggccccgcctcccctccctgtgttgggagtgtcccaaggctcttggtctccccctagtgttaggaggaacccaagtttagagatgctgagcaccctctgaggtgctaaggtcccacgaaagcagcgagaagtgcgccaacaaaggatttgttactgttttgctgacgcgctgctaactaggatttaaacataaatctgacaatggattgattcattcatccatggggcgttagtattaatagatgataataaatctaatgttttctagggctattgacaaaaaggtccctgaaatttcaagggggctgggggagaacataatccagagaaaaaaatgcactgggctcatttgaaagcagtgacacataacctctcttcacctccattttctcaaccatcagtgtcaattctagctcgttatgaaaattaaagagatactcgagcagtttctgaaacccttagatgatgttttaatgaccaaaagattacctataccagtagttccaattgccaatcttcggatcaatgttagcctgttatgcagaaaaaaagaaaatgcaaaaggcaacgacaatgtacaggtttttaaacttaaagctaattttatgcaatttaaattgttttcctttgttgtaggaatatgtcctctcgcgtacgtgtgttaacatttcctttttgttagagtgtgaggtgctaggagatgtttattaaagtcttacagacccaaataaaaacatgagaaccttatattgtctaagggaacgtcggggggagtggcagggctgatctgcaaaatccaaacatccatgaattacgaccaatccaaaccgaactacagacaagtactcgagaagactacatacctcagcatgcactgcgaactccttcaaagggactacagatccaggcatgcaacatgaccatcaacctgtgtctctggctgtttaatctagggagaccacaaatcccagggtactgcgcattggaaatgcgactcccaatcttaaactaggcgggcaacaaagcaagctagatcgctaacccaggcgcaaagcttgctggggattgtagttcttcagaggcgaggtcgggccgctccctcgccgccctgaaccggcggctagactgcgcatgcgtgtcagtggcgctagcggcggacccggctgggcagttccttccccagaaggagagattcctctgccatggagtcctacgatgtgatcgccaaccagcctgtcgtgatcgacaacgtgagttgcgtctttcctatctataaggggacttgggctctcctcctcgaaaggatcgcttcccggggttcagcctgagccgccggctctttgtcactggcccggcctgtcaggcgcgttcagccaccgccgcctccttcctccccttatcacatagtccgcaggcaaggcggccagccagcaaaagtgggatggagaactctggagtggataaaggaaagagttatagtccaagccagtccttgggcccttggctctaggggccttaaccgctgtgtgagattcccgtcgcccgccctctcccccatttccgatcgctctattggttgctctggctgtccatcttagccaatgataccgcctcttagccttgccggatgaggctaggcctctgcggtgattggctcacgcccctgccattcttccttgccgccatattgttttccctcttgaaggggcggggcagtgctccagggctgtggggattggcttccgggactctgggtggtggggcctagaggcgagtgcccgcccgcgggtggagaacggctaagttttccttcggtctcagccggcgctgcggcttggtggtgtggatctgggtggggcccgagaatctggtgccagaaaccgctgta

SEQ ID NO: 914110 - DNA, 4001 bp, Homo sapiens
tgggcaacatagcaagaccccatctctacaaaaaattaaaaaattatccaggcatggtgatgcacgcctgtattcctagctacttagaaggctgagccaggaggattgcttgagtctgggagttggaggttacagtgagctatgatcataccactatactccagcttgggtaacagagcaagaccctgtctctaaaaaaaaaaaagtaaagaaaaaaaaactaaaaaaaagcttaaaagagtaaattttatgtatttttataatttaaaaataaataatagtataattacattattaaaataacacattctctgctatggtttgaatgtcttctccaagactcatattgaaatttaattgctattttaacagttgagaggtggaacctttaagaggtgattaggacatgaggagtttgcctttgtgagtggattaatgccattatcacaggagtcagttatcacaggaaaaaaggataagttcagccccctttctctgtctcacaggctcatttgcctttccaccttccaccatgtgatgatgcagccaaaggccctcatcagatcccggctcagaaccatgagtcaaatacacctctattgtttataaattactcagtctcaggtattatgttataacagcagaaaataaagacagtctcccagcaccaagtaaagtgaaaggccttgcttaacactggaagaatatgtcaaagaataacatatactgtgagttccatcacatgtttagtgaaagtactgtacttctgctctgaaaaacatattgtagtctatattttagatttacaataggaggcaccaatgtcgcttgttgaagtgagacatttctcctcctattcctggagacaattctggatagcatttcctcaatctcccagtttcatatggtcagaggaaactcccttacctccctaatcatcccgaaactcaccttgaaaacattcacatgcctctctgtcaacgaatccatccaaacttaagttttgctgagcaaagcccgctgccactaactgatgctacctcttcttttctctctggagccggggacaccctaccttgttctagaccttgtcatgttctaccttgtattacagttcactttccatacacgtgtcctcccccacgataccgttacgtttcttaagaggggatctggatctgagtctggttcctcttggcaaccaccacacagcctaacagcgtggtatgagtcggcgcctcctcaatgataaagaatcctaaaaggagtctccgctggcttttcactgccacatcccattcgggggtgggagagaaacaaagaatgcaagaaagagcgggcgtccacctaacaactcaaaaaagtcaaatcttcccaacacatgagtgtctaaaccattcagagagcagggcagtaaaagggaaaaggccgcttctgggacgaggcgttaagaattaatcagatacagtcctaagccgtttgaggggctcacacaccagcgaaggaggcagacactgagaggcacgatgacaacactcgatgggacctcggatccccaggggaaggggatgtagcttcctcccaaccagcctcggcccagcagacaccaccctctgccgccctcagtagttcccgcactcactcttgtccagaggccgggttagctcggccccgacgtcgccgtcggcgctggggccctgaggtttcacagtcaggggcacgaacaaggacgtgtttggtattttggagccaccggaggcagaggaggaggcggtggcaaggacagaaacttgccccagaaccccgggaaagggcccaaagtggggacgaagggcagagcagatggctgcccggtggccagcctggcgccccgccgggagccgagcccacaatagggcacgggagaaggacatcgaggccgcaggttctacactgtctggcgcagccgcggacacggcggcggacagtgacgcgcacctccagcgcctgctgtccagaaagacccaggccgagcaggtaagctgcccgggaaaacgcctgaccgttaaggaaaacgccgtgccgtgagggtgttctttcagggaaaaagaagattagcaggcaaaaccactagagataattctcgttctctttctctgttttgttggtgattgggaccacctttccctaaagaagggaaaataatcaggcatctttgggatgtcatacatgagcggagggggcctgctagtcgtgtcacgtgatgcaaactagtactttggtaagcaagtgtccagaagcacgtgggtgagcagtgagagaatgggtggtggagcagcaactgcgaatgctcagggtacgagtatgtcttgcggactcaaacactaaatagcatttcccaaaagtttcttgcattgttaaccgtcatttcctgatatgataacgttagcgataataacttgatatgcccctcagaaatgttgctaagaaatattgttgcactattaaaccccttgtattacgtaagtacttttgctttaatgtgagcagtttgcgtacatcatcctagcagctatgaccacatagttgtgaccacatggcaaaaatacgtgctctgtaccccagccatagtttcgttccattgcatttgttgaataccgtgttctcatgtgaggctgcaacatgttaaattcacaagtttaacccgggcgtggtggttcacgcctgtaatcgcagcacttagggagggcgaggccggtggatcatctgaggtcaggagttcgagaccagcctggcaaacatggtgaaatcccctctctactaaaaatacaagaatcagccgggcgtggtggtgcacacctgtaatcccaattactagggaggcggaggcaggagaatcgtttgaacctgggtgccagaggttgcagtgagccgagatcgggccactgctctccagcctgggcaacagagtgagactccgtctaaaaaaaaaaaaaattcacaagtttagcatctccatccacatctctttatacttacatcattaagatcttacaacttgaaggaacgtgttatgtaatatacaatactgtatgtctaataggattccagtaacaatttgccacgtgcctttgattcacaaaataatttttaaacatcagggatacaaggagacagtcctttgctttcaaaggttctgatctggttttggtggtaagaacagtacacgttaaataatgcacttattactctaatagactaatggcagttcaaagaaaggagcaatttgagagtggtaaggagatttctgccagacttaaaagtaaaacatagagaagcggtaagtaaattctagtcagtggaaacgatgtaagcagaggcttaactaaggaaaagacatactgaaaaaaatttaagtaacagagttaacgcagacctaattctatggcttacaaatagtgattatatttttgagaagagaaatcattcattaggaagtacctaggatagactaggataaacacaaatatgcagggaggaaaattacaactttatcaacagttctagctgaaggtggtagattcctgtgtctgagttatgatggagaccatgtatgtggaatgagaggttttacaagactccttagataatgtagtgagtgactaaatatgctagaaaatgttaataaacaatgatgtctcgtcagatttggaaactaggagaatgaaggataaaccaaacgtttaatacgtaactgaggcaagcactatgttgttccttttaatcttttaatatgcttgacaacaatttagaggtattattgtcaccaggttaactaacttgccccagtaagtggtagagtcagatacaaatctaaatcttttttttttcttttttttgagacagtctcactctgttgcccaggctgaagtgcagtggtgcaatcataactcactgcaacgtccacctcccaggctcaagcaattctcatgcctcagcctcccgagtagctgggactacag

SEQ ID NO: 914111 - DNA, 4001 bp, Homo sapiens
atttacataagccatgtactaaactcaaagaaaattagacatactcatcatcaaccctccagaaaccagaaactaattgcgttccagaagatttcaccctcaaatttctgtaagcagcatgttaccacactgaatttaaagtgtaaattaacacgtttaggaaaatggaacaaacttgttgttagggctagtgtcatggtaagcacttgacaaaatcaaaagtcctctgcactacccatcgctcggtcaccgagctatgtgactttagtgaggtctcaatctttttggctgtcagattcactggaaaaaaatggagaaaactggtgttaccaaacaaaatctatcagtaaactcaagctttacttggtagctctccaaggtagttgcgatcaccttttgcgttttgaggtaatttcagggaagggagaacacttgttagtggcaataacttttccggcccctttcctcatcctccccacctcacacagaaacttcattgtcagaaacccttaagcataatttctaccatctcactggctgcaaacgattccatcctaaagcagtaaagacaaaggtattttcctccagaaaacgtgggggaagaggctgattggctttgtagtggtcgtttgggggtaggacagtgatgggaaagaaatgaccccctaagtcccttccatctacaaaaactagagaacgttttgtgttaagctgacctcattaagggaatcacgtataaaggaggttcctcttatctactcaaggtgtgtttgtgtgcttttcctaaacatttttatctagttgaggattcaaaacacaacccgcaaaggaaatgctctttgaaaattaaaaaaaaaaaaaaagtgaacatgaaaaactgcaaacacgtggttaaaaaaagaaagacaatctctcgacagtctccagtaatgcagaaaaagatttcactgacaaaattaaatagttcatgaccaccacaaacaccttccgctggttcacagtaacccctgacattctccaaggagaaaaattcagggataatgaggtcataatcccagcggagaggagacgagcttgaaaacacctttacattccggaacgcacggaaaagttccaggctctcaaagcgtgcgcgacaccaacaccccccgacgcccacacccacgcgcgctcggtgcccagttccccggtgcccaattccccagcgtccacagaaataacaccaagctcccggtgggtgaaagagttaccgtaagccagaggctgcaacctcaaatacccactttctgggcgattctccaacgaggcactcaacctcctagcgtgtccgccttgggggggattcctcgcttatcccctttcttagcacacaggcgccccgatttactctccccctctgatattaaggtcatgttcacgccggcgggcgtcgcttcccgcctcccacttcaaaggcccgggcgcatgccgcacgccgcgctcgaaccaccacaaaggagccagtcgcagccgtgccccccggacctccaaccggggactgccggggagcggcctcgaagcccgaggccgccacgggagacgcggagggggccgggccgagcgggcggagaggccacgctccacttccgaagtgccccaggctcggacagtgcccacctccgcggcgggagccggccgggcagggaggcgggtcagcggcctgggggaggataggcgtccgcagcgtgcgtcccggagttggggtcgcggcgggcggggaaccgccacgtcgccatctggctggcccgcgggacggccccgccgcccgggccttgggagcttgcctgggaacagggaaggcgagggggccgcgctccagcctcacctcctcgcgcctcggccccgaccgccgccatcttgtagagctttcattcaaactggcgcggtctgacgggatagctcagctggcccgacgccccgcccctggccggcccgcgcgggacttgggggccggggcttgttgggggacggaacccgcacggcgtcctgacgtcactggcggccgaccccccgccgcggcggccagcgcgcctgcgccccaaagctaggcccggccccaagcgcgaggagcggggcggggcgagcgcgcgtgctcccggatcctcggcagtgtccggcgcccccttcccttcgccaggcccgtttggcgccttcactcgggaagacgtcggccaggactttgcgctttggagacgtcttacttcggcagcactcgcacactgcgagatccgacacgggcagcggggacctagggagccggggacgctgcctgtcgggtacggttccgcagctaccgcagccccgtgggccatggttagtctccccccgacaccgctccctctagagctccgggcttcggaagcggctgcacgtgggcatggctggagaggttccgctggcttggggcagtcgccgggattccgactggttggtgtggggtgtggcctgtgctatccagctcccagctgatcctaatgtgcggcacagcggaaaccaccggtccacatcagtgcttctcacttaaaggggcttacgaatcgtcgggggtgggggagctggacttggaattttttaagagatgaggtctcactctgtcacccaggctggagtgcagtggcgcgattacggctcactgcagactagacctcctgggctcaactttaatgtaaattgggattgggtaggtctgtaaggggacccgagctcccctcccatgttgttgccaagctcctgagctcggcctggtggcgggtgggggccgggaggagaaggacacgttagtaaggaagctgcaggacgactccaggggcctcccacctggtctccacccccctcccccacccattcttgacgctgcatccatgattgttctaaacaacctaaagcagaaatcttagagcaaataacgaaaactggcagaaggccatttgatatctccttaaaaaattcatgtaaaaaattacataaacgtttcaaagcagtatgtataaatttgaaatactggaaatgaacgcagaccattaaaggaatagttaattatttgattccattatgaaatactgtctagccgtcttaaaaaggtgttcatgaagcttttagtattcagcaaaaccaaaacaaatccccctgaaatatagttttaactatggaagaaaaaaatgtataggaaaataacgaaatagccttttcggagtgattttctttttaacttctcgtttttaaatatttaatcattttctacgatgggaaacaccacttcctcacacacactcatgctcccagactttatttagctacaaacggcatcataatacaaatactgttctgcagtccgtgtgtgtttcaatgcaactgcatttctcagacatgtttctaagatttgagtccttagtaaattttgtattccatatctcattaccttgagataaggaataaaaggccctgtccaaccctgtcacctggaagagcatccaggccctttaaggcttagtctatctaggattatgccttcagacttggatacagcctcccgtcctaaccggcccctgtattcattacctctcctgtatgttttcagagcccaccaaggagcggccatcgctactcactggccactcttgaatcctttttggctccttttcctcagtccaacctgggttcctcagagaagagactgtagtcctgggactgcatttcttttccgccctctccctatgtgactgccccaattcccatggatttaaatagcatcttgacacacaagatgcctcacttatcgtctccggccctggcctctgcctgaattccaggctagaatatccacagtgcgtaatggacatatgcccttaggtgttgcacaaacatctcaaattgaacatatccggaaaaatacacttctgaacttcgtagcattcagaataaaactcaaacctccagatggccggcagggcctccagtgatgg

SEQ ID NO: 914112 - DNA, 4001 bp, Homo sapiens
attaaaaaaatggagtatatcgatattttgtaatacttatggactgtactgtttttaaagccaaacttttaaaacggtgttcaatttacataagccatgtactaaactcaaagaaaattagacatactcatcatcaaccctccagaaaccagaaactaattgcgttccagaagatttcaccctcaaatttctgtaagcagcatgttaccacactgaatttaaagtgtaaattaacacgtttaggaaaatggaacaaacttgttgttagggctagtgtcatggtaagcacttgacaaaatcaaaagtcctctgcactacccatcgctcggtcaccgagctatgtgactttagtgaggtctcaatctttttggctgtcagattcactggaaaaaaatggagaaaactggtgttaccaaacaaaatctatcagtaaactcaagctttacttggtagctctccaaggtagttgcgatcaccttttgcgttttgaggtaatttcagggaagggagaacacttgttagtggcaataacttttccggcccctttcctcatcctccccacctcacacagaaacttcattgtcagaaacccttaagcataatttctaccatctcactggctgcaaacgattccatcctaaagcagtaaagacaaaggtattttcctccagaaaacgtgggggaagaggctgattggctttgtagtggtcgtttgggggtaggacagtgatgggaaagaaatgaccccctaagtcccttccatctacaaaaactagagaacgttttgtgttaagctgacctcattaagggaatcacgtataaaggaggttcctcttatctactcaaggtgtgtttgtgtgcttttcctaaacatttttatctagttgaggattcaaaacacaacccgcaaaggaaatgctctttgaaaattaaaaaaaaaaaaaaagtgaacatgaaaaactgcaaacacgtggttaaaaaaagaaagacaatctctcgacagtctccagtaatgcagaaaaagatttcactgacaaaattaaatagttcatgaccaccacaaacaccttccgctggttcacagtaacccctgacattctccaaggagaaaaattcagggataatgaggtcataatcccagcggagaggagacgagcttgaaaacacctttacattccggaacgcacggaaaagttccaggctctcaaagcgtgcgcgacaccaacaccccccgacgcccacacccacgcgcgctcggtgcccagttccccggtgcccaattccccagcgtccacagaaataacaccaagctcccggtgggtgaaagagttaccgtaagccagaggctgcaacctcaaatacccactttctgggcgattctccaacgaggcactcaacctcctagcgtgtccgccttgggggggattcctcgcttatcccctttcttagcacacaggcgccccgatttactctccccctctgatattaaggtcatgttcacgccggcgggcgtcgcttcccgcctcccacttcaaaggcccgggcgcatgccgcacgccgcgctcgaaccaccacaaaggagccagtcgcagccgtgccccccggacctccaaccggggactgccggggagcggcctcgaagcccgaggccgccacgggagacgcggagggggccgggccgagcgggcggagaggccacgctccacttccgaagtgccccaggctcggacagtgcccacctccgcggcgggagccggccgggcagggaggcgggtcagcggcctgggggaggataggcgtccgcagcgtgcgtcccggagttggggtcgcggcgggcggggaaccgccacgtcgccatctggctggcccgcgggacggccccgccgcccgggccttgggagcttgcctgggaacagggaaggcgagggggccgcgctccagcctcacctcctcgcgcctcggccccgaccgccgccatcttgtagagctttcattcaaactggcgcggtctgacgggatagctcagctggcccgacgccccgcccctggccggcccgcgcgggacttgggggccggggcttgttgggggacggaacccgcacggcgtcctgacgtcactggcggccgaccccccgccgcggcggccagcgcgcctgcgccccaaagctaggcccggccccaagcgcgaggagcggggcggggcgagcgcgcgtgctcccggatcctcggcagtgtccggcgcccccttcccttcgccaggcccgtttggcgccttcactcgggaagacgtcggccaggactttgcgctttggagacgtcttacttcggcagcactcgcacactgcgagatccgacacgggcagcggggacctagggagccggggacgctgcctgtcgggtacggttccgcagctaccgcagccccgtgggccatggttagtctccccccgacaccgctccctctagagctccgggcttcggaagcggctgcacgtgggcatggctggagaggttccgctggcttggggcagtcgccgggattccgactggttggtgtggggtgtggcctgtgctatccagctcccagctgatcctaatgtgcggcacagcggaaaccaccggtccacatcagtgcttctcacttaaaggggcttacgaatcgtcgggggtgggggagctggacttggaattttttaagagatgaggtctcactctgtcacccaggctggagtgcagtggcgcgattacggctcactgcagactagacctcctgggctcaactttaatgtaaattgggattgggtaggtctgtaaggggacccgagctcccctcccatgttgttgccaagctcctgagctcggcctggtggcgggtgggggccgggaggagaaggacacgttagtaaggaagctgcaggacgactccaggggcctcccacctggtctccacccccctcccccacccattcttgacgctgcatccatgattgttctaaacaacctaaagcagaaatcttagagcaaataacgaaaactggcagaaggccatttgatatctccttaaaaaattcatgtaaaaaattacataaacgtttcaaagcagtatgtataaatttgaaatactggaaatgaacgcagaccattaaaggaatagttaattatttgattccattatgaaatactgtctagccgtcttaaaaaggtgttcatgaagcttttagtattcagcaaaaccaaaacaaatccccctgaaatatagttttaactatggaagaaaaaaatgtataggaaaataacgaaatagccttttcggagtgattttctttttaacttctcgtttttaaatatttaatcattttctacgatgggaaacaccacttcctcacacacactcatgctcccagactttatttagctacaaacggcatcataatacaaatactgttctgcagtccgtgtgtgtttcaatgcaactgcatttctcagacatgtttctaagatttgagtccttagtaaattttgtattccatatctcattaccttgagataaggaataaaaggccctgtccaaccctgtcacctggaagagcatccaggccctttaaggcttagtctatctaggattatgccttcagacttggatacagcctcccgtcctaaccggcccctgtattcattacctctcctgtatgttttcagagcccaccaaggagcggccatcgctactcactggccactcttgaatcctttttggctccttttcctcagtccaacctgggttcctcagagaagagactgtagtcctgggactgcatttcttttccgccctctccctatgtgactgccccaattcccatggatttaaatagcatcttgacacacaagatgcctcacttatcgtctccggccctggcctctgcctgaattccaggctagaatatccacagtgcgtaatggacatatgcccttaggtgttgcacaaacatctcaaattgaacata

SEQ ID NO: 914113 - DNA, 4001 bp, Homo sapiens
aatatattatcaccaaggtgaataaactccagttattaaaaaaatggagtatatcgatattttgtaatacttatggactgtactgtttttaaagccaaacttttaaaacggtgttcaatttacataagccatgtactaaactcaaagaaaattagacatactcatcatcaaccctccagaaaccagaaactaattgcgttccagaagatttcaccctcaaatttctgtaagcagcatgttaccacactgaatttaaagtgtaaattaacacgtttaggaaaatggaacaaacttgttgttagggctagtgtcatggtaagcacttgacaaaatcaaaagtcctctgcactacccatcgctcggtcaccgagctatgtgactttagtgaggtctcaatctttttggctgtcagattcactggaaaaaaatggagaaaactggtgttaccaaacaaaatctatcagtaaactcaagctttacttggtagctctccaaggtagttgcgatcaccttttgcgttttgaggtaatttcagggaagggagaacacttgttagtggcaataacttttccggcccctttcctcatcctccccacctcacacagaaacttcattgtcagaaacccttaagcataatttctaccatctcactggctgcaaacgattccatcctaaagcagtaaagacaaaggtattttcctccagaaaacgtgggggaagaggctgattggctttgtagtggtcgtttgggggtaggacagtgatgggaaagaaatgaccccctaagtcccttccatctacaaaaactagagaacgttttgtgttaagctgacctcattaagggaatcacgtataaaggaggttcctcttatctactcaaggtgtgtttgtgtgcttttcctaaacatttttatctagttgaggattcaaaacacaacccgcaaaggaaatgctctttgaaaattaaaaaaaaaaaaaaagtgaacatgaaaaactgcaaacacgtggttaaaaaaagaaagacaatctctcgacagtctccagtaatgcagaaaaagatttcactgacaaaattaaatagttcatgaccaccacaaacaccttccgctggttcacagtaacccctgacattctccaaggagaaaaattcagggataatgaggtcataatcccagcggagaggagacgagcttgaaaacacctttacattccggaacgcacggaaaagttccaggctctcaaagcgtgcgcgacaccaacaccccccgacgcccacacccacgcgcgctcggtgcccagttccccggtgcccaattccccagcgtccacagaaataacaccaagctcccggtgggtgaaagagttaccgtaagccagaggctgcaacctcaaatacccactttctgggcgattctccaacgaggcactcaacctcctagcgtgtccgccttgggggggattcctcgcttatcccctttcttagcacacaggcgccccgatttactctccccctctgatattaaggtcatgttcacgccggcgggcgtcgcttcccgcctcccacttcaaaggcccgggcgcatgccgcacgccgcgctcgaaccaccacaaaggagccagtcgcagccgtgccccccggacctccaaccggggactgccggggagcggcctcgaagcccgaggccgccacgggagacgcggagggggccgggccgagcgggcggagaggccacgctccacttccgaagtgccccaggctcggacagtgcccacctccgcggcgggagccggccgggcagggaggcgggtcagcggcctgggggaggataggcgtccgcagcgtgcgtcccggagttggggtcgcggcgggcggggaaccgccacgtcgccatctggctggcccgcgggacggccccgccgcccgggccttgggagcttgcctgggaacagggaaggcgagggggccgcgctccagcctcacctcctcgcgcctcggccccgaccgccgccatcttgtagagctttcattcaaactggcgcggtctgacgggatagctcagctggcccgacgccccgcccctggccggcccgcgcgggacttgggggccggggcttgttgggggacggaacccgcacggcgtcctgacgtcactggcggccgaccccccgccgcggcggccagcgcgcctgcgccccaaagctaggcccggccccaagcgcgaggagcggggcggggcgagcgcgcgtgctcccggatcctcggcagtgtccggcgcccccttcccttcgccaggcccgtttggcgccttcactcgggaagacgtcggccaggactttgcgctttggagacgtcttacttcggcagcactcgcacactgcgagatccgacacgggcagcggggacctagggagccggggacgctgcctgtcgggtacggttccgcagctaccgcagccccgtgggccatggttagtctccccccgacaccgctccctctagagctccgggcttcggaagcggctgcacgtgggcatggctggagaggttccgctggcttggggcagtcgccgggattccgactggttggtgtggggtgtggcctgtgctatccagctcccagctgatcctaatgtgcggcacagcggaaaccaccggtccacatcagtgcttctcacttaaaggggcttacgaatcgtcgggggtgggggagctggacttggaattttttaagagatgaggtctcactctgtcacccaggctggagtgcagtggcgcgattacggctcactgcagactagacctcctgggctcaactttaatgtaaattgggattgggtaggtctgtaaggggacccgagctcccctcccatgttgttgccaagctcctgagctcggcctggtggcgggtgggggccgggaggagaaggacacgttagtaaggaagctgcaggacgactccaggggcctcccacctggtctccacccccctcccccacccattcttgacgctgcatccatgattgttctaaacaacctaaagcagaaatcttagagcaaataacgaaaactggcagaaggccatttgatatctccttaaaaaattcatgtaaaaaattacataaacgtttcaaagcagtatgtataaatttgaaatactggaaatgaacgcagaccattaaaggaatagttaattatttgattccattatgaaatactgtctagccgtcttaaaaaggtgttcatgaagcttttagtattcagcaaaaccaaaacaaatccccctgaaatatagttttaactatggaagaaaaaaatgtataggaaaataacgaaatagccttttcggagtgattttctttttaacttctcgtttttaaatatttaatcattttctacgatgggaaacaccacttcctcacacacactcatgctcccagactttatttagctacaaacggcatcataatacaaatactgttctgcagtccgtgtgtgtttcaatgcaactgcatttctcagacatgtttctaagatttgagtccttagtaaattttgtattccatatctcattaccttgagataaggaataaaaggccctgtccaaccctgtcacctggaagagcatccaggccctttaaggcttagtctatctaggattatgccttcagacttggatacagcctcccgtcctaaccggcccctgtattcattacctctcctgtatgttttcagagcccaccaaggagcggccatcgctactcactggccactcttgaatcctttttggctccttttcctcagtccaacctgggttcctcagagaagagactgtagtcctgggactgcatttcttttccgccctctccctatgtgactgccccaattcccatggatttaaatagcatcttgacacacaagatgcctcacttatcgtctccggccctggcctctgcctgaattccaggctagaatatccacagtgcgtaatggacatatgccc

SEQ ID NO: 914114 - DNA, 4001 bp, Homo sapiens
acatctttcttgaaggcaatacattttaagtacattcaggacaatgccaaagtcctattttgtaaacttgagctcaaatgttgtataaaagttgtggatacaaccatatccttggatccctcaaagaaattctgaggttttaacttatcagtcagtaaggtgggccattatttccaaagcatacttcactcaattttaaacgcacattcagcacagtggcaaagtcacacacagcttaaacaaggtgggaactgcagctccttgcaaaagaaaaggcaaacagagctccgtgctgtgtagaattcctgactccaggcccacctgcctgatgaaacactgcaaaaagcaaaggacagctatttccacctctctttggaactgtcataattctaaaggtttggggaggaaaccttagttctcttcatatacattaagttttaaatatgagttggtttagctatggcactggcattaacacaagccagagataggtggaaagtccatcaagccctatagcctagcataatcaaacctgaaccccggggtacagcacacacccagcagtccataaagcgctcttcagtaaccgactttgtcaaaaataaaaaaataacctggaagaataaacagtcctctttggaacagggcagactcttggatctgttaacctctttaagcctcagtttcctcatctgtgaaacagaaataacctcctgggaagaggttgtaaggtttaaagagaaaatgaagagccttccacattgtgtaggggagagtccctggtccattagcccttcataaaaaccagtgcctgccctttccttccaacagaagaagggggtggaggcagataagacaagacacgaaaacgtgaattccatcgattgactgcgaggggctagggttcacagcaagcagaacgtcctgggtttctcttcaataccacctcctcctctcctgttcagatgctgagaaacatctggcgcagtagagatgctgcctctgacatttctatgacaaaacgcgtgcctgtgctagggtttgcacaggcacaagttatcacaacctcgggatggggctggggatggcggacaggagctcctttaatttccccagctggcctctccccttgtgaggaacttctcattgcaataaactgtcagacttcacaagatctctcatgccaacgcctgaagctcttaatcccgcacctgacccagattgcggcctggactggagcctccccgccgctcactcactgtaatgcaattaccgccttctggagctccactcggggtgccagggactgctggctgtcacccggggactaaaccactcccttcggggagcccgcacgcgcgcagaaacgtgggcagctggggtggcctggcgcaccacgcatcgggttcaaacccgcgcgggccctgcggaggcgccggtctgggaccccgggctggggcgcgggagccaccgcagctccggccacttgcggctggtgtcgggaaaggaaccgggcgatgtcgtagttctgatcactggcgcgccactccccgggccacccgcctccccgccatgctctcagcgtaacgggcagccgcgctaacttcccgaaactccgcggagagaaaccctgccccggcccgctcctccccgaggcgcgctccggggacggaagtgggtgggagccgcggccgcgccgcgcctttgttacggctcggggaccccgcgggccgagcgcagcgccccgtcgcagcggcccgggcacccgccggcctccacccccgggaggcgcccccgttcccgcttcggtccccggcagggcctcccgcagccagagcgagactgacccgcgcctcccgccccggagcagagcgcagcggcgcgtcctggcgtctgccggccccggctccgcgcgcccctcggccaccgcgcggagggactttgctcacctacccggctcttccacacctcccggtggcaggatcgccgcttcccgccgacagcggctcggcggccccgacttctcagcagcgccgcggccacgccccgcctcgttcccaccgcgcggggagcgggtccccgctcgggatgattcacttcgctccttacctggaggctcgcgcgtccccaccccttgcgacccgcgcggcggccgggagctggcgccctctgctgggccaccaggcgggagcaccctcggactgggcaaggatcgggcggagagggtggggacacagaggggggccaagcacaagcacccctgcctctctcaacgcgggcaccccttcccaaaacaggggccagtgcgcggggaccacgctgggacgactctcgggggaagcaccagagctgtccccacgccccaggacacgaactcgcgcccggagccgaccccctccacggccagcgggtccagccgcgtcctcggaggtggcccaaggaaaccgcgatgaatcggcataagcacgtcctatcttaaaacaccggaaaggcagattttactttgtttggaaactaagtttgtgtcctgtgtctcagtagctctcagggtggtggcagtcacgcccccccggtcccagggctgggaagatgcttgggctagcccccgctgcagccccggagatgcggggctttaggatcccaggggctggaggccagggccgccctatcgctctcccggccgggggtgtggctgtccaactcgctctgtcgcccgagtgaactcttccagcaggttggcctctcaggctgtcccctgaggacctgagcgaaactctggaggggaccaggaagaagggagagaggacatctccgagaccttcccgggggtgcgcccacactcacgcgcccacactcgcgtccccaccttcccccccgtctcacctccgcgcgctcctgcagagcccgactgcgcccgccctcctcgcccacctgccgggcccgggccgggggtgcacactagcgcggggccttggtggtgcggcaccgtcccctgcccaagctggctctcgaggaggtgtgggccccgggaaagtcggccagggccactgtcgccgtcgccgccggagcagagccagtggcgagctcgtcagggcggaccgggcgcctccgtccccgagagccggcgcgcgagtcccggccagcgggcaggcgcccggtattaattgtagggcccccgggtgtcggccgccaggcgctctgagtggctcggaccgcgcgccaggccggcggggccggcgccacccaccccctcggcgcgcgcccggcccagggacgcgcccacgcgcacgcgcccagcggctcagggctccctggctctcaccggctctgctgcccggaggcagccgcttaccctggagccctgagaggcccctttgagtctccagaccttccagggataaataaaatctggcgacctgtgccaacgctgtgggccagttgcaaaggagaccgtccttgctggccacgcgcacctgtgaaaaagtcgcgggaccccccaatcccctccacctggaccgaaccctgcctcggtggttctcgcactttagctacaccagagtcctccaacgtttgtgaaaacaccatgactgcccctcttcgtgccccctccagtgtctgattctgtaagacttctgtggggcccgagaatttgcacttcgaacagattcccaggtgatgctgaggcagccgcgaagattgagagttagggcttgtaaaagtgcttggtaaacggcagaacagtagataagtagataaatttcaacctgttaagtatgttacttgtctgtttcagtaggtagaggtagttgtgctcctctgagtgttagactactttatgtttcctcctgaatatgcaccatcagacaaaaaagaaaagcgagtgtttttgtttgctctaaaagaccacagattgggtggcctaagcaacagaaattgattttctcacagtcttggagtctggaagactgttctggagatcaagatgtggtcagggttggttt

SEQ ID NO: 914115 - DNA, 4001 bp, Homo sapiens
cctataatcccagcactttgggagcccaaggtgggcggatcacgaggtcaggagttcaagatcagcctggccaacatagtgaaaccccgtctctactaaaaatacaaaaaaaaattagctggatatggtgccaggtgcctgtaatcccagttacttgggaggttgaggcaaggagagtcacttgaacctgggaggtggaggttgcagtgagccgagatcgtgccactgcactccagcctgggtgacagcacgagactccatctcaaaaaaaaaaaaaaaaaaaaaagacatcactggttttggtgagaagagacagcacacatctgcctggcactgggctgctcttctttggagacagagggtacaatttatatcctgcagttttactcaacaggggataccaccagcagtttggccagggtaatgctgtatgggactgtcccctacaccatgtaaattgggcatttacaattcttaaccacatcctcccaaatgccagtgagtcattgagaaaacctgaaacacccccatgcattttcaaacgccccctagggttgccacactatctccggtgaagaaccctcgcagtattcaccgatgaagttcttctctataaatactctgttttcctacctggtaaaaataatgactgcccgtacttgtccatctgatgtggtataaagaaataatcttttttttttttcaaagaagcaacacgtcaaataagccttctatgttctagagttcactgctgtttttcagcagaaacaaatcactgagctaaattacaaagagaccatagcaatctccagggctttaaaaggctgatgcagtattttttcttggagaatttaaaaataaaatgcagttcaaactctagaacctacagtgaggtttttctcataaattctggaacatcgcaagttctagaaatcaagccctgaagaatgagagtaccaaggcaaagaaccctcagaacaaagattatgcaaaaggatcactggtgattttctatttttacatgaattataatggcagtgaaataaaacttgcccttctgaactccacccccatacttgtgctacgattattaaagtacgttgcattgtgaatatactttaattccaagactttaagtgctaacatttagacagaatgtactaagttatattaatcaaatttttagtattaaacctttctctaccataaagtaaatcctttaaaaaaaaaaaaaagtccaatccttctcaacccaagaaatatgcccaagggtatctacaggaatggctgcagtaactggcaaacgctggcaggaattttccaatgactgaagtcaacaaatcctcaggaaacatgctcagacagatggcacttaaaaaaaagcaaaaacaaaaacaacaaaaaaaaacctactgcatttagatttataggaagatttttcacttacttcaaatttctgtataatcctcgttcctctaagttaaagggggaaagaaaatcacactgcaattccttatttttctaatttaaaaaacaaaacaaaacacgttataccctcgaatccagcttttgatgtcttcgagtattttcttggagtctctttccaatgaatactactttcaaattctaagcacaaagtaaaatcccaaaagttagcccaaatagcgttgtacaaaatcaaagatcacgatgtcagcaagcaactgcatctatcagaagcgatgatgattcagaacaggataaatttagaatggtgttttccaaaaggctttttggatgtcaaattcaggaaacaggtaaaggctacatcccaaaagttcctctccaaaaagaacgccaaaatattaataaaaagagtcttctttttgaagtttttcgtcccctagtgtcctcgaggctgaacttccccaacctggcctcggtggagccatccattactgggcaaatccacatgaaacctgaggacacttcagcctggggaggacgcagtcagagcagtgaagcaacttcacatgggacgggccttttatggcctgaactcgagagccttgataccagctcatctaccagaaatagccctggaaattcagaggagcccatcagctgttgcagcaggcctggccagcagctacttcaaatgcaattaggttgtccacactgtctttcagcttgttgtatagagaaattaaaaatacaacagcagtctactgaataagctacaacaatacagatttggatgagcaaacatttctctaacttagtttttttaggctaaaaaaagagcacacaatcgttgacaaagctcagacactgaacaccccaaaagtaagtaacagacatatatacaatgaatgcccgaaaagtaactaacagacatacacatctatgaaacagcatgatataatggcacatgtctctacaagtttacaaattctgtaacctctgtggatttcttcccacttccaataactgtagaaaatgaatcatcagaagaaagcattgtgctggaagtactttctcgaaaatgacacaaatattttctcttaaagccaaagtcagtcctctgaactggcaagatctatcttcctatggctctcaggtagctcacctcactgaaaaaccagatgaacctaacctaatgaaaaaaatattaactatgaagcacaaccacttcttaaatggccatatgcatttttttaaacattaaaaggccactgacatgttgaatacactcaaacaaatatcacaaccctgtttacaaaatacttacaattgtaggtctctgtccctgtcggtaccaagaacagagagtcttaattgtctgcaccaacttcagtataaaccacaaaccccataagacttgggctggagtacagcaaaagctgtgtgctgcgcggggcctcccagtggtatgcctctgggtgtcagggttctcagaccaccagctgcttcggccagcacaggaggcctctcaaagcaggatctaaattcctgttactaattaaccctacagaacaatgcctctccctaagaggacagtcctgaggccaggtgaaaagatgacaggtataataattaaacattggcttcatgactgttttgtgctaggggtatttgtcccagtcaactgtttttttttttttttacccatctcaagataacaaacaaacaaaatttcatagcatggcttttgcatcctaatctcagtcctgaccctgatcttcttttcccttggaccatattggctttttcctcattttaaagtttatttgatcttgttttacgtatttttataagctgtggtaagcccctccctagagaaaagtagggcaaaaataaataaaaacttacatgaaacagttcactatttgggtcttctctgtaaagagaagataggaggagaaaatgaatcactgttaccacaatagtgctatttccttcctaaaaaaagattcactcccacaaaataaacatcagtcttttgtgtgcctcttaagtttttgcacactgcttccccatagcaaccaaactgtcctagattaatacactggagtctaatagggtaaatctccttcgtcacttcttttatatatcctttctgtctttgattatttaaatcccagttaattcttcctgtgcaatccatttactttcctaatttttttgctatctgcctggcttagaagactcatcatactcacttctttccaatgatgataatcatgaattggaagaaaaatcaacacacaaaagatgtcaattgtccccaaactgatctacagattaacaaaattcctatcaaaatcttgcaaggtttttttgttttgttttgttttgttttgtttttttgagacatggtcttgctctgttgtccaggctggagtagaggtgtgcaatcatggctcactgcagcctcaacctccccaggaggcagtcctcctgcctcagcctcctgaatatctggggctacagatgtgcaccaccacactgggctaattttt

SEQ ID NO: 914116 - DNA, 4001 bp, Homo sapiens
agcagtgattgtaccactgcactccagcctgggcaacaaagcacaatctcgtctcaaaaaaaaaaaaaaatcaagcataaaattttgtgaaatgcttatttttgagtttatggagtcccctcattttggtcccacctgaaatcttacacaaattactgctcataaatttttgcattaagttttaaattattcaagtaattggcatgtgtgaaaaagtatgaagaaaaaattgaaacaccaacattccctttccccagtcattcccctttctagtaataactgcagccagttaggtgaagactaatagactttttactaaaatgtatctagtgtcactgaccctagataacatccctgcttcctttttaaaacagatagactaaaactggaatcttgtcctttaaatttcttctgtagctggtcactatagaatgtttgtgcccccatccatagttcgtatgttgaaatcctaaccccctagtgtgactgcattaggaggtggggcctttgggaggtgattaggtcatgagagtagggccctcagcaatgggattagtgcccttataagaccagagaggtctgcagcaacttccccaacatgaggacacaatgagaagacagaagtctatagccaggaagcaggcccccaccagacgctgaattgcaccttgatcttgaacttctagcctcgaaaactgtgagaaataaggcatttctgttgtagcagtttgaactaaggcacaagcgacattggttaaaacttacctaaatatactaggttatgtgaggaacatggagccatgatactgaaaggctagcacaccggcgggccagcaggtgcttaatgaaagggatacgtttgcgtctgtcctgtttacttgctttgtccttcgctggggctttcactgtgccacatctcactgtagggatgctttctgtgctaagcttgtttcagtattcaaaccttcattttgtaagaacatgacagagcacctgccatggcattcacgcaggtagggctggaggcagccaccgacgtttgttaattgcagagttttaactcaagggggacagatgatctcaggacagaatgacaagctgagtgacagcaggagggacgtcaccgtacaattctctccacttttctgtaagtttgaaaatcctcacagaacacccagaggcacacagtgtcctgaagtggaaacggccaggacagtgtcctttctctttgttgggctgcaatttctggacttctgtacaactctgaccagctgcctgtcccctcccttcccagggtgaggtaggagccactatggcaggtcggggtcagggagaaacaaacgggggatctgcgtggagtcggcctcccccggctccccggggcgtcgggatgctgggtggggggccccactgtcaagaaccagtttagtgcgactgggaaatctggacacttgctggttctagggagaggaaggtggaattaggaattcccttgggattgggagcgtcaggaaaatatcctttttgttttaagaggtgtgtatgtaaagtctgtgggacaacgggaagggatgtcttttgactaattacctaaaccaaaattggagcaactatgataacagttcaatgctttaagacaaagtggggggtgtgcgggcaagcactccctcatcttggccgaaatttttctgaagaaacccgctaagtctcaatcagcagcatcaggactgacaggaagaagcagccgccacccgcgccccaaccctgccccgcctcggcgaggtcagaccctcacgcacagttccctgcctcccaccactacctccggccttctcagccctgtccacggctcctgcggtgggctcggccttcgatgtcagggacctccccgccatttcctctcagctcgccagcgagggtgcctcgggagggagcctccagtggtgattggagcaaccgccgctgggggcaggactccaggcagcgcgcctgcgcaatgcactcctgcgcgcgcctggagatgtgaggtaattctccggcaggcctgcgtggcactagtgcgcatgcgtaaaggcgcgagggctacaaacgcggcgggaagcccgccagggccacgtgcggccgtccaggcttgcgattggcccgctgccgggtgcccccgcgcatgtgcgctggcttccgaggggaccggccctggttctggaggccctccccaccaacgagcagtacgcatgtgtagcgccgaagcttcctgtgaagtgtgcgtgtctgacggatgacgactccacaaggcgctgtggccctggcagcctcatgaggttgcggctctgcgggaccacaccgccgcgggagtgcacgggccccagcgagtgaaatctgcggcagcccccgctgggcccgctgttcctgcgcgcgcagaggagcgtagcctgcccctaggccgcgttcccgtgagctccatgcccacagtggccgaggccggccacaagcccacggtcccttctgcacggtccctgccgcgctggggccaccgtggaggcccggagggccctgggaggagggaggaggagcagaggctttcgggagaacccagcccttcaccggccaggggaggccgcgatgcatcgcgactggttgtgaagagccaggggaagaactttaccgtgcaggtgagtgggagacatcagaacacctgcctgtcctaaatacgaagcctcgaatcctaacctataaaaggttaccttagggtttagggttagggctacagattagagctagggattaaggttagagttggggttggggttagggtttaggggttagaagttagttttggggttaggagtggggttagaattagggtttggggttagtgttaggggtaggggaaggattggggtagggttagggttgggctagggtcggggtaggggtagggttttacggttagggtcagggttttagtgttggggttagggtattggggttagggtttgggggctaggggattagggtcaggggtgggggttagggtttgggatttggctaaggtttgtaagggttagggttttagggtaggggataggggttagggttacgtgttggggttgggattagggttaggggttacagtttagggtaaggggttagagttaagggttagggttagcattaggagttacagttgggttaagggttaggggttaggcttagtgttgttagggttagggttagggttagcattaggagttacagttgggttaagggttgcaggttaggcttagtgttgttagggttagcttcagggttcggtgtcagggtttggggtggggtagtggtaggtttaggggtagcgttgtgtgttaggatttgtggttacggttcgggctagggttttaggggtaggcataggttcgagtttgggtttgggtgttaggtttatggctagcattagggtaggggttaggtgtaggagtaggggttgaggttatgagttgaggttagggttaggggtcaggggtccggtcaagggttggtgttggatttagggattagggctagaattaggggttagggttaggggtttgtgtcggggttgggttggaggcttgggttcagggtcaagtttagggttggggctagggcttagggttatgggttagtgttagcagttagggttaaggtttaggcttagggtttagtgcttgaggtgggggttaggtgttaggggttagggttaagggttagtgttttgcgttagtggttagggttaagggttatggttaagggtcagcgttagggtcaggggttaggggtaggggttgtgcttagttttagggttagggttcctggacggatggttttcctgcttgggaatgttcctgggctgtgagatccactcttctgggcaggtggttagcacctaacgttttccccttacttccccccaaattcttaagtcctttggtccatttcattacttcttttggggagggcctgat

SEQ ID NO: 914117 - DNA, 4001 bp, Homo sapiens
aagggttagtgttttgcgttagtggttagggttaagggttatggttaagggtcagcgttagggtcaggggttaggggtaggggttgtgcttagttttagggttagggttcctggacggatggttttcctgcttgggaatgttcctgggctgtgagatccactcttctgggcaggtggttagcacctaacgttttccccttacttccccccaaattcttaagtcctttggtccatttcattacttcttttggggagggcctgattcctcagggcctcagtggcagaaccagcctgaggtcacctccctgtccatgggttaccacggcccctgggcaggcatggggagctggggtggcttgggttcctggccttggcacctccctttgggcggctctggagtgtggctgggctgttggtacaggagccacaggccactgcctttttggctgaggggaccctaacatcctggagcaggtggggcagggcccatggtctcctctaggtgggaggtgggaggctgaggcggcgtgggcaggcaggtggatggcgaggcagcatgggcaggacggtggatggcgggtccacaggggcagccagcagctcctgcacccactggggctccaagactgtgggcaagggaggaagggggagcccaggccggaggatcctgggggacggtgcggcccgggggccagatgtggtcaccgagcccagccaggcctagggccgcagcagccccagggcactgagggcgccacccagcccgacacagaggcacaggccgcccgtgggtccagcgcccgaagtccacgtacagtagctgtagatgccgagccggtcctgttgcctccgggaacccagtcctcctcgtcctccaggccgcgttccccgggtcccgcggcccttctccagcctgagcccgccgccccggccgcagccacgcgcagggaggagcccggggcaccatagcacagcgccggcctcacacacaccctcgaggcccctctcgagcccccgcggagccctccgcggccgcacgcagaggaaggctgcctcctgtagcagagcccagccattcgcgggtgcccagttcatcttcatggggctaaacctgcgggaagagagggaaagggcccttagtttccatggagatcgggtgcccagaggcggagggctcaaggctggagagcagagggacccccatcttttgtgggatcagggtgcccccagcatcttggaggcccactgaggcctgggggggcgcggtttaacctctagcatcagggacttaggcctgggggaggcgctgggaagtggcaggtggggcaggaggggcaggagggttctgcacctgaaggttgtgcacctggattgggggtgtagaagcggggcaggagcgttcaggcctctgggggcgtccaggcccgggcgggggagcaagcctgggggagggagctctgcacgcgttgctgggatgtggggggcggggggaggcggcatggggggaggggcgttgtgtttggaggacgcggtagccgggaccaagagctggctcagatcagggtctggaacggggacgggccgtgcctgggcctggtccccacctttggggccaaagcctgggtgcgggccttgcggatgctgcggaggacaagcggctgctgacaccgtgcggactccgccccagcagacccgtgccccagggacagtccctcccgcgcgcgcccagcgctcaatgccgtccccggccgcctagttcagcagctggctgggggcgggacggggtcgagttgcggggccgcgtccagacacggctgtgcgggcgacagctgcatcccctccccgcgccgcccctcgctcccggccccgtacccgccccagcctcccggccttacccgccacgggcctcggttggaaccgcgcgctggagtatccgtccctgaggccgcggccgagcgggaaggagcgggcgggcggcggcgcggaccctcagccggagcgcggagccgcggcgcctgggttttgcgcgaggcctccgccctgggattggggcgggcagtcgcggaggcgcatccctggtgagccggtgggaggggaaaaggatgtcgcgtcccccatccttgcggcctcccgtcctccgtcaccagccccctccgtctcctgcatcacaaggccccgtccccgcggtcccccgcgacccccgcacccggctccgctccacccgccgtgcttcctgcccctccacaccctcgtccccacccgggcccatccccctgtgagccctggtgccctgggatgagggccgaggtcctgagcggagagggtgcttgtaccagccccatggtggctcgagcccaccccgcggcccctcccgtggcaggtgcggtttctccaccggttgtcagctgcggggccgggcggagacctcctcaacctccggccttgtttcagggaggatggggtcgacccttgcgatccccagaggccccccatggctccttctgggctggctgtcttcctcctgtgggttctgatgccacctgggccgacggcgtcttctcagcccagggcggccgcgcctccggtgagtttcagctgagggcgcgcggccagctccgagcctggctccgggtgcagcaccggcctgggacctctgctgtcccgtgtaggggtgccctgcaaatatgtgatgaataagtgaagaaatacgttttatcttctaacttgccggatgttagaaggaaaccaagcttatgcttctcatttatagctaccgttaaggattggacagaagcttagctttttgggtgagacggacaacagtgtttttagaacctttggcaaggaagagctggaaagaacatgtatttgaaagtgactgacaggtcttctggccctagggggccacctgagcaggtgcacccagcttccctccaagacagaaaataaattaacaaggagagcaggaagggccccggcagactccagacgggagggggtgctgcccatcaggcagaaggagcttggaagggaggggccgtggccatgggacgtggaggtgggagcgggggtcatcataggtctgcacactcgggttgagtcccccttccccatcacacacaggacagccagcagtgagctgcttaccccaaggagtcaagggggttcttgggcaacccctggtgctggagccggcagtggacagcaccgcagccagaccttgcttatttttggctcatgaggaacatctgtgaccgttccctcccctggccctgggaggggatgtgtgacctccactcaagacagccatgcggctcctccggctgcgggcggggagggcatgtttcccagcacaggcccaggactgccagctgagaggctgggaggggcccctcacccctagactttgcatgtgaagccaagcgtggagcctcacagggaatctgagatgggagccagtgagatgggggcaggacccagaggggagaagaggtcctggggatgctgtggatctggatccagcgtgcgggagctgaggttccggagtgaaacactgcctttcatggaagcacgtcttcctgtcacccatcggcttcattttaaaggatgaaaatgtatcagacattcaaggagagctgcatcacataaaagaaagaccaggcaaagaaacggaaaataaatggattgagaaatgtgaatgactccaatcattccaatcattggaatgaatggattggataaaactccaatccatagactcagattagggagatatatttatataataagaacaggaaactgtgaagatgaaataagacaaaaaagacacttttgagattaaaaaattactgcaaaaaaaaaaaaaaaaaacaacagaaggatggaattgtatatttaaggaaatgtttctggcaaaaaggcagcaaatatgaaagaaaaggggatagacccaggggatccattttgggctctaacatctaacagttgttccaaggccgaga

SEQ ID NO: 914118 - DNA, 4001 bp, Homo sapiens
gagaagaggagagaggtccataccgctgcacagtgaggacaagctgatttcctgaggcatcgatgaggctcatggcactggcatgggagaggttggtgcaagagaccccattgattgccaagagctggtccctctctcggagtcctgctctgccagcctggctccgtcttcgaatctgagatgttgaaggagacactgtaggtaagagggggctccaaagggaatagaatgaaaggaaaagatgggaaggacccacaggaggggattttactttgcagggtaagaagggtggggagatgcatggaagtggctgcagttgaagtggcctgtctagagggaagaaagtatacagactggagaaagaaatacatcatatggtgggaaatagggtaaccattgaatgaaagaggcttgggaagaactgcatggggtaggtaactagaaatggtggttattggctgggtgcagtggctcacgcctgtaagcccagtgctttgggaggcctaggtgggtggatcacttgagatcaggagtttgagaccagcctggccaatgggtgaaacgctgtctctactaaaagtacaaaaatcagctggccgtggtggtgtgcgcctgtaatcccagatacttgggaggctgaggcaggagaattgcttgaacccaggaagcagaggttgcagtgagccatcatgtcactgcactccagcctgggcaacagagtaagactctgtcgcaaaaaaaaagaaaagaaaaaaaacggaaagaaatggtgattatctccacaagctttttctccaagggcaatatctatattggctggtaattctctactaggccttgtaaccccaggcgccattacacagtcaagattttagaacagtactccaggttggagggagtccagcggtattctgggagattgtgattatttgggtatatgtgtgccatgtatacacacaaatgtatatatgccaaagtaataatagtagtagtggctaccatttattgagttcttactaagtgttgggcactgtgctacatgtattattgcatttaatccttagaatggttccatgaagtaggtacaggtactattattacccacattttacagttcggaaaactaagcctgtagggtgaaaccaaaaggataatgacttcatctgtgaggccagatcttgccataaccctcctagcacctaaaaaagtcttgcctagtgagagaaaggatctgacctagggaaagagcactgaaggcatgggcagggcagggtgaggcagggtagggctgggctgggctaggctgttcgaggcagtttcagttcatcacatatcagtttagtcagagagaaattagaaccttccccgtatttctggagtttggagtagaggcacatacccaagagaacaaacactggatgaccagagctgggcctctgataccacagtgctgcagggaactgaagcagagcctttccttttcctctgctccctggaaaccgcgaattctcttttctaatagacccccacaggaagcctgtggtcagacgctactcccactatgagacttgagcatacttccctgcccaccacccaccccatcttcacagcctcccacccccccaacccccgccatatgccaccacacatctcttcccaggatcccttgggttccctttccctgaagcctcatttcaggggctctcccttaccttagacacctgtaacggtttcctctgctcggcccccccatgaagtcggaagccccagggggctccccctgatagtgtgaccagcacctcctcctcagcacccatcgctcagcttggcctatggcccccggagtttgaacagtgtccccaggagagaagttgaggtgctcgaaccccgtctgggcttcctgtccggctgtcctgctcctgctgccccaggcctcccccccacaccacacaccacaggcaggcaacttggccctgggatcattacagtccagcacacatgtcccgtcaatcgcagatgtgctcaaaatagatgccgcttgtactcccctccctcccccttctgtgttactcctagagctaattatagtacaaacttctgccctccatgttcccaattctcctgcatgggccttttattcaggactcagaatacaaactctctgggctctataaccaatgtacaccctttcaggaactgtgccttctctaataggaccatgggctaatctcaactgctttcctccaaagaccctttcaaagtggcagcagcaggggcttcaattccatagctggcaaagaatggctgggcttgctccaagatcccaggaaagaatgcactctcgctatataaatttatctgttaattaataaatggtgggccaggcatggtggctcacgcctgtaatcctagcactttgggaggccaaggtgggtggattgcttgagtccaggaatttgagaccagcctgggcaacatcgtgagatggccccccatctctattttcttattattaaaaaaagttaaaaaaaaaaaccaaaaaactataggctgggcacggtggctcacacctgtaaacccagcactttgggaccaaggtgggcggatcacgaggtcaggagattgagaccatcctggctaacacgaggaaaccccgtctctactacaaatacaaaaaattagctgggcttggtggcagacgcctgtagtcccagctactctggaggctgaggcaggagaatggcgtgaacccgcgaggcagagcttgtggtgagccgaggtcgtgccactgcactccagcctgggtgacagagcgagactccgtctcaaaaaaaaaaaaaaaacaaacaaacaaacaaaaaactataaaaaaacaaattacctattgcaatacatacgtggtcatggaaaggtgtgtaggtgtgcataaacataccaacccatgttaatacaatctctacttgtctctaggtttccattacgagaatgtctctgttacaaggcataacattatggtgctataactgtgattatcaaaggctacagagtttcataaaatagctgcccacctagtgtatgctaaataccgtttgccttggcatatgcctctatgtcctagaaacacttgggctgggtgcagtggctcatgcctataatcccagcactttgagaggctgaggcaggtggattgcttgagcccaggagttcaagaccagcctggataacatggtgagaccctgtttctacaaaaaaatacaaaaaaatttagccaggcctgcctggtcacatgctcctatagtcccagctacttgggatattgacgtgggagggttgcttgagccctggaggtcgaagctgcagtgagtcgtgatcctgccactgcactgtagcctgggtgacatagtgagaccctgtctccaaaaaaaaaaaagaaaaaggggagaaaacattggaggcaacagagggagacctgatctccaagaagaaaatagttgggattttggggtcagaagaattgaacttgggttcttttttttgagatggagtctcgccctgtcgcccaggctggagtgcaatggagatcttggctcactgccacctctgcttcccaggttcaaacaattctcctgcctcagccccctgagtagctggggctacaggcatgtgccaccacacttagttagctttttgtatttttagtagagacggggtttcgccatgttggccaggctggtctcaaactcctgacctcgtgatccgcccatctcagcttcccaaagtgctgggattacaggtgaaagccactgcacccggccacccccttttttttttttagaccgagtttcgctcttgttgcccaggctggagtgcaatggcatggtctcagcttactgctacctccacctcccaggttcaagcgattctcccgtctcagcctcccaagtagctgacactacaggcacccgccaccatgcccggctaatttttgtatttttagtaga

SEQ ID NO: 914119 - DNA, 4001 bp, Homo sapiens
gggtgaaaggtgaaaccaaggacagttaaagataaggcagagtccagttggctgccctgacactgctctgaccacagctcttccatcccattttactgctattctgctcctatcttccaagagatgtgctcttatccaccccacacacattcctcacctgcctcccattcctgactggcaatgggagggggaggagaaggatgtgtcactctccgtggcagacagggagataagcaggtcccagggagaggaaagatgagaaggaacactttccacccatcatagggaccatgttaggaggcttctcatgaagcttaggactcatcctctccactaccccttacccctatgatatgagcacaaagaacccttagcaatgaggatcttcattcacaattccaccctcctcatgcaatccacatcatacacattcacagaaataactcccaccacacagcacttcaacaagaatatccatctagtgaaagccaactgtaggcgtactttctcctatttacttttctctctcattcacatataccccagcttacatacagctccattcacatacacttatgtaaatacacatgtgtgcacatcaaaacaccatcactcaaatacattcacacacctacatgctctaggtggcccttcttcccagagacctccctgcagagaccctgttactaacagtttagacagaagttaaagttgatctcggccttccaactgccagggcagtcctctgggcttcacacccctgctactcacagtcaggggtagtctccatccaagatgcaggaaaagttagagtgttgttctccaaggcaacactccaaatctttaggatacctcaaggtcgccagctaaatatattatttaccccaagctggggatggtagtggggtgggcttcttcaggggtcagaactgtctctacgtagagagctcaggcagccactgccagccaggcacacaaagactatgtgctaaagggaaccagggcagggctttccatgccatgtggggcctgggtaggtggggccaggaaatgggagggctaccctgctgcgaggaccccgccttgcacatggatactctctggtccatggtccccagttcctcctgaaaaattattgagattccatctactttccactcaaggtaccatgctcctttgtaatgagctcctttgtaatgagctttgtaatgagctcctttgtaatgagcgtggtatcttgagtggaaagtagatggaactttttcatttttgtcattcctctcatcccagtgtttataccacagaatagtggtatggatgagacaacaggccctagagtcagagttcagttcaggtttttggtttctgggatagttacctcacctcattaaagttcggtttcctcatctgtaaatgagggtagacaatggctacctcataggattgctataaggattaactgagataatatagtaaatttagcacttaacacagtgtgaaggcccactataaccattactattgaagtcttcttgacactatactttcttgatatatatggatactttcttgttcacacatatcttctcccatgactcacacatacatgccttcatgtattcataatgtactcacacacgctctgttcccatgagttttctacagctcttgtggtcagaaacccctttgacatgtgaccacagcatcactgagaaaggggcagtgaaactctcctgagaaaaggaggaagaggacagcaaaaaggaacaagagagtaagacctttcccaaagactacccttcctaaactattgacatcttcccctccattctagaccccagactctcatagatatgggagggtagtacctgcatagaacgagtcttggagctcaggaactgggtctggggctttgtcatagctggcttggctgaggggctcttggctgatgggctcaaaggtctccatgctgagaaaggcggtgttggctggagcaggaccagcttgagccaccccccacgccttttaaagcccctttgtcttgtccccagagctggcagctgaatgagctcactgtgctatttttggagcctggccctctcccttctctgggctgccccacaagtgccggtgtgatggatgtgggcacctgccttcccttcccccaaccccaccccagtagacaatgaggtctgcttgactaaaaatatctctgagccagtagctacagtctcatccagcattatgggaagggagggggagataagtggagaattgaggaaagcataggatcctaggcacgcatctggaattcctgggatattggacactcagggatgtcagactctcaactctcatgtccttagcctccactccaaactgagagacacaaagttctatagatcaggaatcaaaatggtggaggagagggaagaaatataactagagggggaatcatgagattttggaggtaacaagaacggtctctgtgggaaagcacgggaggcatagagcagggagaacgtttacccttagaccttgttctgtagctcacatcaaaaatagcaaagcctgagataagtggaatgggctttttctgcccaggccaacattcttgcctgagataaggagccaaagctccctccctctgccacttcctcgggatctcatgatcatcccatagcctctcagtccccaggaatccgaactgaacttgcaaatgtcaaaggtgcctgctattaatactataaagaatcctttggccaatggctcacgcctgcaatcccagcactttgggaggccgaggcgggtggatcacaaggtcaggagttcgagaccagcctggccaacatagtgaaacgccgtctctactaaaaatacaaaaaattagccaggtgtagtggcgggcacctgtaatcccagctactcgggaggctgaggcaggagaattgcttgaacccaggaggtggagggtgcagtgaaccaagattgcactccagcccgggtgacagtgcaagactctatctcaaaaaaaaaaaaaaaaaaaaaaaaccagaaaaaaaaaagaacccctgtagctttgacccacttttatttattaatttttattatttatttatttatttatttttaagacagggtcttggtctgttgctcacgctggagtgcagtggcgcaaacatggctcactgcagcccaaacctctcaggctcaagcaatcctcttgcctcagcctcccaagtagctgggaccatagacatgtgccacagtgtttggctaattttaaaatttttactggagacgaagtctcacgatgttgtccaggctggtctcaaactcctggcttctgccgggcatggtggctcacgcctgtaatcccagcactttgggaggccgaggtaggcatatcacctgaggtcaggagttcgagaccagcctgaccagtatggtgaaaccccatctctactaaaaatacaaaaaattagccaggtgtggtggcgggtgcctataatcccagctactcgggaggcagaggctggagaatcgcttgaacccgggaggcggaggttgcaatgagccaagatcacgccattgcattccagcctaggcacaagagccaaactccatctcaaaaaaacaaaaaacaaaacaaaacaaaaatcctgcgttcatgctatcctcccacctcagcctcccaaagtgcttggattacaggtatgagccaccttgccccgccttcaacctgcttttaaatactcccctgtcctgtgtctgtactctgctttcacccaatcatgacacacaataacaattatcaccaccaccaaacccttcatctatttgtgtccctttccaatttccctacttaccctgttcctgggttgaactgaatcaccttacccttttgccacattggttcaaacagcaaaaataatggtggccatgagaataattatgctccccttctactcattacccctcctgtccccaagactgtatcc

SEQ ID NO: 914120 - DNA, 4001 bp, Homo sapiens
tgaggcagcagctctgatgccgggcaggggtcccatggggcatcggcccactctccactgtgcaggggcacccaatctcggccttgaagggttgggggcaccacgaatggcacagctggtggcctgtccagagtcagggagacaacatgtaggtggcaagtcaatggtgtggtctcagagcgctcagccaggacggttgagcaccaggggctggaggaagaaaagccatcgggagccaggaggaggccagggcaccattttctgggcccataccaggcaacacacacacacacacacgcacacacacacacacacacacacacacacacacacacagcagtgggatttgaagaaggaacacagcacctgacagtgtcagccagtctgggtttggattcctgttctgccacttactaattgtgttctctggacctgttgcttatgtgcactgagcctcagattcctcacctggaacatgggtttcataacacctgcctaatagctgatgtgaggtttctggggtttctttgtgatagctcccagcaccgaagcagcatagaagaggcacccccataaacagaactttccttttcgaccccaccctgagggaaattccaggggcgcacttggccccacatcctgcctcacctgctcagttgggtcctagcatgcggctggcagggcctgtcccgctgcccactggaggcagctgtggtggccatggctggtgtcccaggcagctcctcataggtgagggtggcacagaaccttctccacagacagcagcttgccccgatcaacagcagcagcagcagccccccgatggtgcccccaatcaccagggccagctgctctgggggcagagaccaccagtactatgatgcctgcctgggaaagccactctccctcacagccctggcctgctggggcagaactagggcagcaaccctgcctctgggtttgatctcaggagtgataggagcaggcctgctggggatgggttccgggagggatgctgctggctaggttccgccagctctcagaggagaagccgtttaccccagggtctgagagccctgggcagaaccttctagttttccttggaaaacagctggccctgcccttgggattctggcttaaagaagccatttccttgcgcttctgagtagaaatcaaacctgccctcaccagaacctccatatcccctgggctcctgttgaggccaggaggggagctggggtgtggacgcagtcagttaaggaaagccctgaaaggtaccttccccctggtctgcaatcaaacctctaccctctggggccctggaacctgctgcaaggctggactcttctctaacacccgctccctcccctagccctctatcaaggtgagcacgcgcttaggggagttggtgcgacgcggtggacgaggtggggaggaaaagggggcaagaccccgttgctgctggccctcacacgtccgcatttgcgggacctaggaggcttcgccccgggggtgctcagacgctgggttccaaccgctggccacctggggcgggccaaaaaggtgcctcccttagggtgacgtgcggccgcggggcattcaggtctcagggatctgcactgggtggggtggtgagaaggccggaccccccacacctcctaagccgcaactgaccgcgaagagcgggcctcagcgtctactccatcccagtgcccctccaagagcgcgccgaggccgggcagggcaggcgctgcaccccagcgggggcggcggggcggaggcaagtgctggaagggtcgcagaggggccggggctgggctggggaggcgaggctcgcttacccgccatggggctgctcccgcaggctggtctcgccggtctgggcggctggggctgggctgccaggccgtctcttaaagcgccgcggggcgccgtcgggcgagcacaggggcggtccgtggtgctgctggtgcccagctgcggcgcggggagccgcgcagtgcacggcaggggcagggacccagcgccccgaggccgcagtcccgccccagcccgtccctggcccaggcccaggcccggcggtggaggggcgcagagccgaccgtgagctcccggaaaccgcagggctccagccagggcgggtcccgggcgccaggggcgccaggggctccctgcggcttggggcagggtggggtgagagtaccacccccatcccggagagcagggctacagccttcaccgccgcgtctgacacagggctccgcacccgacccctcacacctggtggccaggactgagcccccgccctcccagatcctcctcaagccgaggcccctccagccgcagctccgaccccggctcgggggagccttcccggatcccggggtggagtctccgcgcgggtccccggccccagcgctgcctgcctgatggccttgggcagggatgcggcgctcgcgcacccgttcgctctcagcggacaaaccggtcgagagcgcaattctggagcgggttccagaagctcctgggttccaattcaggctcctcactcgccagccctgcgatttgggacaacttaacgttcgtaagctgggttcagtcttctcaattgggttaatgtccgtgaggggctctcgtaagggcggctggcctgccggtaacttaagaagcatgtaaagagcacttagagcggaggagcggcgcggcccagcccctgttacggtggttatcggatggaggccagcgtcgcctgggtcccctctgtacacccagcgcctattattatggtgattattagaacgcagggcccgtgcccactagtccaggctggcgaacgcgccttgcgggaaaggcgggagtaaggtcgctgcgtgtcctctctggtcacacctcggcgcgccctggtcgcgcccctatggttcccccgccgaggcctcgaggcgtctgagtggggagcgaaaggaatgtgtgtatctgtggtgcaggggagtgtgtgtgtgtggggggggggagggggtggttgtgggggagtgcgtgttttggggggatggaccttctcgttttacagccttgaaggttatgtccagagtcatagcctgggtcccacacccccgcgtcacctgtgcctgtcctagggggcagtcagtgtgcgtgaggctccaccctgcctgggctttggctcacctaaggcgaggagggtggtgaactggggtgccccactgggccgggtctgggagccctcagcgccagggtgcagaggccgcagccactccccttctagggtctgggcggtgggggcatgagaaggcggagacccaggccacttcacccagtaactgtcctcagctgtgcgcttaactggcgagatctccgctctacttggagacagtctggggtgtctggagaatcctcccccacttctgcttaccccaggtcgctgtgggagcaggtgtctcaggaaatggggcctgggtcccacccaaggcctcgggtctgagttagatgtctgtatgtttgttgttgcccctgcaacaaagtaccacagattgagtagtttaagccacatgcatgttatctcacagttcggggggtcgggaatctaaactgggttggcagggcctgtgccttctggaggcaagggagctgtttcccagcgtttccagctcctagaggctgctagctagtggccctttcctttgtcttcaaagccggcagcacagccttttctaacctctcccactccaggtcatttcacatcaactctttctgcctccctcttgtaagtgtgataccctaccttgttttaacctgaattgactgtcccttagctgagagagccagacacactccattttggctccttcacttgcagccccttacccaccccccttcctcaaggacttaacttgtgcaagctgactcccagcacatcaaagaatgcaattaatggataagatactgtggcaagctatatccgcagttcccaggaatttgcccagttg

SEQ ID NO: 914121 - DNA, 4001 bp, Homo sapiens
gccgctggaggtgtgaggcagcagctctgatgccgggcaggggtcccatggggcatcggcccactctccactgtgcaggggcacccaatctcggccttgaagggttgggggcaccacgaatggcacagctggtggcctgtccagagtcagggagacaacatgtaggtggcaagtgaatggtgtggtctcagagcgctcagccaggacggttgagcaccaggggctggaggaagaaaagccatcgggagccaggaggaggccagggcaccattttctgggcccataccaggcaacacacacacacacacgcacacacacacacacacacacacacagcagtgggatttggagaaggaacacagcacctgacagtgtcagccagtctgggtttggattcctgttctgccacttactaattgtgttctctggacctgttgcttatgtgcactgagcctcagattcctcacctggaacatgggtttcataacacctgcctaatagctgatgtgaggtttctggggtttctttgtgatagctcccagcaccgaagcagcatagaagaggcacccccataaacagaactttccttttcgaccccaccctgagggaaattccaggggcgcacttggccccacatcctgcctcacctgctcagttgggtcctagcatgcggctggcagggcctgtcccgctgcccactggaggcagctgtggtggccatggctggtgtcccaggcagctcctcataggtgagggtggcacagaaccttctccacagacagcagcttgccccgatcaacagcagcagcagcagccccccgatggtgcccccaatcaccagggccagctgctctgggggcagagaccaccagtactatgatgcctgcctgggaaggccactctccctcacagccctggcctgctggggcagaactagggcagcaaccctgcctctgggtttgatctcaggagtgataggagcaggcctgctggggatgggttccgggagggatgctgctggctaggttccgccagctctcagaggagaagccgtttaccccagggtctgagagccctgggcagaaccttctagttttccttggaaaacagctggccctgcccttgggattctggcttaaagaagccatttccttgcgcttctgagtagaaatcaaacctgccctcaccagaacctccatatcccctgggctcctgttgaggccaggaggggagctggggtgtggacgcagtcagttaaggaaagccctgaaaggtaccttccccctggtctgcaatcaaacctctaccctctggggccctggaacctgctgcaaggctggactcttctctaacacccgctccctcccctagccctctatcaaggtgagcacgcgcttaggggagttggtgcgacgcggtggacgaggtggggaggaagagggggcaaggccccattgctgctggccctcacacgtccgcatttgcgggacctaggaggcttcgccccgggggtgctcagacgctgggttccaaccgctggccacctggggcgggccaaaaaggtgcctcccttagggtgacgtgcggccgcggggcattcaggtctcagggatctgcactgggtggggtggtgagaaggccggaccccccacacctcctaagccgcaactgaccgcgaagagcgggcctcagcgtctactccatcccagtgcccctccaagagcgcgccgaggccgggcagggcaggcgctgcaccccagcgggggcggcggggcggaggcaagtgctggaagggtcgcagaggggccggggctgggctggggaggcgaggctcgcttacccgccatggggctgctcccgcaggctggtctcgccggtctgggcggctggggctgggctgccaggccgtctcttaaagcgccgcggggcgccgtcgggcgagcacaggggcggtccgtggtgctgctggtgcccagctgcggcgcggggagccgcgcagtgcacggcaggggcagggacccagcgccccgaggccgcagtcccgccccagccagtccctggcccaggcccaggcccggcggtggaggggcgcagagccgaccgtgagctcccggaaaccgcagggctccagccagggcgggtcccgggcgccaggggcgccaggggctccctgcggcttggggcagggtgcggtgagagtaccacccccatcccggagagcagggctacagccttcaccgccgcgtctgacacagggctccgcacccgacccctcacacctggtggccaggactgagcccccgccctcccagatcctcctcaagccgaggcccctccagccgcagctccgaccccggctcgggggagccttcccggatcccggggtggagtctccgcgcgggtcccgggccccagcgctgcctgcctgatggccttgggcagggatgcggcgctcgcgcacccgttcgctctcagcggacaaaccggtcgagagcgcaattctggagcgggttccagaagctcctgggttccaattcaggctcctcactcgccagccctgcgatttgggacaacttaacgttcgtatgctgggttcagtcttctcaattgggttaatgtccgtgaggggctctcgtaagggcggctggcctgccggtaacttaagaagcatgtaaagaacacttagagcggaggagcggcgcggcccagcccctgttacggtggttatcggatggaggccagcgtcgcctgggtcccctctgtacacccagcgcctattattatggtgattattagaacgcagggcccgtgcccactagtccaggctggcgaacgcgccttgcgggaaaggcgggagtaaggtcgctgcgtgtcctctctggtcacccctcggcgcgccctggtcgcgcccctatggttcccccgccgaggcctcgaggcgtctgagtggggagcgaaaggaatgtgtgtatctgtggtgcaggggagtgtgtgtgtgggggggggagggggtggttgtgggggagtgcgtgttttggggggatggaccttctcgttttacagccttgaaggttatgtccagagtcatagcctgggtcccacacccccgcgtcacctgtgcctgtcctaggggccagtcagtgtgcgtgaggctccaccctgcctgggctttggctcacctaaggcgaggagggtggtgaactggggtgccccactgggccgggtctgggagccctcagggccagggtgcagaggccgcagccactccccttctagggtctgggcggtgggggcatgagaaggcggagacccaggccacttcacccagtaactgtcctcagctgtgcgcttaactggcgagatctccgctctacttggagacagtctggggtgtctggagaatcctcccccacttctgcttaccccaggtcgctgtgggagcaggtgtctcaggaaatggggcctgggtcccacccaaggcctcgggtctgagttagatgtctgtatgtttgttgttgcccctgcaacaaagtaccacagattgagtagtttaagccacacgcatgttatctcacagttcggggggtcgggaatctaaactgggttggcagggcctgtgccttctggaggcaagggagctgtttcccagcgtttccagctcctagaggctgctagctagtggccctttcctttgtcttcaaagccggcagcacagccttttctaacctctcccactccaggtcatttcacatcaactctttctgcctccctcttgtaagtgtgataccctaccttgttttaacctgaattgactgtcccttagctgagagagccagacacactccattttggctccttcacttgcagccccttacccaccccccttcctcaaggacttaacttgtgcaagctgactcccagcacatcaaagaatgcaattaatggataagatactgtggcaagctatatccgcagttcccaggaatttgcccagttgatag

SEQ ID NO: 914122 - DNA, 4001 bp, Homo sapiens
agaagacagaacacacaaatgcaactcctttcctttaagagacttcattaaaatgataacaaaggcatttttaaaaacaagtaggtccagatgaggcgtagtggctcatacctgtaattccagtactttgggaggctgagacaggtggatcacttgaggtcaggagtttgaaaccagcctggccaatatggcaaaatcatctctactaaaaatacaaaaattagctgggcgtggtggcaggtgcctgtaatcccagctactcagggggctgaggcaggagaatcgagtgaacctgggaggcagaggttgcagtgagccgagaaggcaacactacactccagcctgggtaacacagcgagtccctgtctcaaaaacaaacaaacaaacaacaacaacaaaaaaacaggtatgtccagacaataatgtaataatgtggcaaactggagaaggcacattagctgatgagagctttctccatggttgtgggtaatggaaagcagtgacggcctggtagttgaggaattagggcagaggggcattagactagagtagaaggggctccagccaaacaagactctgcagaccctggagagggtctgaaacaccaggaacaatggtgggaacgtacttgggcagaaaattaaaaataagtgtcaatggaatctaccctttgccctgcctggccccgtgccataagacaaaaacaaaattgaaaacgaaagcaaaacctttcctatatcctgatatttaaaattctggcagtgtttggtggctcatacctataatcccagcactttgggaggctgaggcaggaggatcacttgagcctaggggtttgagaccagcctggccaacacggcgagacccccatctctataaaaaataaaaaatattagctgaatttagtggcatgcacctgtagttccaactacttgagaggattgctcctggtgggaggattgcgttagcccgggaggtcgaggctgcaatgaaccatcattatgccactgcactccagcctgggcagtagagcaagaccctgtctaaaaaaaaaaatccacagaaggttgaaggtaaatttaataaaatatctcaaaaaacagaattaaagaaatatttaaaatatgaaaaaatattaaaggtctggagaatcaaactgtgaggtccctatctaagtgacgggagatgcagacatgacacagaaaagtagaaggaagaaagtgtcgaggtggtaacataaaaatatttcccatgctgcacatgctggcatgtgcttgtggtaccagctgcttgggaagctgaggcaggagaatcacttgagcccagtagttctgggctacagtgagccatgatcatgccaccgcactctggcttggatgacagagtaagaacctatctctaaaaacataaaaaaaaaaaataaaattaatttaaaaaataaaaataaatcataattttttccaaagttgaaagacgcaaaagggctctcactaggtgcctagcacagtagatgaaaatacctcatacagttctgtgagttggctgggctcagccaggcagttctcaccttgagtgatggtgctccccagccactgaacctaagaagatagggttttcctaccctgtattttcaagtaatgggaatcagagccaacttcattttccagccctctcctccttacttaccgcactccagctgttaccagtagggaatctgatgtgtctgcagcagcaactctattcttccctcctcagaggaaaaaattcgcccaaggggcataaggtagagtaagaaaccaagataacttttagagcaggagtgaaagtttttaaaaaagttttagagaggaatgaaaggaagtaaagtatacttggaagaggaccaagcgggtgacttgagaaatcccagtgcactgtacaacccttaatgtggggttttatatgttggcacggttctgggatttgcgtttcttctctcctgatccttcccttggagcaggctgtccacttatgcagtggtctgccagcacttgggagtggccgcactcacagtgtgtttactgaagttgtgcgcgtgctcatttgaggcatttttcccttgccagtcgagaattcctagaggaaggtcatatattagttaaactctgacattttgccccttagggcccatgcttgagcccacttgcccaactcctgagatcttatcaggaagcggctgacactagcttcaggtgttttctatctattgggagccggcctttccctggtgctggctgcaaccaatgatgattttagagaaacagtgtaacaaccacctgaccatcacatgatggtcgcctgacattcctggttgggggtgggggtggaatgccctctgctgcccttctcatgttcccctagctacctactctaacacaggtatgtatgcctttctgaactttcttgaatgtgtcagacttattttaaccccaaagacttttttttgctattgcctttgactacaatatgacttccctgtatttttgcatgacacattactcctcacaattcaagtcacatctcaaatgtcacctcctcaggaaagatgttgtgctgctcatcacacctaaaatagcaactttcaggtcgggcacagtgactcatgcctgtgatcccagcactttgggaggccgaggtgggtggattacttgaggttaggagttcaagaccagcctggcgaacatggtaaaaccccctctctactaaaaagacaaaaattagccgggcgtggtggcaggtgcctgctatcccagctatttaggaggctaaggcaggagaactgcctgaacccagaggtggaggttgcagtgagccaagatcgcaccactgcactccagcctgggtgacagagtgagactctatctggagggaaagaaaaaatgcaacttctattctccacctatccctttagcctatttaaattcttcatagcacttacaatgaccaaatcctttttttttcttttctttattatctgtctcctccatgagagtagggactttgtcttattcatcattatacagatggttctggagccacccaacaagttcttcttccccactgcacagacaaaaatcaattcactgagaccatggcattgcaatagagaaagagtttaactgccgcgaggctgagcccacgtgggagaactggagttatccctcagatcagtctccctgtaggctcggaacaagggtttttatggacaatttggttgtcagggggtagggggatagtgccgctgattggttggggatgaaatcataccggtgtggaaagcagtcctcatgcactgagtctgcctctgggtggggccccaggacctgttgagtcatgagtcatgagtctgagtgaggtcagtctgaaaaacatcttaaaaaactcaatcttggctgggcgcggtggctcacgcctgtaatcccagcactttgggaggcccaggtgggtggatcacaagatcaggagttcgagaccagcctggccaagatggtgaaaccccgtctctactaaaaatacaaaaacaaacaaacaaacaaacaccccaatcttaagttctacaatagtgatgttacttacaggagcaattgggaaagtcacagatcttgtgaactctggccacatgacccctgggcattaagggactatagaaactatgcctacattttagcagagttctgccttctcccattatcctattcctgtggcctttcattagtcttacaaaggcgattttggtccctgagaaaggagggggttagttttagggagggactattataatctttactttcaaattaaactataaattgaattcctcccaaagttagcttggcctatgcccaggaataaccaaggacagcttggaggtcagaagcaagatgaagtcaaccatgtcacatttctgttactgtcagttctgcaaaggcagtttccttccctaacataacaataatttgatgtag

SEQ ID NO: 914123 - DNA, 4001 bp, Homo sapiens
actgaggagcacattttcccaaacgtacagtcacattgtcctttctgtttcctaagctcttcactagataggtctgagccgtgagagttggccagtgcctgtcactgattaactcaattccactatagggacttgcaaaaaataggttaaagtggttcttttctgcctagactcgagttgtatttccatgcacctagcaacactacacgtgcatgagaaacaaggcaggcacagcacaaggatcataacatttaaaaagaaaatcctcaaacgcgatgtgcctccattgtaagacgatgctttctcaagctacaggggtgaagacaaatgatgggtgcacacctgctcggaagaatgactccctgctaaagagctggagcccagaaaaccacgaggctcagcctagcattacatcactacgccgagccagctcctcactgaagcccaggggtcgagggaccagtgaggaagtaccccccggggccccatccctcctacaacacacagatcaatccccaccatcttttaatctacacatccatgactcttaagaacccactttactacccctacccccaagtccccagaaaatactcttctctgaaacatagtcttctctctggaaaagtgggggcaggtgaggctgggaggtccactttggatacaagcctgagttgctgaaatgcgacccggccggcagacccattcaatacgccccatcgtccaaacatgcctgggtaggtaatggagacgaccataacagaaacgtgaattctaataaacactcggccaggataaaggccacttctgagcacgttagctctgtggttgagagaaaagatcggattcctggatcgatgcacagtcaagcactgcctccaccaatgacaggacggttcggccctttactaataatagcaagcggccttgtcctcgagtgttcaccagagtatgtggatgatgcttaggctaactagacggaacgtccaccagagcgcaccacgccatctgcccagccacaagcgcagctgcccggaaactgggctgtcgccccgggcacggagctgccacgctcatgggttcttcctaggaggaggcagtcgctgatgcctggctgttcccttgcaggaaataccactgtgccgggggtgcagaggaaagatgctgacggcaggagaagccccccagccatgcacccactgctgagcgaccaaaactgaattccagggaatcgtttctgcccacagcagtaacttggggctaccagatgctcctcccagagcagccccaggtaaagctttccaaggctgcgaagaaccccaggccagcctgggctccaggttgcacaggcattaggaaaggcgacactaacaaagcccgggcatcctctcctcctccccgggagactcggggcggcccgggcggagcacttacattgcctcggaagcctccaggttcaggtcgctggctggggctggctgcagggactgcgaccctcccatcctcgctgtgccctggcgtgcaagctagccgcgagcggggccagcgtcctggcgcgattcctgcagccgggagccggggcgagccggccggcggccggggttgctgcactgcagaggggagcagctgcgggcatccgtggcggcgggagcggcggcagggagctgcgactcgcggcccgagccgggggccggggggcgagcgccgcgtatgtgtgcgcgcgagtgtggccggcgcgcgcccgagtgtggccggcgtgcgcggctctgcccggggcgtgcgggtatgagcgtgagcgccggtgtggtccgaaaggctcttctcttaaaccccccggcagccggctcctgtgtgtgacacgatgatgtcatcatcgccgagcagccccaacgcctgcatcttcacaaagctccatcgcgggctccggaaacggggctgggggtggggaggcgaagaccctccctctgccccggcccctcccgcctcgccgggaccgcccgcattgtgtagctttgaaatgcaaacgagccgcggcccgggagctggggccctagaaaggaggggcgtggtggtcgggcgggctgaccaccgagagagtagggggctcagccctgttggctcatccctccaggaaggaggaaatggtctctcccggcccaggactaaggggatggctggaggaacaggtaaataggctgcagtgggcagcgggcagcgggagcgacgctgggagagacgtgcgcccttttccaccgccggcttctgcctccttcaggccccgggtcctggaggcagctgaagtctgtaccagggagagctgcggcacctggctctcccctcacagccagcccggggctagcctccaaggacctttgcaccgcacagtctgagggcctggggcaagctagggagcaaaaggtactgggcctgcgagcgggctggggctgcaacaccatctttggccaccaaatgagctccacaaagccaagccctgtgcaaaggctcaccctaaacaagcagaggcgcggccagctgagccgcccaaggcaggcccctaatgcagcatgcgtgtacagggcaaaggcagttctccgtgacatgcatcggctcagctctgtgattctaaacacgggctgggcctgtaggaatgtccgtgacaccccatcaccaagctcccagtgcccagtcagccccattctgtagctggcagcatgtcacccatcagcagccaaatccctgtccctggcctatggcaggctcagaaaccctcaagacttgagatcctgagcctcctcactggaggctgctgcagaaagagttcatctctgtataggtacaggaggtttggggcacacctgggaaccccaccatcccctcatgctgtacattcaacacaaccgcttcctgcgctcccagcccagactcacaactgaattcaaatggaacctctgatgggtaagtggaagactcttccacatttcccagcttgtcttcacccacagggcagtgagcctaaaatgtatctaaactgtggccaaaagcaaaagaaaataaaaacaaaattgttcaaagcattttaaaattgcctccaatacactgttttctagcgacgtggccaaggatgtttggatgggctcttttgatactgacactcgaggtcacagtagttccagagcttcacggggactgactttccactgctcttattcagtatcagtgtcaaacagaatgccagaggatcaacatcgttttctgggatgtaacagcatgaaatttcccagaaacactgagaaggtttacttttgcatttatatgaaaatagctaatgattatgtcaatcttgcggggaaggtggctgtcggggtggtgtgacgaggtgtgctctggaaagcacctcccggggaagccgtcactcactgtcagcattggatgtcacttggtggcaaggatcctgcaacctgttcatcctgtcaccattctcagcaccctgggggtttgtttctctgtcagaaaacagacctcttcggctccatatgcaggtgagggcccaaagaagcttaccacgtggagctgaaacatctgtaagctctaacctgggctactactgttttgaagaaagtggccctttccctgggcacctaggaactggccttcagccaagcctcgtactcagaaaatacatgaggaaaaaaatgaggaaccacaattagaactcatctgccaacttttaaaaacatttttcagatgaggtgcaaaagcacaaagccatctaaacgtccttagccttaataggtaaaggttctgctgcgataacaagatagggtttgaaatgagactcgagttcaaatcctgacttctccctcgttagctgtgtggcctgagccgactgtttaaccatactgaaccttatttcctcagctggcaaaagaggaaaagcatctattttgcaagggcattggaaaaagtaaattaaataccatctatgaatgcccaggaccagg

SEQ ID NO: 914124 - DNA, 4001 bp, Homo sapiens
tctggggttggagtcctaccttgatgtgtggccctggccaagaccctggacttctttgagtctctcttttcgtatctgtaaaacgaaaccttgatctttaactttccttcttgctaaaatattttaaatgttcaagcacgtttcttgaacattatttttttaagagagaaaagaggacggctggaacggagagacaaggggctaatcctgtctaggttccacagaggcggcagcatttgacctgaagatttccataaggcagttccataacaccggtatatgaataactataatacaagcaggtcatattccatgatcacacttctgaggcttgggatgtaacttttgatgagagactagtgactctgggtagctgagttgctgtggcatttgcacaaggagggtggctgctggcctatttgctgctccgatttccttcccggagaattagtcccaggcagagcctgtgagaaagagccccgtgggaatccactcacccgcctggctcaactggtcccattctcaggaggccctcccgcctggcctgagaagggaaagccagctgctccgggagggaactcactgtgcaattttcaacaaaacccttcctctaagttccatcaactgtcaaccctaaaaacactgcttaagattcaactgttaatctgcacgtgcatctcacagaccaaacactgcctcacgtcacagtcccggaaaaaaagtcatttccagatatcatggaaacggcttttaaaatgtggcctcaataaggaatcagagaagtaagaatggggagagttctctccggtaacagagccgcaccttcctctggcatagcacaggaaactgccctaggatcctcaatgtcccacgtcctgtgacacgagggccccccatcctctccagccgcccctccttaggccccgcttccatttcccctccacaatgtctatttcagctgtatttcaacccgctatcacattctcctgtcccagcatttgacagagcctgaagatagcaacaacagtaacagtgatgatgatgaagccattttaagaaaagaccaggattgaagaggacacctggccacagcgtggtgtattcggcgctcggagcctgggcagcaaatcccagcgccccgacactggatttcgaggacaccccgaggcagaggcgcactctgcggcgggagccaaggacgcggaggggacgctcgggcgggtcacgtgttgcgccggatccccgaagtgcgctcggccctgctgacgtaactattcgagaatttaaaagtcccaaactcggaggaaatccagcgcagagttttatggctagtccacgcgccgtcgtggcccgccggggatgcccccacgcgacccagtaggaccacacgagctgggaaagagcccggtgggaaggcgcggaggcccccaagggcgggaccccaaccctggcagggagcctggtcacgggcgccaaccacaaccacgcgcggggaccccaaccgcgagcgggaatcccagccactggcgcgcgccccgaaccacgggctttgacccccgcgctcccactcaagggaaccaggctcctgggcagacactctggggcccgcggtttccccgcagccacactcctctgccagcaggggaccgaatgtgcagttagccacttttccaccctcggccagtccctgccggggaaagccgaaatgagctttggccacttccagtacgcctttgtctgggggccaaggtccttcgggcgcccatcttctgaccccggccgcccgcccgtggccccggcacttacccgcccggggagataggggatggcccgcacggagccgccttcgttcggagtcgcaactgccaaagagcccgggggcgctgggttttccgagcccggtggcggcgcggcgcgtggggtcaccacggtccggtgcggccctgggacgcaaagtttcccgggacaacggcgcagggccggcgtggctccccgaaaggctcgggaaaagttgcagcacaaaaggccaatgactgggcgagcggcggctgccgggccaggctcctcccccagctctgggctctccgacccggggcagcgctcggccagctgctcgcgcagggcgcccgccgcgctctcctccccggccaggaatgcgcggggccgggcgcgcccagacgcaccgaggggcccgcggccgcagagcggcaggcgagagacgcacggaccgatggacgcacagcccggccgctgctcctggaggcgctgcagacttccaggagtctctgagtcatgacaacttgttactgttcttagtttgtccacggccttcccactacgcatggcaacgccgggaaggctgtggcgtgagaacggactgggaaggtcaagtaccggccaggcggcccgcgcttcctctgcggggccgttgcccgcctgaggctacccaggagcctcagaaagaagctgggggtgaaatggtgcctcgcttgttcctggagccaaattccggcccttttttcttcacctgtgtggtattaatggcgcttaaccacagaaacagcgcgggctgtgctggacagtttgcaaaacttgacgtgcgttctatttggctgttgcacactctgaagtcggcagaggctaaatccaaaccaattccagctgccatatttctaggagttatgtatctattggcatgtgaggtctgttttcctttaagggcctaactaactccttcactgacatggacctcacacccagaagtggtgcttacctgccaacaccatggcatatcaccttttctctagaaatttctgcagctaggccccaatcatgaagagcccgtgactatatatagacagcaggcttcccatttttagtgtcacagaaagcactgctatagattatatactcagggaccaaagggcatgagactcagaaattactcagcacttcctttcctcctcttaaagaaacagatcttacgagcccctaatgaggattctctgtagaataaagaaatagactgttactgccttctgcgaaaatattgttttttaaataacgcagtgcttctaagagtcacattttttatggaaacttaaatagattccttgttcacatgcttatcacaggtttcctcgtatcgtattaatgtgtccattttacaagtatgataactgagacccaaataggctagtttaaatgtataccatctgctgtcggtgaagagagaatggaaatgcccagtcttcaaggttcttgtgccctataatcccagcactttgggaggccgaggtggacagatcacgaggtcaggagattgagaccatcctggccaacatggtgaaaccccgtctctactaaaaatacaaaaaaaaaaatagctgggcatgatggtgtgtgcctgtaatcccagctactcgggaggctgaggcaggagaatagcttaaaccagggagtcggaggttgcagtgagccgaggttgcaccaccgcactccagcctggcgacagagcgagactccgtctcaaacaaaaacaaaaggttcttgtgccctgtgggtcatatccatttgtggtaaaaacatacaccactcaccaccatgtaagctccagcacctcaactgggcaacgagctaagatgaacttgaggtgccatcccgttcatgtgaaacagcccctcccagttgacagatgcacatccttcaagacagaggaaggtgccactctgtttcgaaatctactggtaggtctgtatggttggcaaaaggaaggccccggcaagatggccacatcttcatccctggagttgtgaatatgttaagttacatgacaaggggaatgaaggttgtagatggaattaaagttgctaatcacctgactttaaagtagggaggctatcctggagtatccaggtggacccaatgtcatcatgaaggtcctttaattggaaggaggaggaagaagagagtcagagaaagagatgtggctatggaagcac

SEQ ID NO: 914125 - DNA, 4001 bp, Homo sapiens
cctccacaatcccccagaggccttacaggaggagcgtcttgcccccgctgtcttcgggccaggccaccacgcacttggtggcaccctggtccatggtgacggtggagtagaagcactgaggggaggccagggcgagagccaccagccagatgccagcaataaccgccttggtgctgggagctgaaagccgaggctggaaggggtggacgatggccatgtacctgtgagcagagggcagcttgagcggcaggggccctcctgttagcccagctccctttcccctgtctccctctctcccaacccaggcccacgccttctagccattccccgcactgctgccatctgctgatatcatagtatcagccgacctgcagagagcccgctgggtgactctcccacagccacacagcacactgatgccttggaaccccggcccaggcacctcggcccaccatttccctctgggcatggacatgcccgtggacggccacaagaaagccacactggaagcccatctcagggcaagatcaagcatccaacattagcctgaagctcagccctgagcagcgttgggaaaataattggccctattagattgtaactgcaagcaaacttaacattttcccctcgtgtaatctatccggaataataaaaaaaaaactgtataagacatatctttggagtgaaataaagacaacaaaacaaagatcaactccaggaaagaacacttcagaaggtcgctaaaacattgcccacttcccctacagacttgaacaacctgtctagtgcatctagtgcaaagtccttctctgtgtctaaccctcagtctaccttcttcagctccacagtccccctgccttccagattcatagttttggaccatgaccagatttgggaagccattcccatggttctacccaaacttgctgtgtaatcacaggcatgtcaccacccttatctgagccccggctcagtggggaggctccccccagcttccccaaggaccctcttgcctgtcggcagcaatggcggtcatggagtagatgctgacaaacatggctgtgatggggaagaggttctggaagtagcagaaggcacggccaaagtaccagatgttgtggctggcatagacaaagttgaaggcggcattgaaggcagccatgcagaggtcagccagcgccagattgacgatgaagtagttggtgactgtgcgcatcctccgatgggccaggatgatccagatgacgatggcattacccgtcacggccaccagcaccagggccaggtaggctgtggcccacagtgccagttgccagctgggcatggagaaggctgtgatgcccgtggtgttgctctcagggccagatgagatattggcttcagtcacaatgtcacaggtccccatggctgcttctgggtctggaacaaaggacctggctcctcggctcctctcggatttgctatgaaagagaactccccttcagagcatgggaatatgggggcagggagaggagcagatgccaagcgtggtggcacatcaggagagcctggggccactcctaggtctcaggcaaagatgagctgggctgagcacaaagcccagtccagaaccattgtcatttcagattccatccttccggccagacttctcgaatatcatgtggaaacacagaattcaaatcacagtgtcagagcagaaaacacccttataaatcaaccccttcgctgaagagatggaagacagagattccaagaggggacgggaccagcccaggtcactcaggaagttggtgacaagttaggactcgaacccaggtttctcgtcacgtaattcaggaaaccttccagatcagaggaatgcacagcgggagtctctggagtccacaggtcaatggcgcagcagcctctctccaggctttgggctgcaagccgggctgggtgctgggtgctcagggctctgccagctgccagccctcgctgcagcttccctgccgttctctggggcagggccagtgggggccttggcagaggtgctgcctgctcacgagggggggctttggctcccgcccctggtcccaccccctgcttggccttgtctcttgaaagatttaggactggctgcagaggcagggagagacttgggggagatggggctggtacagagggcccagctctcggcggatgttgactttcagcccaggacaggagctacgtctgaagagtgattctgaatacagaaggagttcgagcctggtttggtgactccaggcaagtctcttaacctttctgagctctgtctaccccatctgaaaaatatagaaaaatggtgtgcatcttacagtacatttgtgaattttaaatggagataatgtgcacaaagtctacttagcacaggggttggtacataaaaactatgattggagtttctggcccgaagggaggaccccacagctctgggcgctctaggaggagaagccagaacccggagcgtttccagcgagttcccaggtgatactgatgctgctggagccagcacttcactttgagaaccactgtcttaggacaaagtcagggctcttccgggaaccacagcaaagctggagttttaactcctgagaagctgctctaggtttgccccaagatccctgctcctggtcattgactgtgtgcacgtgtgtgaagcagtgaagatgtttctgagcaactgtatgtgcggctgacgtgttaagctcacacacacgcatgaacctgtgcacacctgtggtgtgtggaccatgaaggcagggcaggattagcgggagtcgggggggcatgttcttcattaaagcagaggaggcttctcattcaccagcaacccacggcacagcagcctctgtgctcccagggctctgccttgcaccgcctgggtttctcgtggctgggcctcggcccccacactcccagtccattttctgcttctccctgtgtgtcactttcctgacacccagcccttgtctcccggggtgagctgagaaagacctttaaaggtctctagtgctgaaaagattatgccacccatggaatccaatataaaaacaacactaaaccataagtcatgaaacttaaacatgctgaaattgaaagagcttctttatggatttttctgattatgaacttctgggtaagttcatcgacaatcaacactgaaattgtatctattgtttggtctccctgctgtgcagatgtgaggagcatgtgctgggtcgaatgggaaccccatccttgcccttggggagggagtgcttcctgggcccctactcctcccgtgggtgtgtgcctgtgtgcctgtttcctctctggagtggcctgtttggactttggaccctagcagaagggtctctgcctttgatctctgttggtggcggcaacagtagcagtactttagggtttgcttctgtctcatgcccatctggccagggtcctaaagagcagaatgtgtagaaataagaatggaagcccaagacagcctgctctttttgctgtcctcctgctcccaggcagtgggaatttgttgagcttcaggtgcaaacccagtgcagggctgggatgcctgagcgcctgtcaccagtcacagaagcccagcagagttcaagttccttcctccccacaacatcccgccacctccactgtttatgtaaaggggattatgttttggagcttgtacatctgagtttttattttccccttaaattatctgctcttgcagccttccaactatgtgctatggtttgaagcctcgtgaaaggggaagatgcgggccacccaggatgaaggggttcctgatcagctttgctgcttggcactggccttctgagtccatagctagacagcgatcccgaaggccagtccttattttattttattattttagatggagtctcacagtgtcgcccaggctggagtgcaatggcacgatcttggctcactgcaacctccgcctcctgggttcaagcgattctcct

SEQ ID NO: 914126 - DNA, 4001 bp, Homo sapiens
aagagtaatagaagtatcagtgaaatcaagcattcaaaacatatacatttttggaactcaatatgtaaagtcaataagtggcttttagggtagtggtttatcagttcattcatttattcaacaaatatttctcaggtgcctattatataatggccctacaggttacagaatacaaatataatcaatttttctcctggagaggggaaagagacatacacaggtgattacaaaacaagatgacaaataatataaaagaaatatgcacagaattatgaaagcagataacatgagttccctagagcaagtgataagtgcatctgaaaataaaagtaatactattggtgggccacgggcaaaggacactctaggtaagaaacagcacgcatgtaggaatggacagcttaaaacattttggaaaaggcaggtagctcagcgtggtcgcagattagcatggcaggctggcaaaaggtaagcaaaatgctagctcacaaagggaactgtgtactgctaagagtttcgatttttagcctgtaaccaacgaagtatagttaaaatgtttttaagaataatgacaggatcagatctgtgctatggacagattattttggcagccctgtggaagcgggaacgaaacttggggcctaagaaatacagcgtgtgtctgtgagtctcaattttccagtataggaaccactttaacaaaacaaaatatcctatgaaacacttcattcagttctccagctcaccaccttaaacatcatgacttgaaactaaaatgagtggtagtttcctctcctcaacaaacacacatacaatgcttcacatcaacaagataatgtggagcttctattaaaatattccattccttccattaaattattaaataccactagctatagatattaccagacattcatttaaaactcataagtactgtagcccagattacctggagaatcttgtcaactgcccacggtccctctatcctacttcgatagccactgacatctcactggtaaccgagacgtaagtgaaagtacatctaatcagcgaaactgacaaagtcagccttggaaaaacagtaaatggagatgtcgttcacgaaacgaacagatacagaaagacgaggcagtgtccctaacggagcagagctgtcaacgagtctatgtagttaggagcccaggaatggccagtcttgtaagaaacggccggtagacggagcgcctgtgacaactagttgtagtagtttgcgggcaagggagaaaaaggaccgaggtaaaagagggtgtagggcacgctgggggtggatctacccgcagcaaacaggagacaatgagagagatccagacacaattcagagcggaggagcggtaggagggtgtggagctgggagcgaagacccgactcccgggctggtggcgggaagttagcggataaggaagaggcacccgaaggatgactagagtttggagcggcagtggaagcccagggacgtgggaggccgaggaaacagcagatctcgaggcggggtgcgggatgcacaccccggggacgcggagggacagggagagcgaaggtgtcacccttgacttgccggggcagccctcccgcacccagcccggtactcacagagctcagagtaccgatggcagccccggcccagctgctgcagatagcgctgcagcacgtccgtgaggaggtggcaggcgctgagctgcaccgagtcccagcccagcgcctggcagatctgcgccaccgagaccctcaacaacgacctggagtaactctcgcacatcccgctgcgtggacgccaccgcagcccttgctgccactgctctccagccccgccgccagaccttagcagggtccccgattcatcctctagggcttccgcggcggggaaagggtcccccggacccccggcgaccacctcaaagccccagcagcacggagcgcgccagcctgagagccgccattttggactcgctccgcctcccgctggacggccgccggggcgaggcagcataagccgaatgccgagcgcggcgatgagaaagctccgccccttgggagcggaacgattcctcgggatcgcctctgaggcctggaagccggccggaagcgggcgtggggcgcgcaggtggaggaggcgcccagggcggcaggtgctggggcgctcacctgggggacagcggtgacgaaaacgccagtgttttagaggcaaacgagggatctgggatacgacattgacaggttagagagttagcactaataacgttagtcatattagagagttatgtgctagagagaagtttggggcgtgggaacttacggagctcgccaaacgcagacctgcgctggtgttgcctcagctaaaaatctgtgtattgagctgcttgccactgcaaagattaaataaagtccaagctgttccgcatgcccttcaaagcccttcgcaatagggcaggaactaggaggactctgtgccaaattaatgggggcctcaaaaaactcagtcatcaagatcgataatattttaacagtttttttaaaaaaatccaaatccatgccataaactcctgactcactcatgtcattctaatcccagccctggttccaataaaactttttttttttttttttttttaaaaaaaacaggtaagctgcctgtgggctatagtgtgcgatttgagcatcgcggctgtgacctatcgggggatggggacctcggctgcctacagaggccaaaccgagccttaaaccggtgtcgcaggccgagtgtcctgggaacggttgcctaccccagagccttctcccagctccatccaagtattgccagaaatcggatttagggataaatatcttgatttttaaatacagaattgggaacacatctcaaaagccaaactgatcccacggttagtctagattcagcctgcaggtcgcccgattgtagtggctgaactatgcggtttcttaaatatgcccttctgtacttatcacagtgtatttagtttatgtgctcctccaataaattgcgagtttatgagtggctctatattcctccgacagggactattccagaactttgaacatgatattcacatttttcaaagtctgggaaactcaataatagaactgaaattatggttcttcagctaaatgacgatctgcagagaagcaaggtactaaagggcaaggtgcctgcatttactccctggacactctgtccccaagttatcaggaacattgtgttgctaaatctatgagacatttttcagtcctagccgtacttgattattttgtagctatttgataatgttgaacgcttctgtaacattgaaactctcttgcgccttggatttcacaaatctgtcccgctaccgccgccaccctgggtgtttgttcctcttcatttgcctttctgtgtataggggaggggattttatttcggaaaatttcaaacctacagaaaagttgaaacaaaatcatagactcacgtgtacacttcaactagattcaccaattgttaacattttgccaatttactatatattttgtatttatatatgcacgcaggtattttttttccagcagtttgaaaataagctgcaaacttcatgacacttaaccccaccacacctcgacatgtatcaccccaaaacaagaacattcccccacataactatacacaagaccatatgtcacaggcttggttccccaggaagtcaactctgaaatagagatgagcctgcagaaagttcattgagggatcctcctgggacttgggggaaggagtgaaagccagggtgcagtgaattccttggcaagaaagcctcagccaagccaatgccatagtgtgcagaagctggagtggcccttcagagcttccctgaatccaaacaagaagactggacctttatattcccataggaacaggtcactgcatgagggctacctgggaaagggtgtgtgctctcaggcaaaggaacactgcagct

SEQ ID NO: 914127 - DNA, 4001 bp, Homo sapiens
tgagccacgacgcccggccaatacgaaggtaaaaaaaattaaaaactaaaaaaataatgacaatcagcatcacacaagtaaatgcagcaaagacaaaaaggtctgtccaatgcccatgcctaaacacatggctctcaagctgccatatgtcaatactccttagaagcacttattcaaaagtgaagattcccagattccacctctagaggacctgattcactaagtctgaagtgatgcccaggaacctgcatcctccaaagacttaacactggtggtactcagcccatatatatttttaaaatttcagccgggtgcggtggctcatgcctgtaatcccagcactttgggacgcagaggtgggtgcatcacgaggtcaggaattcaagaccagcctgaccaatatggcgaaaccccatctctactaaaaatatatttttaaaaattagccgggcgtggtggcgcgtgccagtagtcccacctattcgggaggctgaggcaggagaatcgcttaaatctgggaggcagaggttgcagtgagctaagatcacgccactgtactccagcctgggcgacagagcaagactccgtctcaaaaaaagaaaaaaagaaaaagaaaaaaaattcaacttttagctgagattcagggggtacatgatgtgcaggactgttacaagggtatattgtatggcggccgggcgcggtgtctcacgcctgtaatcccagcactgtaggaggccgaggcaggtggatcatctgaggtcaggatttcgagaccagcctgaccaacatggtgaaagcccgcctctactaaaaatacaaaaattagccggccgtggcagtaggagcctgtagtcccacctacgcgggaggctgaggcaggagaattgcttgaacccgggaggcggaggttgcagtgagccaagattgcgccactgcactccaacctgggcaacagagcaagtttccgtctcaaaaaaaaaaaaaatctataaagtatttatcaacacatcttttaagaggaactaaagaaataaagagaaaataaagtacttacagtacttaaagtacgctagtacgaaactgtacaaacactgttagtgtcatgcggacctgcccaaggctcaaaagcccaaatgaaaggaaagggaccaagagcgtgaagatcccgcctctccgcgctcaccttccccatacatccctctgctcaacagctctcctcagcttctcactggaactgacagctcggaagggggtttgactgcgcagcccgcgcactagagaaaggggcgggcatgtggccctagaggcgggcccaggaaattcaaaacaagcccgcagaggtgcaggcctgccagcccctgccttaccggcttgctccccttcgcggcggccgtacctacccgggaccccacggctcacctttacccggagccgcaggacctgaggctgaacctgagacgaccgtggcccccgaagcgccagtgcccggagggtcgggggccgcagggccaggggccgaggcggtcacccggctgagaagcgcgctggtcacctcagcgccggcgctgtccacctctcccggggctccggagcccgccactgcctcctccagcagcccggcctcacggcgcagcgcctcttcggcctcgcggagtttgctctgccgtaggaactgcagcacggccagtagagtctgtcggtcatgcggagcgccggcgtccggagcagcggcgggcaccggggccgcccccgccggggcagcggcggagacagccaccgtgggcttgggggtcccgccatccccgccagtggacgacgacgccgcaacgttcccgccgccgccgttggggccgttgttggtagtgccgccgctaccctcgcctgcgccgtcccccgcctgcggaggtagcagcgttggcggtccctcaggctctagcttgaccgccacctccgtctgctcctccgccagcgccgccatcttgcggctgagccacctcgcgccgtcaagcgtgattgcattttcgccacatggagggcggggaggagcatttcacgacaactctagtaggccatttacggcagtaggaggagcgaaaaggaaggagaaacggaataggaaagagagcaactttcaaaaccgagcgaaagaaaggcaggaagtgggcattggtgaccacctattacatttgcctgagaataattgccatttattgcaggccagctatatttaggcattatgatagatgttttacattatgtgatctccttcaattcaataatctttttcttttttcttttttttttttttgagacggagtttcgctcttgtcgcccaggctgttaagcgattctcctgcctcagcctccccagtagctaggattacaggcatgcgccaccacgccctgctacaattaaataatcttatgaggtaatattatccccacctcgcagatggctcagttgaaaccaagagaggttaaataacttaccagaggcaagaagaaagtccaaatgtcaacattcgaatccacgtatttaactcaaaaacatataccatttgccagagggaggcttccgagatactggtagttttacattttgacctgaatagtgcttactttttttttttttttgtcatttttacttttgtaaaagttaatcgagctgcatgcattacattacatttatttatttatttaacttttgagacggagtgtcgctctgtcgcccaggctggagtgcagtggcccgatctcagctcactgcaatctctgcctcctgggttcaagcgattctcctgcctgagcctcccgagtagctgggattacagacgtgtgccaccacgcccggctaatttttgtattttcagtagagacagggtttcgccatgttggcgaggctggtctccaactcctgacctcaggtgatccaccggcctcagcctcccaaagtgctgggattacaggcgtgaaccactgcgcctggcccgtatacattacatttcaataaaaagtttttaacgccaggtgcggtggctcacgcctgtaaccccagcactttgggaggccgaggcgggcggatcatgagatcaggaattagagaccagcctgaccaacacggcaaaaccccgcctctactaaaaatacaaaaaattagccaggcatggtggtgcgcccctgtaatcccagctactcgggaggctgagacagaagaagagcttgaacccgggagacggaggttgcagtgagccgagatcccgccactgcactccagcctgcgcgacagtacgagactccgtctcaaaaaaaaagtttttaaataccagaatgttgtggttgtgaaatatgtacgttatgtattcatgctattatccgttattacaaataaaccattttaattgtatatttaaaaatcatggccacacgcagtggcacatacctgtagtcccagcactttgggaggccgaggcgggtggatcacccgaggtcaggagttcgagaccagcctagctaacatgatgaaacgccatctctactaaaaatataaaaatttagccaggtgtggtggcgggcacctgtaatcccagctactcgggaggctgaaacagaggaatcacctgaacccaggaggcggaggttgcagtgagccgagatcgcaccattgcacttcagcctgggcagcaagaacaaaactccgtctcaggaaaaaaaaaaaaaaaaaaaaaaatcatatatgccattttgcaatgtgcttcataggttataaaaccctcctgcatattttatctcattggaaacttgtaactctgtggaataggtacagacgagaaaagtgagcctgagacattgggaaaatctagcacagccgttcaagttattggttttgaggtcttaccagcgtcctttgaccctgcttacttttaaaaaatattttattttattaattagagatctgaagccttactatattgcctaggctggccttgaactcctgggctcaa

SEQ ID NO: 914128 - DNA, 4001 bp, Homo sapiens
aggccagtgcacttaatactagcgttgaggatgcagaacaggaactctcacttaatactagtgttgaggatgcagaacaggaactctcacgaactggtggtggaagtgtaaacgggaacaggcactttagggggagaaatggtaatatcttttaaaattgagcatttgcatgctgtatcacccagcaatttctttcccagatataagagaaattcttatagatgtacaacaggggctacttataagaatattcatacaaacactgttcaaaatagcaaaaacctggtggcaacccaaatgtctgatggcagaagaatggataaataagctgtggtgcattcagacaatgggatactttattgctatgaaaataaatgagccacagctacatgtaacaacatggatgaatcttataatcagtatgagaaaacttaacaattcttggttttgcgatgttatatttatgcaatcttattaactcaatttactttttattaattactattaaataggctgcagtagaacaagatatatgcatttgaaacaatacaattgttgtcatccactatatataatgtgtggataatataaaataactactaaacagtataaatgttgtttaaaaacatattatttttctttcataaatggtttagtttatgtgtgttccagaggaccacaagttccagaggaccacatagcctgagatcctttctaaaaataaaagtttaaaagcaagcaaaatgatcatgaacatgcgataaaacagcaacaacagcatcaaacaaggaaatgctaagcacgaaattcacatagtggctatttccgagggaaggcggggaggggaagtgtgcaggagaagcgcatataaggagatgtgttagtgatgatgttcttgttcttggtttgggtggtgtatttgcttgtgtttattatattattaaataaactaattaaatggcatagatgaaagatgataggtgtcaaaaccaagaattatgattaaatctatggacctgaatatatatatctagccaaagtgctagggatggggttgggacaggacatcagtgcattctgagaattaaccctcagagtcacagaatctgcaagggaccccagagatctcccaatgccagccttcatcaggtagtgggatgggttggagttgtctgagatcagggaagcaggggagatttgctgaggtcacacagaaggaaccagagcccgggcagtctgactcacagtttgctgatcttttctttccttaaaaggaagctccagacatccttgatgtcaggtactgggctctagagtactgagatgctacaatcttgagaacaggatatgtggaagccccaaatcctcctgcctatgggaaaaagtactctttagaacagagacttgcaaatgtgtttggctgtgatgacggtaagaaattctttatgtcatgatccaattcacatatgggtttgtgtgtgtgtgtgaaactaaaacaataatatcctgaagcaatatttatccgtactacatatgatgcacactgatatttttaccctatttttggtttttatttcttaaatgttagatatgatccatttaaattgatctaataagccaccagggggtcataacccacagcggctgtagagaggctgacagggactctagtaggccaagcctgccttgtccagagcgggacaggtgggaccccagtgtagtctgccctgccctgcccctgctctctgtccctggggccccagccagccaggcagaggggtctgagggctcccatcaatccagccacaaaacttccctttctacctctgcccttctgggctgtccagggtccatctcctctcccgagaggtccctggactcaccaaggcagtgcccgctacagcatgtgtacgagaagccctgctgtcctagcaggaaggagcaagaggacaaatcgaggggaaggctgtgggttctgtgggcaagtctgcctgctttgtgacactgagcccagtggttgctaggttaccctgttcccacaactccagaacctctgcccagcacccctctaccacatcccctgcctatctccccctcctggaagggtagacaagggctaaggaccttctgtccctcctgacttccctgctgcctcccatccaacactttcaatgggggccaagggagagaaggagagtctggggctggttttagccagagagaagcggatggaggcggaacgctggcagaggacgttggtgggctgcgtcccagcttcgtcagccccacctggcctgaccccaccacacaggggtcggcttccatgcatcttggttctggggacccattctcagggaggtgggtcttggaaggagagaagatggcagcccgcattacccagagggaccccagcccctctctctgcatgacagctgggtgggaagattctgggcttgcatttggacaggtgttttaatcagatttcaacatcccatagacacgttaccttgggtaagtcaccgggactgccacagatgcaaaatagtgggaagaatccttgcttcgagtccctattctgctacttcctagttgtgtggcctcagacaatgcacctgccttctctgagccttagttcccatatctctaaaatggagatgatgatactgcacttattctcacaggatgtttgagaatattaagtgagttgatatatattaaagcgtttcaaacagtatctgcccccaagtataatttcttactattattgccttctctgggtctataaaatgggatatcctcacctacttctgtggttgttctgaagacaagctaatggaagtgaagcctttagttgtatgtctggcacacaagagatgctcaaaaaggataataatcatcattattattggtaacttgatggaggtagtaggatgagtcctttgtctgagaactatcttaggtagttcactatttctctgaggctcaacttggacacctgtcaaatgggggtaaggatagttcttagccgacagggctgtaactcaatcagatcccgggaggggtgcagacaggctctgtaaactatgggaaggcttgcagacagtgccgggtgctgtccctcagaatgatgaggtgggcttttcccagggcctttgctctcagcacccctggcttcatactggtgccctggggcttccagactctgtgtcttttctctggggagcaagaaaaggaaggtgggtagctagaggcaaacccaagtccttcaaaagttctgcccctcccagctaaggggtggggattcataccactctggtggccccctgagggctgtcctctggtcttggcctactccaaatgcccacccatccttcggcaggtcaggatgttccctggctttttctgggcctgtctctgcaggaatacggtgactcttttgaaatcatactgaaaaccccctcttccatacttctgggcatcctggcagctgtgaagatagatgatatagcatttgggagaagagaggctttcttccccgtgacaagccactcctccctcctgctttcagcactcttgtggcatttcccaccacgcgagctgactcagctgagatgaaaacccactctcatcctccccactggtgccttgtaatgcttcaactatgttatttacaatcgagcatgggggtctgcatagggactgcagctggggggatgaaggggttcctcaggaaatgtcttcaacactggtttgtaaaagaagaactgaggaaactcttctgactcctttgtggagtgtcaaaaactgtagagagatctgtcagcctgagagtgatttgaggtacagtccttggcctggatgactcagtcataacagaggcaatagaaacttcatggaacactttctatgtgccaggcactgtgccaacctcttagatatattacctcatgtaatcctatagatggagaaattaatgatcagataaatctttagttatttgt

SEQ ID NO: 914129 - DNA, 4001 bp, Homo sapiens
aaatagtccgcccgcctcagcctcccaaagtgctggaattacaggcgtgagccaccgcgcccggcccataatttaatttcaagaatatcctgtcaaatcacaaatacaataccattttttaaaaaaactaaagttattggggaaaaaaaggagaggcttatctgggagattagaaaaaaggctttccttagtaaaagccctactttggcttaaaaagttgggataaaattctaaacaccaaactgcattttaataaagaccactgaaacaaacgattaaacactatgaagcacaaccacttctaatttcaagaattcccaaaccacttgaatggatttagacgctatgcaagcacagcaaataaacagctctacaaaatgacttccttctctctttcacaaccacacccgtacacacataccgcctcccctcaccacccccccaacaacctaaatgtttgtagtaaaatttttaaaaattggagacggagatggttatctgcttttccagaaaaggcaactgcatatgtggcactagacagctggcccaacctgactgctcagaagccaggtatgaatggcaggtacagcctcccgcggacaaggcaacagaaagactcgctgtccacagagctcacaacttctcctatagaaacacaaagccgacccagttcctcttcctccagtgacaaatcaaagctaagtcctgacgcgtgtggggctggcacggaagcggccgaccaagctctccgctccggctccggctccggctccgactcccaccaagaccccggctccggccccggccccggacccgccccgagtcccatgcagcctgcgctgtacctggtgaagaagtccgcgaagccgccactccgtcgagcccgggccgaagcccccgcaggaccctgctccgcggcgggcaagggcaccggcggccccgccgggggcaggtgatcgcgggcgctctgaccgcggctcacctggaacgtgttgcgagagttgaagtgaatgtcagaaaagcccaggcgcggctccgcacccccattagtcctctcggccgaggtggcagggggcgcgccctcctcgggacccccggcgccgactccccgctgctctgagtcctcgctactgctgcagctgctggcggggctgtcccccgagtcgctgcccgcgccctcgggctcctgggcgtccgcggccaccaggcagcagctccgcagcgggtcctcaagcggagaggcccaatcggacgggcttcccgcgccgtccgcgtcctcgtcgccaggcccctccaggcgaaggcggccgtaggggcggcggcggcgcgactcccggccgccggcgcgcgccagcccgcgagcctcttccagatcgcgacagtcccggcccggcagaaaacccgagtcgccgttggtcatgccttcgtgccgcggcgcgcggccatcagccacctccgcgccgcggtgtttggagcccgagcccagcaggcaggcgtccgatcgtggggctgccgagggcggcggggcgccggcctggccagcggggagcggacagtagcagagccccggctccagctgctccccggccgccgcgaggtaacgctgaaggagctgccgaggcggcgtctcctcctcctcgtcagcctcctcctcctcgtcagcctcctccggcggctccacagcgccgacgcctccgccaaagccgcccgtggcccggattaccttcctgtcctggcccacggggtccggcgcaggcaccgggagcaacttggggtttcttcccgagcaggctccggcatcctccggacccaccatctgggggtgggtggcggccgccccaggaggcaaagaaggactacaggcgcaggcttggccagagaacagctctgggtgctggggccgcggcgacagccgccgcaacgttcccagacccacccctcccacccgctgggtcggacagttgcttgagggcgggcacgcgccaggactcgcgcacgcgcaaaagtcggaccggtcaagccccgacctggagattccccgaaccatagagacggtagctagagagacgcaggctgccaatctaggatccgccatctggatggtggaagctggttggcccgctctaagcgtgacagttcttaccgaagcgcgggtattgctcgcttagcaaaaattcacttgatgtatttcatttatggtagtaaaatactcccatatttgggaggtgttagcgtgggtaagtccttccagctctaattggtcaccagtcgactttacgatttttacatccttctccggcatcattgccacagttcagggcttcatcacttcatccaggagggtcaacaccctcccttcttcacttcatctaacacaaaagaaagatatcctaagttatcttgctcacctagcaccatgtttcatcacagtcctctgtttaaaagattatcaccggccgggcgcggtggctcacgcctgtaatcccagcactttgggaggccgaggcgggtggatcacaaggtcaggagatggagaccatcctggctaacacggtgaaaccctgtctctactaaaaatacaaaaaaattagctgggcatggtggcgggcgcttgtagtcccagctactcgggaggctgaggcaggagaatggcgtgaacccgggaggcggagcttgcagtgaaccgagatcgcgccactgcactccagcctgggcgacagagcgagactccgtctcaaacaagaaaaaaagattatcacctaaggagggagaggaagtggtcaggcagagaggagctattgaaataattccagcactctgcgatagtggattaaaatgggatgattgaccattgagtggaaatgaagtatatttaaagtaaaagacgaaagacttgataactgatcagaagtgacagaagagagagtaaccaatgattactacaaagatatgagactgaaactgatatggtttgaagaaatagaaaagtggataggaaaaaaacgattaataggggaaatacatctggtaaagtaaacgactgaaaatatccagcatatagagttctaaaacttgagttggctgggcgcagtggctcacgcctataatcccaacacgttgggaggccgaggcaggtggatcacctgaggtcaggagttcgagaccagcctggccaacatggtgaaacccagtccctactaaaaatacgaaaaattagctgggcatggtggtgggcacctgtaatcccagctacttgggaggctgaggcaggagaatcgcttgaacccgagaggctgaagttgcaatgagcccagatcgtaccactgcactccagcctgggcaacaagagggaaactgtttcaaataaataaataataaaacttgggttagggtttaggttcagagacacagattaggcgtcatctgtataatgcaagtaggtggatgaatcatgagtaacattacctaggaagaaagaataatgataagggtcgggcacagacccaaatgtttcattatttcaggacaaaaaagttgtattgcaagaaattgaagaggcatcagttgtggataaaacgaagcagaaaatatagaccactcattctataaaagtatatagaatatagaccactcattcattctaaaagtatgttagtgaatgcaagaacagaaaatagaagtcgtagaggagacattattgtcaagcatttaaaatttatttcatataaaaatacctatacatacagatataagagggaatataacctttatataataaaatgtcaataaaatgggcatgcatgtacctaacactcaatttaaaaaaacatcaagaggccaggcgtggtggctcacatctgtaatcccagcactttgggagccagaggcaggcagatcacttgaggtcaggagttcaagaccagcctggccaatatagtgaaatcccatctctactaaaaataaaagcataaaataaaataaaattagccgggcgtggtggt

SEQ ID NO: 914130 - DNA, 4001 bp, Homo sapiens
attacttttgtcgttttacaaataactaatactttcaaaatgaaaatatctaggaagttaagattccaagtttcaccaatacaaggttcaccaatacaaatagattctatggcaaaaaaaaaaaaaaaaaaaaaaaaactaagcatcttctaagttgaagatctcaatacacagaataaaacatcagtcatggaaaggggctggtaattcagggcaccgtctctctaattaaaataactgagacctcataaggcactaataaaatgcattgctcaatgacatggaacgtttcagtacctattgttttaaaatcgtaaaagcatttgtgatgttcctgttacatgaaaatgttcttctggttgtacatattcttactttacagaagctgggtagcacaaaaatatttaaaagattaatgctaaggttttttaaattttcttttaaatttatataagtgaaaaaatgcagttttttaaagcagaatttaaaaaatgtagttccttgacattatatacctctagtggcagcactctgatataacacccctccaaaatacggcaaaaactaccaacgtttcttgaataaaatccaaaataaactgcatcacacataaaaatacaatatccagtgctgcatatgtgatgtatcattaagtctaaagaccaatttagcaggagtttaacaacatcttttagaaaagctcacaagataatattggaattaaattaatcaaatggtgtattctaacataacacccgtttgaatatgctaatgaggtcaatccttggaataaaatgcacgctattccctgatttaaatgcatctgcatagttagctgacaatgaatcttgcccaaaccagcccgcctagctctgctgcaccatttatcaaaggttcagtcactttttctttttaatcccatgtcttaaaagccaaactctagttctaaagtgcagtgtggcattagcgaatgtggtggactccggcaggcctggggcaggggaatctccggtaacatccctcagtaccgaaggcaggatttcccggccacttccgtcggttggaattctcttaagcattgccctgagtctattttcaaatgaaagggggaaaaacccaaaccagattagaatctgaaacagctgaaacagctatcgatttccagcttgctttcaagtctggcagagactgtgaaagtcctaacttctccgcgatgtcagccacggcccgcggcggtcacggagccacttcagcacctcgcgatggacagtgacccccggcgtggcgcgagttccctgcggtccccacgcgggcctgggcggcgggtccctccacggctccgtccagacacccggaggcacctgccaaagctgcggaggtggacgaccgggcgtccaagcacgaactttctcgccgaggcacggctgccgggctccgtcctgagggtttggggcggcgaggaccgccggggaggagggcgcgcgagccggaggccagagccgggccgggcagggcgcgcccaggagcaggggagacggcgacccgggccgaggcgggacggggacacgttacctgcccgtggagcgcggggaaggggtgcgcggcggcggcggcggcggagtctggcgcagagggcagcggcagcagcgggagcaccggctcgctcggggccggccagccggggagaccggggagcagcggggccgcgggcggcggggccgaggcgagcagcaccgggggaaccacgacccccgcgctgagccggagcagcccggccgagcccggcaccatccagacccagggcggcggcggcggcggctctgcgtccatcggccagaggagaggctgccgccgccggggctgctgctgctgcagctgccgccgccgccgctggaacctggcgcccgcctgcatcctacatccccgcgctgacggcggcggcgggggcggcgggcgcccgagatgctgggccggcggcggcgcggctccggagcgaactcacttggctccgcggcgcggccgctcgctccgcccctgccccgcgcgggaagctcctcctcctcccgcccgcgccgccgccgcccccggacccggcccccgccccggtccccgcccgcccgcgcccctccccgccggaccccgccccgccctcgcgctccccggccctggccggggtctcctccccgctgcgcccctggacccgggcggccgcggaggacgtgggtgggagagggccgagggcgcgcccggctgggctcccgccgatgccggccccctggtggcctctggccctctgggacccagcgcaccgcgagggaggctccgggctccgcactcaagggcaagcggaagccgaggtggcggcgccggagccaggcatgtcccgctgcccagcgcggggctgagggcgcagacggggaccgcgcgagccgctctctacctggcctcctcggagtccagggcgcggagggtactgggctgcggatccggcgcaggcggccccggacgctgctaggcgcgggcggatttctgttgcacaaatgggccaaacaggttcgtaaggcccccgcgggtcccctggcccggaagttgagccgcgggtgcctggtctgaagttccgcgccccacagtggcccgcgggcctcggcggctcctgccctacgccctccaaggcaccaggcaggtggccccagggcctttgcccacgacaccccctgggtggggcaggaccacccctctgtgaattcgtcctggatgcccccaggcacagtctgtactcctccctcccccagcacacgcggcctctgacgctgcacgccgagcttcctgggacccaggacgaaccgggctccaaggaccctcgctccgcccggaccacacgcaggcagcgccggccgagccgagcctgggtccgcactggccacgcgcagccaccgccagacggcgctagccctcccccgctgtagaccctgcttcggaggccgccagcctcctccccatcccgggtccacagcttcagtgcagcccctggcgacgcgcgctgacagctgggcagagacttccgtgcgctgtaaaccccttaggtcgctaaacccaggaaacccaagcacagctaatgccagcgcgagaccagtgttgttagaggcatttgaagggtctttctggatgcaaaaggcagcattatgatccatgcatttaagaacttgcatgaaaaaccctccctgacctgggtgggagagcaggcacccacccacccagcggcactgacacgcctggtactccaaacccgtgttcgcatcacctcccacctgtccactgccaacctcctgagatggcctaaagcacccgagtgcttttaatttgcgtctagggttgtttcctcattatcctgatttgcttaatttcctcttggcctggcctgatttcttttagatctgggcatatgctgatttacatagctggcgcctccatattttcctccacgaaaaccagttttcaattagcaagtttatctctctctttgatgcaaaagtactggcattttttttattcacctaaaatcagaaagctctgcacattagaaggctgttactattcacttacacccttaatttatgtgcatatattagtatgtgcacatgtgttataaatgtgttagtttaatggtcagagccagatcaggatattggggaggcgtctccaggcaggctcacatgcccctgccaccccccacctcccccaccgcatagtcccttttgcacaggagattctccttccttctgcttggaggcagagacagaaggccaggggtgctcgtgcctggcttgcatgctgttctctgcaaaagcagggttttgcgtgtgtggcccccaggttcctgggaaggtagggttggccacagtctgtgggagctgtagcactcctttggggaatcccagccccatccccactgtcctagaaagggttctgctgaagtccgtttttgccagcacccctccggg

SEQ ID NO: 914131 - DNA, 4001 bp, Homo sapiens
tctccactagaaagctaaatacatagtcgcccaaaagagaaagccaaggagcctctccagggccccgggctctgcgcgctagccagttctcaagtccaatgcctggaggaaacccactctctaccccgcgcatcgggcgcagcacagtcagtcactcgtggcccgcagcggcagccaaggggttaaccggggaaagcccaagacgccacagaagagggaaggaagagaaggagagagagggagagagagcaaaggaagagccacagagtcatcttcccagggtgaagaaacaaacaccaccaccaaagggggagggggaaccagaacgcaaaggaaagttcttcggattcccccccctccccaccaacaaagccctgcttggacagagaggtctccccaacatcacgaggcagcaaactgaaagcaagaacgtggcgaagtgcaaacaaatccagtccacaaaaggcagaaaagtttggagagtttcgggcctcctgggccacgagcgggggaggggagggagggaggggaggaggcggggagggggaggcggggagggggcagggcaggggccgcatgcggggcccggcgggcggcgcgggcgggcgggcagcgggcgggggccgggcgcggaggcacttacggttcgggcggtgggcgagagcgatccgttggggaggtaggggctcgtcaggtcggggatcatgatgaaggggtagccgggatacggtggccccttaaagagccctccatcttgcctcttggccgctaacatggcggggcggcgaggggacagcggcggccgcgcggagcgggagagagtgaggagaaactttttagaaagtgccccgaggggccgggcgccccgaccgggccggcgcagggccaggccgagccgggcgcggggccggggcgcgcggggcggccggcccggggggcggctccgggcggctgcggggcgcgcggggcgtactcaccttcttccaaactttcccgggatttgtctcggaaactttcggagcgaggcggaggccgtctttccgccttcccagaggggtggaggtggggagggcgaggggcaaacgccacgcagaagggggagaagggggagaaaaagaatcggcgaggtcgaggggggggtagaaaaaaacagggttacaagtttttgcaatggtggcaccgtacgcacacgccgcccgccgggccccgccgccgcccccagccccgatttctcccctttcagcaacatttgccaagcccaggaaacagataaaaaaccccaccagcccgaggggcttttcctacctcggaatcggaggagctgttttgattcgtttctgattcattgactagagacgatttgacatcagctaaatccctctctgccgaggagttttcggagctcttctcctcctgttcgccctcgtctttgaaggaaatcagttcgtcgttggcgcctaggtcatcccctccaccgccgttcagctgcggcatttttttttcacccaccagcagcaattttggaagaaaaatgaaggaggaagaaaagccaaaaaaaatcacccccaaaaagttttgcccccccaaaaaatattgcaagaaaaagacgagtccaaggtgaacttttttctgcttgggggtctttttctcctggggaggggaaaagagggaggaggggaggggaaggggggggagatcttctgcacgcgtgagtttgggtttcttttttctctcgttcccaaggatccgatcaatgtgcaaaaaaataataaataaaaaaggggggtaaaaaaaaaaaaaacaccaacaacaacaagaagtcagatataaagagcaaagggggggggaagccgaagatacaggaggtgctcgtgccgctcggatttgagtgagttgaagttagactgagagcttttcagttcaaaggcggcgctgattgacagatagaaaaagggggatcgaaatccggaggaacggagtagtctgggagcggagattattgacagggcgagaggaacacactgccttaatgagatgccggagggcggggccggcccagtgacgtgtgcataaataaacagccggggtgggcggggcgggggcggctaacaatgatcctttcgggcgccgggagagggaggagggaaagaaggaggaagagaggggcggggaagccggggggagacggagggaggagtgtgcagggggagcggcctgcgcggagtgtgtgcgagcccgggattctgggcgagggtgcagggacttgctccgggagggggcggtttcagaaagacaatgcggggtgggagaggaggagaagggggtggcgaccaagtcaggaatccgagccgaggaaggcggaaggaaagcccacttggggggcggggatggggagaggcccaaaacagtgcactttagaaatattagaaataagtcttaagggagggggaaaaggaagggtagtatttgagaaagtggtggctgggggagggggtgggggggtgcttggtggttaattcagcagtgaaatcagccacccttagacgggatgcgacaaaagtggtcaaaaggaaagatcaaccctccactttcagagagcttggggaagtgaaggggctggtcaaagttcctggtcatctacaatgaaagaaactattaacccatgaggcctccctcctcccttttttgtttattagtagtgaatcatttcatgaaatgttaagtcccactaggatggatatgccaaaacgactttttatgcaaaaaacaaatgctaaatgtcagaaacattaaaagtatccttaaggaaaaatatatgattcttttaaatgtagagtggtgttttgcttttttttttttttttttaactgacgttggaggtagtaggaaatgagctagagtcaaagtcctttttgacttaggaggtgaaaagtttgggcgttaacaccgtcagggaaaataaaactgaaagttcaccaacccctgggatcagttgggctacagtgtttctcgaagggggtctgaaatgaaatccccgaaagactgaccaaaataatcaagatgtaggtggctctggcaggaaattgctaaccaaaccgatgctagaagaccttcgggagaagatgggaaacctggggcttgaggcaggtatttgttgacttttaggtattagaggaggagcagactgatttgctacaaaatggggaatggaattatgttaaagaggaaagacccagctcccaaaacacaatgttcctgggtgatagagcaagaaaattcatttttgcaaatacccagtaagaagtagactggacactacaacatgaaaaagagaaaaaagaaaaaaataaatcagtaggatttagcaaattgcctcttaggagtagtattagtctagagtccaggatgtactgttgtcccacccttccctgaaaaagctcacctgcacttcagctggcccatcagcaccgaggtttccaaaagaaagcaaatttgccatgtaatatttagagagtttggggtttcagcaaaactgttttataggctaaagtctcagaaagactactaaaaataatgataccgagattgacaaggccaacgaattcccctgcactggaaaaaaatcacaaccacatttgcacactaaagaataagatgcaggcaaaataaaaatgggttgggggggaggcagaggagaatcactgtaactcccaactttgatattaatcagaatatcagaagtagagtgagaaggagcctgaaaagaagtaaaacaaatgtgtacatttaatcagacaggattgcataggatacaaagcacagggctaattagtctcagcaggtaggactaaccttcagacttcataaataaataaggcaggtgcagtgtctaagagggagagtggagacagaaaggggattatttcaagacaccaagtgaaaacatgaagaatgaaatgcttcactgttaaatccatgtacaaatggacttaacagtttcc

SEQ ID NO: 914132 - DNA, 4001 bp, Homo sapiens
aggaatgattaaaatgattgaaattaaagttctttatgagttttctgatccatagccaacagaacataaaaagttgcaaatgtggccaggcgcggtggctcacacctgtaatcccagcactttgggggtcgaggtgggtggcccatgaggtcaagagatcaagaccatcctggccaacattgcaaaaccccgtctctactaaaaatacaaaaattagctggtcatggtggcacacacccatagtcccagctactcgggaagctaaggcaggagaatcactttaatccgggaggtggaggttgcagtgagctgagatcgtgccactgcactgcactcctggcgataggtggaggctccgtctcaaaaaaaaacaaaaatgcaaatgtattccgtaataagagagaagaggcagaaagaggcgtagagattcaaaggacaaaaaaaaaaaaagtttaaaaaaaagaaatggaaaaaaggccagaataaaagccaattctcaataaatgttagaccaagcttgtccaacctgcaacccaccggccgcatgcagcccaggacggcttatgaatgcagcccaacaacacaaatttgtaaactttcttaaaacatttgacattttttttgctttttttttgttgttgtttttaactcatcagctatcgttagtgtattttacgtgtggcccaagacaattcttcttccaatgtgggccagggaagacaaaatataacactcctgtgttagaaaatgagaacaaccaacatgtttctactcacagttgttcacatggacacaaaactgcctgattccattagaatccatgaaaactcttgaaggaaacggggaattactcctgaagataacagagttgtctacacaaacccagcttgaagacctgtgaggaaagaggagggagaagatatatttagaaggggcggggcaggtccaaaaaagagtgtcccagcaatatcggccagatgatgccaaagaggactccttgggcacctataggacgacacgaaggtcttattctactggccagccctgctctagagaatcagaaaaggcaattcctaggaaaaaccaagggaatgtcctaggagtggaagtacgggtgggaggcacaaagactaactcttcttacatccaaatgttacccgttgtaggccccaaacccctttaggattcagtctgagcaacgaagctcaccttacgctgcctggaaggcagaaggagaaaactgtcctcggatggagaagatagcagtccctgtcgcagcagcaatttatatcgcaggctccaggagtcaagtcacagacacagatcggtaagactatgaaagtacgacacagagtgagtgggatgaagatccccaaactctcccaggtgctcaccctccttcttccgacagccccactcctgctttgtggcagctcaactttgctcacagaattttagatctcagaagtaagtttccacccccacaacgttttccctcacctgggaagaggtccacagtcctattcccaggggccgagggagtcacgagagtagggaccactgtagggagtccaggcacggccgggcgagttgcagtcgcctctgaaggggactggagggttccgccatccgtccctcgctgcagctccaaagacgtgggcactgcccctgatggggaggaagagggctgaggccggacgccatcggggaacaccagaaagaacacttgcaggagcgcgagctgtggggtgcgcatggggcattcagggcctccgggtccgacgtaggcctccgcggtctccaatcgcattgccagagcgtgggtgggaggagtcgcatagcgtctgacgccatccgcgtgcctcttctcattggctcatgagaaggctgagagctcttcaaccaatcgaaagtggggttgttacagctctttcagtgtccttcggtctgcgccctcctccttaacgcgggccgggccgtgcctccgttgcctggcaaccgtcagtgacgaagaagcccttgcgccttccttccgctaggtggcggtaggagttcggcggaccgagaggttccgcgcccacttcgcggcccagaggactgagcccggcctccggtgcaaggaaaccccagaggccggaactagaattgcaaattttttttcaccccggattccaacggtgagaaaccctttctatggaagaataatgttctcaggtgggggaaacacacctaaggtcacataccttaaaaaacagtctcctctaaatatggcttttttaaaaaaaaaaaaaacacattagaaataatgttcattcagctccttacattttaacattgagaaattttgaaaaccctaaagaaatgcatcaaatcattaaagatggactgcatgtttgttgttagaaaaagcagtgagagaaaaataagaaaaaagggcaggaaaaatgtgagaaaatagggagagaaagaataaaaaaaagaaacattgtctaggaggtgagaaaataagatggaggaatggaaatagaagatttttttccccgtgttaatggcaaattttttaagcctctctaggaggtttttgttcttcccgggaatggcgtgcctcttccgattccccacagcagcgcgggccatgggactttccttcggtattggaaatgtaccgtagctgcactgtccagcatggtagtcaccggccttatgtggcaattgtgcgcttgaaatgtggctagcgtgactgaggagctgatttttttttttttttttttttttgagacggtgtttcgctctgtcgctcaggctggagtgcagtggtgtgatctcagctcactgcaacctctgcctctaggattcaggtgattcttctgtttcagcctcctgagtagctgggatgacaggcacgcgccaccacgcccggctaattttatttttatttttagtagagatggggtttcaccatgttgtccaggctggtctcgaattcctgacctcaagtgaccctcccgccttggcctcctaaagtgctgggattacagctgtgagtcgctgtgcctggcctgaatttttaatttttaaattgtaattaattcaaagttaaccacagacgtgagtagctaccatattgtacagtgggactgtagatgatcaaaatattgctcctcctagacccagtattttcctatgtccacggttctgacatctggattattttggatatttagttttagtatataaattaacatctgttaagagttatctaaaatctagtacacttacctaaaatctggtcaacacctccctttacaagtgaatcatttaactcaggtaagttttaggacatttgactttacttgaattctcttacaagatctttattttctaatgttttgaagtcagtagctaaaagtctctctgtgttataaatattttcaaatatgtttttatgttgttgtgtgatagacagctatgggagatatgtgtttggtcttaaaacatttatttaccttattagtaatttctataggaaaaggccaagttcatattattcagattatatgatcatatgtatatactagaatgtaaattccaaaaatagtgagttttgtctgttttgttcattgaaatatccccatgcctagaacagtgtctgggacatgttagatgtgcattaaatattttaaaaatatattaaaaattgttttgttgaactctttagaattaatccttaggaatatttttagtttattttatttcaggattgtatttctttctataaaatttcttctttttgcaaccaatttaccatgtaatgatctttctataaaatttccattgtacatctgatcagagactattttagatttcaaagtttggaatttaaatggcaactctcaaatagtgttaaattatttctgaatttattagcgttggcaaaagactgttggttgaagtaattttagagatgagtgataaggaagtaatgtttccggatctttttg

SEQ ID NO: 914133 - DNA, 4001 bp, Homo sapiens
ggaatccacagtaattaaatgttgattcagctaacataaaaggttaactagaagggtctcaacatttctctacgttaaagagtacctcattttctcagaattaggaatcactgatgtactagaagagtagtggactgaaagtgactcatttctatagttctacaggcaaaaatgagggctcagctttctggatttctttgttctgtacttcacgctttgaacccattaagtcctgaagctccctaagggtagaccctctcttttctttggaatcctatcggttctccctgatgttgctgggggcttcctaagatacactatgaatagtggggtaagtcatttcttctccctctaggataccacaggctggagttcttttaacaacaaaagtgtatgcacagatactcagctgtcatttttttccttctctgatgtttgcttttgtcttcctggcaaccccatgtattctgcaagaaccattctactcaaagaaaacactccggttttggctgggcgctgtggctcacgcctgtaatcccagcactttggaggccgaggtgggcggatcacctgaggtgaggagttggagaccagcctggccaacatggtgaaaccctgtctctactaaaaatacaaaaattagcagggcgccggtggctggcctgtaatcccagctactaggaaggctgaggctggagaatcgcttgaacccgggaggcggaggttgcagtgagctgggatcgcgccattgcactccagcctgggcaacaagagtgaaactcttactcaaagaacaaacaaaaacactccggttttaaacagacaaaacgcaacgcttcggtaaagcatgagctcttaagtcagccaggtaagtctcgtcttcctcatttagccacgctatcttgggcaaatcacttcatctttctaggattcagcgactgtaaaatgcagagggcagtagttaacttcctcacaaatcctaatcacgagaattaaatgagagacgaagtaaatcacttagcacagtggctagtacttcctaagggcttaaagggcagctattatttctgctttacttttataccactcctacaagcacaaaatttcttccattcctgtggaaccagcttgcaggcttaagatgaaaataatttgaggactaaagtatttttatttcgttattcctacagataaacaagggagacgtgggaagttggaataacttaccaaaccacccagggccagcaccttacacagtttagataaaaacgcaggtcagactccacggccttggatttaagcatacagcaccgtgctgcctcactaaggaagctggaagcatttagctcccttagttcagaagcccagcagggctaacgtatttatagcaaggaccctagggcccggaaaagctactggcacacagcaggaactccttaaacaaactagcgccagctgacccacatctaagtaaatgccctagcacatcttcctttcctataggaggaaagtagggaaaaaaaagtctagtaaatgttaatattgtttgtatcgtaatttttagtcaaacgaaggcactgaatccacatgcaagtttctcttagagagaaggtgaacgtttgcatttgaaggagtgatgcctggaagcgctatttccaaactcagagaatcctcccacaccaaaccctcgcagcaaggttccaagtctcctctctccacttccaggccccttgtacccgctcaacgcccaacctcaacgtccagcgcccaacgtctggcccccaacgaccgaagccccctcccttccccttcatgcaggccctctccctcccctatacgcctgggaaccctgacctggaaagaggcaagaggaccgcggatccgaacctgtctctgcggtctggcggtgatggcgactgccgatgctgggagccctgccgcctgggatgcgccctgcacttccctcgcctccaatccccagtgcgccctcctggcctcagcgcacgcctgcgcactccgcgtccacgtgcaactcaatgtgcccacgtgttccctccgccttccccggaagcagcttgtgctctagttacaggctcaaaaagttcctttgcagaaacttttattttgttctagcttcttctagaaagatgtctctggcaacgcctttggcaaatttgggcgcaaagatgcagactttgtctcctcgaaggtcacttgggtcaccgtggccacttaaaggtcttccaaggttttccaaataatcaacagcctctgcctggtcttggaaagtaaacacacacgtgctcatactttttttctttgcttcctgactgagggcatgtgattatacctgttggtgttacttaaagacaagctttttaagttttgtttttttttttttttgctatggaacttttctaacaatttcataagggaacccttgtgtgcctatcatctagtttctaccttatcaattcatggttaatcttgtctacatctgcagcccaggcactcttcgggcaatgttttgaagcaaatccgagaattgtaaatgtgagacaaagtagcgaacgtctgcttctggcccccagcatagtcctccctcactgtgaaaaagccacgtttgttcactgtgtttgtcagcatttcagaccccttgacttagtaacatctcagccctccagaagaatgccttgaagactgcggagagaactcaggttcccacctctcagagtcactgcatttttagaaaagatactttcagagatctaggccttgcctttttctgtacctaacggacaagattaatgatgatgcctagacttactctcgcacccaaactttgaaaatattttgatcttatatagcttctgggcacttttaatgtaacccctgggcagaacctctaccacctaatatttaaagtgtgctgacccactgctttggagtagtttaacagaaattctctgggctctccctggttgcagtcctcagtaagactctgaataaaactaacttcactaacttcaattctttaaaagcctgattttttttctttagttgatgtgtcttttaaatttattttttagagcagtttcagatttacagaatagtgaaatgaaagtgctgactgggcgtgggggctcatgcctgtaatcccagcactttgggaggccgaggcaggcagatcacttgaggtctggagttcgagaccagcctggccaacatggtgaaaccccgtctctacttaaaataaaaaaataaaaaaaaattagctgggtgtggtggcaggcgcctgtaatcccagctacttgggaaactaaggcaggagaatcgcctgcacccaggaggcggaggtttcaccgagccaagatcactgccactgcactccagcctgggcaacagagcaagactgtctcaaaaaaaaaaaaaaaaagaaaaagaaagaaagaaaagaaggtgctgtacagagttctgacagaagccacatcgtttcccctattattagcatggtctgttagcatgatacatttgttataattaaggaaccaaggaaccaacattgatacagtattaactaaagcccatctttttgatttccttcgtttttacctactgtcccttttctgatgcaagatctcatcaggatatcatattacatttagttttcatggatccttaggctcttcttggccatgggacttccttagactttgttttgatgaccttgatgtcaagtttccaggagtactctcaggccttttgtaggatgccctacttttggaatttgtctgatgtttttctgctggtaggaaaggagttacgggttattggaaggaagaccacagaggtaaaaatgccatttttattgcatcatatcaagcatacatcctatgaatatgattatgacaattgatgtaggatttggtcatctggctgtggtagtgtttgttgggtctttctactatattcttttttttcccttcccttttcatactata

SEQ ID NO: 914134 - DNA, 4001 bp, Homo sapiens
ctataagcacgatttctgagactctttcgcctgacttgttgggctctaaaatcacagaatattagagctggaggggatcttgaacatccacttgaaaagtgactgacctgagaccacacagctgatttctagttcaccaggatatactcaaagacatgatgtcttgttaatcatgctcatgactcttcccattaaatcactgaatccttgtgaggcctttagaaagaggagctggccctggaagctctttgctctcatgctctgagatggatagatgcacagccttctggcaggtagggcagtaggaatgctagatcttggtggggaggttgggagacctagcctcccttcctgattccatccctacaggctctgtggccctgaatgagtgactttattgggaagtctcagacttctcgtctgtcatatgatacttggtaagagggcgtctgtttcctaataattatcttatgatatcccatcctgggcacttcacaagactgcgttagaagttgtattatacattggtcactccctaaactgctcttccaaatgctctttgtcaccactttgaagtctcaggcagagaatggctcatccatccacccatccaatctaggaaggatggcggcttgtgagcacaggctcagaacttgaaggtgggaaatgtactttgttctactagaaggtagcttcactggctttggcaacaaattaggaggataagagtcaagccaaaagagttatctaaactaggcagaagagaatattttaaataacaccaacattccaggatatttgggaatcaggactgacctttaaaaggaaatgggtaaattctgaatcctttcaaggacagatggcagacatctcattcttgggtccagttgccttaccttaaacaactctgcactgtgtggcctggtcttacctcagactgggttccacaataggacttgtttttaggtgataaatctgggatcacaaattggtagtaacctccttcgtggaccccattgtaacacagccctccgagggccagctgatgaacttcccatccatagggacactcggggattttggtgatgatggttttgggatagcaaaacacaagaatgacatctggaaagagcacacatatagtttaaaatcagttagggtaatcatgctaacctacgtaacgaacagtggattccagctacacctgagcatgcaaaagcagttggttaaaaacaccttccctgctattcctcaccagctgtgacaaaagttttccccaaacttcagtcattgaagagtcactctcacagtttttgctgcatttatttaatgactgcaccacgtttaacatggaattaaaattagtccatttggaacaaggaatgtatctgtgaaaccacaggtaggatgtattagacatacataaatatatattaaaatctccataacaatgagcacataatttaaacattttaaatgtcaatttcatgcataatattgtgaaatactgatttagggcacaagatagaaattcagtagttgaatggaaaaaaaagtggagatgttttatatatatatataatgggatgtggggagagagtgtgtaagtaagagagtgaaatagagcaagcattctctaattaaaaaaaaagtccgagtttatccaatacatctttgctccatttgggaaaagtctgattggtattggagggggtgcttaagtactttcctgcttggctacatcattacatttttataacaagttaagcacagaagtgctgagcattgtaaaaggaaacttcaggaaacttttcgtcccaggaaaatggacttggcgaggacatacctgctttatttggagcacacgattttgcagaggcttctgcaaagatggccaacaagacaaaggccttcgtcaccattgcttctcagaacctggtctctgccaggtatccaaaccaagctggccaaatgtttacggtccttccagggcctgagcctcgatcattctaagtcagaaacatgaatgaaaagttaaaatcaagggaagaacaaagccgcacatacagtcttggggaaattttcaagggagataaacgatgttgtgtcgtttctaattgtttcctgttagcgctgagaggcaaaaagtggggctcataccgttggaagcgtcaatgacacatggagttgttcatgttcccgactgtttcatcctctccggactgtagaggctggctgctggatgctccccaaatctgctgccccagtcctagtttgactttatatagcccgaggatgtaaaagaaaccagctccagataagtcacaatgagcatgcattatccactgtgtggggaataaaaaggggggctagcacagtaatccgatgggaagctcagttacttgaatctaatttcttttgctttacagagttggaaaaacttttttttaactgcttcaaccaagattgggaggaaaagttgattttttccccttttgtacagaaaataactctgaatggaggcaaactatttctgtacaattccaggtgacagttttaattcttttgtcttgctttctttgctttatttcctgctttcttatttttgtatgtaggtaaactaaactttgataagaaaactcaggtttaacattgttgcacctgataactataaatatatgtgtgtgtgtgtgtgtgaacgtaaacattttaaaggattttccctctaattaaaaaacaataaataaactctagtgtcttgaacttcatcctgaagaacaacttttaattgtacacccttgagatttctaaagctttattagtctcccagagcaatgacattggaagaagaaacttagaaagtctctcttataattcaattcttagtcacccgacaagatcccactgaaaacaacagataacatgctactcccatgaaggttccagatatattattgataatgcacatcatttaatgtttcaaaacattgggaggtatcttataagcaacatgcataagtaatacagtacagtttccttatttcctcaaaacctattgttaaattgatgggatgttttataatgatggtatcaaagaatgaaggaaatagccatgtggcaagccattaaaaagttctgtaactcagtttccttctgtgtaaaatggtggctgtgattctgggctgaacttacagagtaggagagcaatgatgtaaaggctcttgtaaactgtaagtagtacataaataagtagattacatgaaaagacaactgacaatttccagtagcatgtatgtgtcccatgagttgcttttcctttctttacatgcaacacaaagtgactcattgtagatttatgattcacgtaacaggaggcatatctgtattgtatgacacgtatgcaaaatattttatggatgatgaacaaatgagctgagagggagaagagaaagaatatattaaaaaaattttttaaacagtaggatcaagtttattgtggcctggaaacattgccgtatttcttttttattattattatactttaagttgtggggtacatgtgcagaacgtgcaggtttgttacataggtatacacgtgccatggtggtttgctgcacccatcaacccatcatctacattaggtgtttctcctaatgctatccctcccctagccccccaccccccaacaggccctggtgtgtgatgttcccctccctgtgtccatgtgttctcattgttcaactcccacttatgagtgaaaacatgcagtgtttggttttctgttcttgtgttagtttgctgagaatgatggtttccagcgtcatccatgtccctgcaaaggacatgaactcatccttttttatggctgcatagtattccatggtgtatatgtgtcacattttctttatctgctctatcattgatgggcatttggattggttccaagtctttgctattgtgaacagtgacattggcatatttctactgttctccatagttca

SEQ ID NO: 914135 - DNA, 4001 bp, Homo sapiens
tgtacccctgcccctggtttaattgtagtcataaattcctagtgtgctccaaataactgttgcccttactggttaagaagcgccttttccatatttttcgtatcctgaggcctaattaaaccattgcttttattttactttatattgggggtggggacgccgagcacactcaggtccaggggagacctggggctgctgctatacagcgccgctcttccagtggcgcgcgcggctcaccccgccggcccagggctgtgtacctaatcctgttctcgctccaaggtcttgcagcacttttcaaacatttcttcaaaaagcagtcattactaggacatattgtgcagctcgtttagtgcccaggagtggaaccgggacggaggggaagaggcaccctaagagacgtatgcagaaaggttggttaatttgggagagggacgagttgggggcgcgggaaagactccgaggctgaagctttaagtgttcttttggaaacactttagtttttagtggatcagaaatgcccagcgtgggtttctcgttcacgtggaaagattaccagcgtcggccagtcccttccagaccacttcttgtagaatatatatatatatatattcaagagcctggggcgagagaggcggggaccggagcgggggagagggagggagggagggaagcacagagagagaggagagcattttttctctgggggcggtaggttgtgcggccgcctcctcgcccgagagcgaggaccaggcccctcacgtgctgcacgaccagccccagcacccagctccgcgcacctcccaccctcggggcccgctccgggatcccgccagacggggactgatgggatcgcaaggccagcgcgtccagcgacccagtggtgctcataaatgagtttcttaaatgccattttgacagaacacactctactccctcttcccttcttccctgatccttacaactcccagccaactcctagcaagactgcaccactgcctccactccaaacgtttcatccctggagctgccgtcccaaaactctcggggagacaggcgccaaagcgtttccctaccaacctgtctctcatatatatatggggggagggagaaaacttgtttagggggtacgcttgagcacgggacagcccggactccccactcacaacttgcacagactctagcctctcctcaccccgaggcgccccgacctccaactccccaaaggggccagggaaccaaccgctggtatattcagccatctcccccacgccacacttgccctcccccagccccgcttccaccgcagcccggggtcagagccccaggcgcccccgctgcccccaacccggcgctgtggcggggcctccggagcgggtggccgatacctccggccgggggcattgtttatctccggcaacaaaagcgtcccgagcgtcccggggtggggggtcgaggcggggaacgagcccacccctgaggcagcgggagagccaaggacgcagagccccggccacatccagcccgcgccgagcgccgcctcccggacccccctcgggcctcggcgtcggagtcctcgctccccgcacccctgccctctgccccggccccaactcaccgctggccgggtcacattcccagggcagcgcacggcccccagctccaagcctgcaccagccctcgggcaaactttccaactcgcgccggtccccacaactttggagcccggggccccggcgggcgcgaggggcgcgggcgggtcgcggaggacgcctaccggctcccagcacagtcaaggcccgagcccccgaggtgaggagtcggttcccaaaggtccacagtggagaggcaggtagggctgcatgacttgggcgaggcagaggggtgtcccggggggcagacccgggagtagaggggccagcggctgcgcgcacaaagcggcgccggagcagactgcgcggccactccccgccaggtcagccccccggagcagcagtgtctccccaggacagacctcagggagtgaagctggggctctgccttcgctggaccctgcacagttgagcgagagacaaaacgcgagctggatttacccaaactggagctggaatccctcctcgactccctctcgaccccctccccctccccctcgttctccacctctctcaacttctctgtctccgaagaagacgtagagaggtgtcaagattttgtcattaacttttttcccaggggagctctagaaaaagtttttaggatctctaaattgcatgtttataaatgtatgaagaaggtgccaggtcagagatgacaccattgagcaatgtctaggtcgccagcaacggaaaaccgccctcaacaccaaagagagaaaccagatgagggctgtgttccctgactctgggctggatgtctgcaaagttcatcataatatttctgttagttatttggccctggacctcagtggtggtcgtattcactttatgaatgaagaaatgaaagggcaggaagagctaagttttccgaattaggaggaataaccagtggcattacgccagaattaagactgactagggcatctgaatttttctctaaatgtttgatagctattgcttcttccagcagtcatgacacagacaagggaatccaggattttaatggggtcaccgtggtaaggaaaatgctgttcatggaatcttcattccttccaggtcaaacttcaagtgaagagaaaggattcagtccctcattgcatttcacaccattctacccccattctgcacttagattttattcgtatacacataagtataaccgggctgttctgggaaagattcctaaacttttaaccttcctcactgattgattcatacaaatgtattcttgcactacaatgtaggcatacaaggatgaataaaatttgcctcctacacagaaggaacagagattccaggctggcagagcaaactgatgactgcactcgtgttttcaatggcacaatcaaagtaccttggctgaataaaatcagaaatgtggcatttgaaataaatttttttttgagatggagtttcgctcttgttgcccaggctggagtgcaatggcatgatatcggcttactgcaacctctgctcctgggttcaagcgattctcctgcctcagcctcctgagtagttcggcttacaggtgtgcgccaccacacccagctatgttattattattattattattattttggaagagatggggtttcaccttgttggtcaggctggcctcgaactcctgacctcaggtgatctgcctgccttggcctcccaaagtgctgggattacacgcgtgagccaccacaccaggcctgaaataaatcttatatgacccgttgatggtataggggttagcatagctgccttccgtgaaataaatcttatggacaaaaattgacccttctgagccaatgcttcaaaaggttacttgttaaaatcttgttagaaacattctacctagataaaaagaaaggaatgcagggagagtttgacttataaaacttgattttcaaggctgggcacacacctgtaatcctaacactttgagaggctggggcaggaggactgtttgagcccaggagtttcaggttgcagtgagctttggtaaagccactgcactccagcctgagtgacagggcaagatactgtcttaaaaaaaatcctgactttcaggtgggcataatagtgcgcaccatcccagctactcgggagactgaggcaagaggattacttgagcccaagagtttgaggccatcctgggcaaccacagcaagacccatctccctgcccccaaaaaaaggaaaaggaaaaatccaacataatctaattttcatgaagaacaaaaggaaaaggactatcataaaatagaaatatcctggcttttgtcaattaactggattaactttaaaatgtattgaaataggaaaatcatacaactatatagaatgatgtccatggtaa

SEQ ID NO: 914136 - DNA, 4001 bp, Homo sapiens
cttatttccctgcctgagttgtggattcactgtttggagctggagtcatcccacactaaggatggcaaaacagaatgctgaaaagggagctgctgatgactcccttgagcagctgtactagcctgggatggccaacttctaggtttcattgttacttaagaaatataaatccctatttggttaagacactgtagtcactttagtcagccttctataaaattcaggctaacaattgtaactgatacataggtaatagctagagggaaagctacttaatctgagcaacttacatttttcttttcatgggaacttagctttatggagttgacattatctctcattttactttggctgccagggaactcagagtcaaatgtggtgcccaaatatctaccatataatcctggaaatatacctaatattatgtctatgttatatgtgttctcagactcagcctcttctctttctaaagtatttataaaactagttataactttctatttgatttatactgtattattttattgtgtacattttccatgctttaaatttttgtggaatgaaacaaggtatacatttgtgtgtatacacgtatatgtacacatacatacaaagtgtatatatgttaagtggtttctatgtgctcactcattgtactgagcacttgttaatgagtcgtgaatcccccaccatggtcttctacccttggtacattatgctcccattttacagacaaagaaactgagacttagaaagactaagctgcttagccaaggttgtatccaagtgggtagatcagttttttaaagccttcagacccaaatttgctgaagtgttttctgtttttctttgaaacaaattaaaattttaacaattttttacctgttgctaccctaaaagaagtcgacgtcaggtttttctctgattatgtttctcattgcgagtctactgctgtgatttccccttaacattctttttgtgaatgaattgtagaaatcagaaatgggaaaggcttgaggcttgtcggccatgaaatatacatgttgaagagcaaaggagagaagtgcttggccgacaaggctaagacctcacacttaggagtgacccaaatgtttcctgaagatggtagaagagtgaaaaatcccacaggctctgtaagtgacatcagaagagcaagagttgggggagagcgtgaagctggaaagggaaagttttcaagtgatgaagatgagtaaatgatgcattcctggactcttctcatttcataggccggaggggctaaaggaattggattgggagccaacaagaatttgtttagaggtttctagtataatataattacttcaacacatatgtattgagtgccttctatgctccagatcctgttctaggcactggggatacatcagtgaataaaatagacaaaaatcccagctccatggagcttatattctagcaaggggagaaaaataacatagataagagaataagttctgtagtatgttagaaaatagatgttaaggaagaaagaaaaagtagagcaggaatgactgcttagtggacattcacgaggttccagtgtgctgagcattttacatgcattatttcattcaatctttgcaagagtgttagaggattcccatgtcacagatgaagaaactgaggttgagtaaagtgaagtgatttgtcaaaggtcatgcttcagtaatagtagaagcaggattggaactcctcagactgttgaccacacccacgtggcatgagaaaggcaccaggggccaccatcttccttacccatctcccatccttgtctgaaggtgggttgaagcgtcgccctttggtcattctctccaggaagctgaatgtggctgagattggctccctcacctctccataagctctacatgtctgggaagctgcttcctaaacttcataagctctacacgtctgggaagctcctcctcctccttgttcctgatctttacttctcagcctcttccaggaggggaaggtgcgggtgcccattgttgtcatggaatgggaactcacccatcacaatgggcaaaggagtcttctaaaccctcggaggattcttgccactggttccttgcagctgtgactccccagggtaagaggcaaagagccaccaggtcccagctgaggaagccctgtggtcagctcagacaggtaaggacaagatgatttgggggtaatggcaaacattttgtaccctctcaatttttgaaccaataatgtttgagttgcatgtccccctggcaactgtatgttccaacctgttagttttcagagaagtaagttgagtcccaggctgggggtgaccttgtctgcatcagtggcactgctgcacccaggacccacgctgcctaccatctccttctgtggcagcctctgtgtctcagctcggacccaacctcaggactcactcacagccactcttacctgcctggcacagcattgagaccatgaggaagtaacactcatgaataattattatatgccaagtgctgtgctaaactaaacattcacctgtttttattttttctccacgacaaccttcaacatttacaaataggaaacaagggacatacagcaatggatgggatgccacaagtcccagcaaggtcatgggccagctccagagctcatgagccttgccaagggccacctggcatccccagggctgcaaaggctgctcgtgaaatctggcgtttctctcggggcctggacacacacgtcctgcctcccttctactcagtaaggtgttttctgcttttctttctttctttttttttttaatgttgtgtcttgccaattctcttggctactccgtgtgaatacgagagtaaacacatgcaggacaacctgtccagctgctctctcactcagaaattgtgtcctccaccctttcctcctccagtcaccctcctaggttttccaaggagagttgctgtagtagtgatagaggaccttatccactgccagcactgaagggccagaggtggcccttagatgtgacaccggagatgcacaggtcctcttgcactatgatgccaaaagccacatggtaaggagaggaggaaaaggtggtgggccacctcttttggtgttgcagagctgctgtaccaggcaatactgttgtgtgtggagtaaacccttccaggatttctgctacctgctgacaaacccagtgcaacagacactatttttcacctttaccaggcattgcccactgctctccaaagcccaggtgtaaagaaatactcccagcagcagcagtgcaagggagttctgtcgtctcacagccttgccaagacgcactatattgattacgaacaaatttgactgggacaggaaacccgaactaacaggggcttaaacatgatagacatttattctctctgcgtagtgaagtccagagggaagtagtccaggctcgatatggtggctctgctgttcaggattctcagagatgaggctccctcccacctaccaccactcaccagctccagggggcagctgtcatcacttggccccagatggcatctgcgttccaggcagcagaatgcagaaagggaagtagaggggaaagggcgtgtccccatggatcatattgggccaaccccagttggctcagctgcttcctcctaaggaagtttcctggcagctgccatacaacacttcctctcgtgggccaggacttcaaccacatagtcaggcctcactgtaaagggagctgcaaagtaggcattgtcctggtgggatgattgcccagccgaaagtttaattaccatggaagagacagagaagcaaaatcaaaggacagcctgaaggttctgccaccccagcgggtgttctcttatctttaatttgatcatttaattccccaaattctaacaagaataagcctaacttcattccaattagcctggccagggcagggggagggtgcagaagacgatgcacagtgctgtctacttctc

SEQ ID NO: 914137 - DNA, 4001 bp, Homo sapiens
ctacaggcactgcgcccccatgcccacctcatttttgtatttttggtagagacaggatttccatgtttcccaggctgttctcgaactcctgggctcaagcaatccacccatctcgacctcccgaagtgctgggattacaggtgtgaaccacctcacccagcctgatgtgagcattttttattctcgccgagaggctttctagagagtcaacaaacatcctacctggaaatgttttttttttaggaacccaagacaagaaaggatttatcctttacaacccaccatccccttggcaaggtcgaggtctgaatcaaagaaccagagtggctctgaactcctatgatgaaaaggtttatcctttcttatcttgaaagctcttgaaattagcagtaaattgcatagaactttacagttctacagaacttacagtttatggatgcttccacagaagttgcaactttattaacaattccctgagccagaaaaaggaggagctaggcaagagaaaataattcatcagtggtcctctagaccaaaggcaacaaggccccaaattcagcttttttatcctcttcctagggtgctttctacactatacgttatttttaaaataccatttactagttctcatttatatttaaagcatttccatttggtataaaatagaacttcctattttacagacatcaaatgattgttcctgcagtcactgaatgctttagcactgcaattcaacattggtatttaactgcttaatggcatttttattacatgagaaaagggtatatgccccaaaactccttacctgggttctgagctttaaatatgggtagttgttctttagaaaatcgaaggtaagaacttacaggtttctttggacaacttgccaagacagatgaaaaccacctcggtaaatacacaaaactacatataaacaaaaagaaaataaccagtgtcagatgtttaactgtcaatattcacatgtatatgaacacagatcccaaataagaaatgtcatcaagatactatgtatccaacgccttcaacaagaatgctagagacttattaaaaccctgtcctaaacggaggggagcgtctgcaggactgaagtctcaaagcccttacctcctaggaagggcagggagtgaaggaaagcgtctatactccagctcctgggccccgcctcctcaatgcctagatgatggccggagactcggcgcgaattcgcagaggaggcggaaaggatccaaagctggacagtgaggagggatgggagaagcgagtggagggtagcaagaaggtacggcgtattaagagagtaaataaaggcctggtctcaaggccaccgtccccttggcaaggtcgcggtctgaatcaaagaaccagggtgactctgaactcctaggaggggcagaaagtgaaggatagggtctacattccaaccccgggacgtcctgggccctgctgcccctagggcacaggcaagcgggcctacctgaagggggagcgcagtcgacttccacagccggtgcacagctctgctccagaccttcccagggcactcagcacgccccacatgcttcggagaaacgccatcgctccggtggatgaggcagtgacccgaccccaatctcggagagcctcctggcaatacacaactccagcaatcacaactggaacccgcgtgcgaccctccggcgtgtgttatcatgcccgccactagcgaggcactatgggaaatctgctaacatccggtcggtagatgggggcggggcggggcggaattggcgcaggcgcgggagagcgtaccccggtgggcggccttgcgggggaggaataagagccgcggagatgaagggaaaccgcaatcctctagcctgcggagggctctggcttcgaggcggcgctgttgagccacctctgtccccggccgcccggagcagtgggttcctctgccgggccaggagggtgatggagggaccgcggcggcggcctcaccccaacccggcgttggccggtgtccgcccgtgacggtcacaagggctgtacgtaacagacagtcctgcatccaggaccccgaggtccgatcggcggctgctgcgcgcccagcggagcgtctcagttcaagccagggctggagctcggagttcagaaatagtaacgggagaggcggggattcgcaaacctaaaaatgcagattccaaggccttaccgcagagcttaattccgtgtgtctatgtggggcccattaatcttcattttagcgagttccccagaatttaacaagttctaatgtcggtggtcttgagaccacatttaaagcaatatagctttagactgtttattctaccatctactgcagtctttcagtctggcctccagcttgcttaatttgagcagaggaaactggctagttgtccacagtcgctagtctcaattcttctagttccagtattaacattaacgtcttgacttgggaatattgcattccctcgttaagattcagtttccccctctgcaaacgaggatgttagactaaatcagttttcccagccaaagccctgagaacgtgtgacaagtatgccttgagacattgatgtgtcaaaaattgctgtataatttttttatttgtgttatagaaataccattttctgtataggcaatggcatgaaaaagattaggaagacctaaagatacctaagggtccttccagcccttaaataccagttgtttcagagctaaccaccttctgagacagcctttcttctgttggatagccgtaattgttagaaaattcttaccagtgtcatattgagctgacagtctatttacctttctgtaactatgaaaacattggctctctggaagtaggactaagcctacttcttcttttaagcggtaataaccacttcccttttatagactcccagggttgaaagggaccttccaagtcatctgttcaaacctcccattctggcatggaataaacaggtttttttcctgagtatatactatgtacaacgccctaaacatagataaaagacacagtgttgtgccccagcccaccccccgcccccagccccaaaggtgaggcaaagtagcaaataattacaacatggggctcagacagaagttacatttaagttgatttctaaaataatttgtttccctttttgttctagaatgtttttgttctttcaaatgtttgacataaacttcttttggatattaaactttttgttgttttcgactttcatttgtataaatcttgctgtaaagaccttaaaaatcaaatccataacatttttcatcagataccaatcttccttaaaactcatttacattgcagtgataattttacttctaaaagcagaatttacaaagaaacataactttatccactaaaactgtcttttaacaaaaagacatggtatataattactttataaaacatgaagacttactgcagcctttcccagggtccctttgttgtaaagttctctagtcccatgacttcagctattagttatagcctcatgactgccatattgaacccagtcctctcctttgagttccgtatccacataaccactgtcttctgtacattttcaccatcatgtcccacaagtacttcaatttcaacattccctgaacaaaatccactatctttcacccatcttgaagtccttctcttggtaagatgcacatgttttcctctttaatcatctgagccaataacttgataaatcattttagaatctccccattgacactccacctgccattaaccaactgatgatgagtattgctgattctgcctcattcatccctctagtatgtatttccttctctctagtcccattgctgttgcttttgttcaggccagtaatatgctggtaaatagctctccaaaaaagaaagccccaatttgtggtgtttgctgagttctatggtgtaaatactcccaccattggcagatttcatgctactgacaaattttt

SEQ ID NO: 914138 - DNA, 4001 bp, Homo sapiens
gctaaatctggcccaccatcattttcataaatcaagtttctttgaagcacaacttcagtcattcatgtgctcacatatttgttcagtaccgtctttggctgcttttgagctacaatggcaaaactgagtagttgcaacataaccacttggcctaaaaaggcctgaaatatttactgtctacccctttatagacagtttgttcatccctgtaggtatataccagttaattccctgtggacatgcggtggacacaggcatttttttgaagtgtcatttcaagagcattataaaaactagaaataattttgcttaaacacactttcaaaaggcaaggagaattgcagatcaaatgtctaagaaaaaagaaaagtttttttccaaatgatttaacaacctgctcatggctgtaaactaactataccacagtgaggtcttgcacaaattgtttagcattttttaaagcataataaatatacagacatcagtgaaattattttatttcagtaaccccagaacatcaaggctaccaaaggccagttggtgctaactgcagaaatcatgttttgcccttacttgctatttcaggaactgattaacacaaatagtctcaaggtgttccttctaattagaaaattcataagctttagccagtgactatccacttggctaatggcgttatcattccatgagtccttggttcgaatcttcgtacatacaggaggtttcccgccaaattttttctctatacttgctaaacagaaatcccaaacataaaatactcaagggcgaaaagaaaggggcaaagtgatatagatttggatctagatctaaatatagatctacagatccatctatctaaaatgttttggaagacaatctgatgtgaagaaatctggagaattttccctaagcgtctgggacaaaaattaaaatcaactgtatacaaaaaaaaaaaaaagaaaaacttaacgtattcttatgtagtgaaattcagtaagagcccaaagtaaggacctacacattcagtaaagcctttttatacaggaactaaaaggttcaccaggccattgtgttgttttaatcactccgccagccaaccaggcagtgagaaacccagactcaagtgtgttttctctcctctccgggaagctttatttccttcgggcagagtggcctctgtaccggtggttcagaggcatccatcttcctccccaaatcctattaccaaaatgtcttttaaacactcgggtaaaagcgtctaaatgactttcctacggcaggcccatgtgcatagatttacgggtgaccaggtggaacaaaaaggaataaaaccgcttctcagaagacaattttccaacaagggacaccaaaaactggacaaaaacgtaaaggcccacttaaaaggcttctcctcttagtttaggctgctcatttacaaagagcaggtccactggttcctggagaacgacctagaggaagagtcccgacccggggaagagcaggcgcagagccgacccggaggaccgcccaaggggcggtcccgggagcaggggcgggagggcgagcgcagcaggcggaggaggccgcgggccccgtgcgcgcactcacacacgtggcgggcagggctgcgcggcgttccgaggagcctcgaccagaagcagcaggaaaaatgcgcgcagagttgagatgaccagcgagtagcggaaaggggaagggacggtacggggaaaggcatgcgatgggagcgggctggcttctagttttccttcctttctcctccaataactcaccaaggaaatctcactgagaagacgggggaaatgaaaggaaatgggggagcagtgtccacgagccgctaaagcctccacaggagacggagcaccgtacctgcagctagctccccggtcccgcccccgcgcagtggactctgcgcctgtgcctgcggcggccagcgtgcctccgctccacgcccttccccgagcggcctcgcgcagggcacgtgactctcctttctcactgtagcctatccgagcactccgatctcctcaggctcctcccctccctcgtctccctggcggcgctggccttgcgtcctcgtggtctcagccgctcgctccgcccacaccgcgattggggcctgctcacaaaaaccttattgggtgacgcctgcgcaccagctgcgctttgccgtctctactaggatttttcttttttccccagatacacagaaatagaaaagagcacagtttttaaggggacatcattttcaccccgttaactttcaaaggcacgtaaaaacagtggcttccaaatgagcttctctagcagaaggcgctgcagaaagagggaagaggggagacctagtttgcggtgctgcctgccacttcctcgttgcctagtaacggtttccacggcaaccgcacagtcaacgacgcttagcaatccggagagaaatagggtgttttcttcccgagagaggactgctaagagggggttaaagggggacgatgtgaaggagagaacctgtggtccttcagaaggcgaagaagaaagaaaggggaagcagtgaagaaagggacggagatactgggacagggagaaaaaagttgtggagagtagcttttaaggagtcatttggtggccatggatccaacgtgctcttctgagtgcatttataacctcatacccagtgacttgaaggagcctccccagcctcctaggtatgtggataagcaaagactatcacttgaaacaagaatggggaatactcagtattaattaagcatacatatactggaatttttaataataaataaaatgtatttttgcctcgatgaagtagccttggaggataacttgttagagaaaaggtcgaaatatctaggtattcagcatctcacagttttacagagagggcagtctggcgctgtgagatgaccattttattatattacacttaacctcttattaatacggtatgtgattattgtgtaatttaattatatgtgatatacagcatagtatgaagtttcatgttgaaaagaaaaaaatcacaattctattatcttgtttaaggatacttgatgtttggtttcaggagttcggtgttgtatttctaactgcactactccctctctaatgggataggataggacttttcccccaagatttttatgaaatataaatttacatttgcttttgagcctcaggtttttgatcagtgaaacgaaatatctaccactattaggcagtttctaaggactttttcagatctaatggtttaaatggaaggaagaattggtggatagataatgaaccaaaaaatatgtaattgagttgaaattttacataggtcttagaacctcttaaattctccaaatctcaaaaacgtgcaaaggaagcacttcagttactcccatctgtagggacttcttagaacttacttaaatctgtggggagcaaagaaagtagtggagaaaatctcatttctcctaggacttgaaatgtttcctgtcttttaccatcatccttgtccgtatgcaagtcaaaaccacatttgaaaaggactggactaaaaatcgggcctagcaattaattgtctttgtgaactttagaataaagtttcatttgtttactgatctgtgagataaatgtaccagataatatccaaggccccttttagatctaatggtcaattatttttactagtattagggtaatagcttcaacaagtaggcagcttcttcaattttaagtatctggtttaaattagagcagtaactgtattacatctccattagcatatcaacatctagagactggaaagaggaatgtaaagtaagttatggcacagttgcagaatttattttcaaattttctattgttgcaccaacttttggtttcaaattcctgcatattacatgagataaaactcctctataacagattggtagattgtatttctatagaatattgaatttgagagttattttattaggtag

SEQ ID NO: 914139 - DNA, 4001 bp, Homo sapiens
gaagcattggatgtgcttcagtaggcctcagattctcaaaacgggacggatacttcagtgagacgttagagaacacatttattcctgtacaaggccacaccaaaaaaatctctatcaatactgaacatctatcttctttactgagcatcctttctttggtaggagtgaagagatgtgaagctagtcaaacttctcgagtgcccctccaccttcatctattccctaaaaagcaatttccccatcagagagcagagccaagtggactatgatcctatcaataccaggagaggcaagagaaacaaagcagcgatctgactccttggtactcaaggtaggagtgctagacctggagaggccgggaaattagggtgcccaatttaaacatttaattaaaaagtattcagacttaaaaaaaaaaaaaaagatgcagagaaaaggagtgccacactattcagaaaggaatgcaaatgctgagtcatcactcttcattggaaaggaaggaaaccagaattaagtggttggaagatggaattcattcattagattgagcttcaggtaaaaagcaacagcaagacaggagaaaaagcgttcagaagacacacatcaaatagcggatgaagacataattttagccaactctgaagctttcgacgcacaaacagattaggaagaggcaacacctagagagcaaaaggagtttaacaactggttgtcagtttagcgtagggagcgctcaaagtaaacttctttatccaagaagggaaagatgctcgggcagcaaaaggtatcccttatgtacttcaaaagtagcgggcgctaggcgggtgtttctgacagcgtgggcgggggcacgtggggcataaagagagaaggggcttgagtggtgaaagagtgtcctgcttcctccgagagcttagctggggagaagagctgggagcgactcgagctgaggacgtggaaggggtgagtgctaattcctcagggcccgcggggcccacccccgggcccacccccaatcctacccccgccaggcccttcccccgtgggcgccggcagctccaggcccagcccagggcgtccaacgcggagggggtgcaggagttctcctgggcctgacagcctcagccgtgcagaaacccggcctagggagggcatgcaaagaaggacgccagagaaaaaggtcgagacaagccccagaccccaggaagtgactgtttgggggaagggaggatttccttcccaaggaaaaggggacagatgaggaatgcacttcgcgtccacgccgccctggtcagggagccgcctagagtcccggcttcggcccagtctctcctgctccctcccttagcgtcccgcggtgcccgggcctcttggcgcctggcacccctcgtctcgggtactcacagagtccggggctgcccgtcgtcttccatcatggtgggtgcgacggagcgatcccgggacaagggggagggcagggttggggaggggagggggtggggaggaaggggaggggggctctgggcaccggctggggacagaggaaaaggcaccgaaccctgctctcgggctctctccccccagcccgctccggacactgcgctccaaccaggaggagcaggaggaggaggaggatgaacaaaatggccgccgccaccagccaggcaggaaacagggcagagcgcaggcgcgacccgccaggtcaccgctcaggccagccgcgacagcctgcaagggggacgaccgaggggagagaaaaaagggccgccgaggaaaccctgggacccgctcacgacggatcacgtcgtcgctgtgggcctctggccggccgaagcccagccagctccgggagagatcgggcaaaaagagaaacgtcgtgaagccgaagtctctgggaattgtggtcctggaaatgagagagggaagcacttctgcagaggacttctggaacctgtggttaagaggagccgccggcgcccacccgcgctgggacgtgaagaggagacttctgggtagtgtagtcatacgtgaggacgtgcgacgaccaggaagtcggcgggctgggaggtaaagggaagaataaaagcgacattgaaaggcggggagaccaagtggggaaaagcgctgtctgggaaagcgaactacaagtcccagagttcctcgcgccgggggctgtcctcggactgctccaggcattgtaaggctcttctgttggcccagtctgagctgctgctccgccttcgtccagcccgagagcggtttcttcaactgtggctcaggcagcactctccctccgcgtggtgtccgagccagcagggccgtccggccctcctgtgttcatcagaacggctggctcgcgttagtcaaccgccgcttcgcgcgacagtcagaagagaggctgtgctggcggggacccggaggggttggggtgttttggggactcgatttcccacaaataggtatttctagcctatttgttaaatacaagtaggtggcctgcttgtaaattgctttacaagtttcagaggtttccctatcaaatgtctcatcggatagtggggtaagaagaggagccctattataatgacttgcccaactccccccgtattcttggagttaaaagaaaaaaaaatccttgggcagagacgtgcacaaacataaagttgcgtttacagacatcagtcatgtgggctagaaacgcagttttgcatgaagataggggaagccatgttcatactagctctgcatccctgtagaatttgtcttctcaccccccacaacagttcctggtgtgcttttttcctcctctaagtaccttcaggagaaagtacttggtcttgtagcttagtgaagagtggcgatgaagaaagatctttcagcccattgccagaacttaactgccccggttagtaatggcttaagagttgcttctgccgacatgtactaagtgcatgtcgacctctgcaagtggcggtgcgtatgcgtgccactgaacattaatcttgaaagcagaatcaaccatgcagcaagcccttatgttgtccattttcaggggaggaaatttcaacctgaaagacttcatagagacacggcaaaggagttgagccccataagagtccgtaggaacaacaaaaggctcagacgccaggacccatggctaaaatgtatgggctggggatgcgggcgggagcggggggaagggaactaaagctagagaggaccttgtagaaccgtgttgtcaagaatctatttcatgctgaggaatttgagctttctcttccaggcagtgaggagccactcaaaggttttgtctatgtttttaattggacctaggtgtagaactggatttaattataatccaattcattaacccatgcctggcccgctgtgatagtttcctgttgatgctgtaacaaattactgcaaatttagatacttaaaacaacacgaatttattttcttacaattctggaagtcagaagtccaaaatcagttacactgggctaaaatcaaggtgtcggcagggctggttccttgccttttccagcttctagaggctgcctgcattccttggctcttggccccatcctccatcttcaagaaaagaagcatagtatcttctttcttctctgcctctgtacgtacatcgtgattctcctgccaccccttttcatttacgagaaccttttgtgattactttgggcgaagattatctcaagattcttaatcacatctgcaaagtcccttttagcataacattcccaaattctgggaattaggacatagaaatctttggtggaccattattcagtttaccgcacccacctttattactttagttttgattatagccacaaacccaccacactaaaaagttataatgacacgagtttatatctgtatctatgctatacctcctacacacaataacacacacccctgccttcgcttggggtaaccatctttctgaatcctgtctttactatttattgctttccttc

SEQ ID NO: 914140 - DNA, 4001 bp, Homo sapiens
aatttgttttgtttcaggacatttgcactagctattttcctggatacttgcctcccaagcatttgtactgtatttgggtcacagctcaaatgtcaactcccttgagatgttttccctaaccggctctaaaatggcatcctgcttccatcacaatctcaagactctgctttattccctttacagcacttatcactaacggcaatgttttaatttatgtttgttggtttacctcagtattatgtaagctctgtgagcgcaagagtcctcttttcaaaaaaaaacaaaaaaaacccccacaaaaaccactatagtcctgcccccagaaaagtagctagcacactgtaaaagctcagtaaatggtgttcattccctggtcccccaatttaccttcaaatcttaatcaaattaatttaacaatattgtcacattaaggaagtgtatatgccctttgtgctctgaaactcagagatactaagattaatatgaaactgtgttctaaacaggtaaagtagtagctcaggcctaggaatcccagcattttgggaggccgagacaggaggatggcctgagttcgagagtttgagaccagcttggacaacacagggagaccccatctccacaataagtcaaaaaaaaaaaaaaattagccaggcgtggtggtacgtacctagagtcccagctacttaggaggcttagaggggaggattgtttgagctcaggagtgcgaggcttcagtgaactataatcatgccaccgcaccccaatatgggtgacagaacgaggtcctgactctaaaaacaaacaaacaaaaaaacgaaacaaaacaccatgtgttgtagattcagttttttgacaaaggtgacaccagggaaatgaaaggtcttttatatttttttgcactacagtctgaacatatttcgttgttgttgttccttagtataaaatacctagagaaatattacaaggattctctaaaaagaaagtactttcgtaaaggctttatccacgaccaactgcctatctttaggtccaagttgtatttatctagttgaacaaccacagttacaaagtaccaaagttctggaaaacattttcacaagaccgaggagaggcaaaggcaagatatttatgcctctgtataccttgatgttgcctatttccgtttctataattcttacctggcttctttcttcatgtctatatatcacctttaaagttcagcttacttcctagctcctaaagaaggtttcctagcctgtcccaagtcatttatttctcacttacaaacaatattactgaatattctgccctgacggctacttggaggctcagaatatgtcgctgtgtactaaaaagttaactacgggcttgctatttggaatacatttactcccaaagctcggctctactcttaatcaagggtcaatcacacggcccaccacacacaaaacgtaggaggcttggatataaacctaagaaaacatgcatcatctcgcgagtccaggtcaatcacggacagcttccccaggagatccgtggcccttttttaggcctttctatcttgaaagagcagccatgcagatacactaaccccaccactggtacttaagcttgtaaatgccagcaaggaaaaaaaaaacaacaacataaaacatgggacgcgcaacttagtgtagacgcaaaaaccagtcagaaataatcgcaagctaggccccatacttacgcgggacgccagccaaatccgcgtgcgagtaacctgctccgccggctccgaaaaagccggccaatccccctgtggttttgttgccgcttcccccgcctccttccatggtatcgcagcaaaccgagtggttcccgccgctgcctcaagcctgggtggtccgctgggccgttactcctcaataacagcgggtaaccccgcgttgccagcgcctacttcacacgctgaccttccgggcgccggttcccgttaagcgccacacttccgctttgcggcaatgtgcgccccggaagctggaagcgcctgacggcagctttccggtggtgggaaagtgaacgaatcccgaatcaaagcggcgcattgaggcaggtggggtgccagtggaagagagaaagcaggcgagtgtttacggcctgacttgggaggccggcggatcagcaattgcagaagcaggcagcggcagagagggaatggtgcaggcaggcgctgagaaggacgcgcagtccatctctctcaggttagtgaaatgaggctctccgcccggggccggcccggggacagtgcgctgctggtcccagcatgaatgcgggccccggctgtgaaccctgcaccaagcgaccccgctggggcgccgctacaacttcgccggctgcttcggacgcccggagctttccgagcaggcagaggcgcgtcctcgaccccaaggacgctcacgtgcagttcagggtcccaccgtcctcgccagcctgcgtcccagggcaggcgggacagcacagaggcagcgccacctcgcttggtacgtgggaaaataaaaatctttgtccttcgcctcggcccgaaccttctggtctcagggactccagtcactcctttctggtcttgtgtgcatcatcactctgaggtccacttgctgagctaccaaagccactagtgggtgaatggggccgcatttttcccagtgcgattgatgtgagaaactctgatgagcagtcactcacagggcggaaaatggcaggagactccaccacctgtttgcttcttcaggtttgattgagaaattgccttagtcgtcaaggagatctaattgtgtatgtaaaacagtagggcgcttcagcctctagataggaagaaaacaacttcacttgtgcagattctgggtcccagggtgcagagctattagtctaagctggcattgtacccgtccctggtatacagtgttgaatgagagaaacttggcctctgccttcataccttaaaatctatctggagagatagacgatagcaaaagttaatataataaaaggtaatggatgttctgatagatgaaagacagattgttttacctaactgaatttatggaatcgaaaatagtcctccagaagatgagatgcttattctgaggactgtagaatgagtaggagttagatgaagaggaagtaagaagtgtttcaggagtgcaatggaggccgggcgcggtggttttgcctgtaatccctgcgctttggaaggccggggcgggtggatcacctgaggtcaggagctcaagaccagccttaccaatatggtgaaaccccgtctctgctaaaaacacaaaaaattagcctagcgtggtggcgggcaactgtaatcccagctactccggaggctgaggcaggtgaggcaggagaatcactggcatccgggaggcggaggttgcagtgagccgagagggcaccattgcactccagcctgggcaacaagagcgaaactccgcctcaaacaaaacaaaacaaaacaaaacaaaaacaggagtgcaattgatatatagagtgaacgcaagagagtgtgagagatgaggctgcagggtggtacagaaaagtcagatcaaattggatatgtagacattgctaaggattttgaactctaagggcattgataagctactcaagggtttttagtaggggagtgacttgattagacttatttatttgttgaaaagtctgtgtggctggtgtgtggaaaataaagaatggattgaaaaggaactcaagtggagcatcaagactcagttaaggagttaatctaggttggaaataattgtagcttaggcctggatgctggcaatagggaaggggatggattcatgaaagaatgggatacttgagaagaaatatttctgtgctggagaagtagattggggagttcatggcataaacattataatggatgctatgggcatagataacataaacatgtagagaaagtaaaggtgacctagggcagaagccttaggaacaccaaa

SEQ ID NO: 914141 - DNA, 4001 bp, Homo sapiens
aaatttgttttgtttcaggacatttgcactagctattttcctggatacttgcctcccaagcatttgtactgtatttgggtcacagctcaaatgtcaactcccttgagatgttttccctaatccgctctaaaatggcatcctgcttccatcacaatctcatgactctgctttattccctttacagcacttatcactaaaggcaatgttttaatttatgtttgttggtttacctcagtattatgtaagctctgtgagcgcaagggtcctcttttcaaaaaaaaaaaaaaaaaaaaaaacccacaaaaaccactatagtcctgcccccagaaaagtagctagcacactgtaaaagctcagtaaatggtgttcattccctggtcccccaatttaccttcaaatcttaatcaaattaatttaacaatattgtcacattaaggaagtgtatatgccctttgtgctctgaaactcagaaatactaagattaatatgaaactgtgttctaaacaggtaaagtagtagctcaggcctaggaatcccagcattttgggaggccgagacaggaggatggcctgagttcgagagtttgagaccagcttggacaacacagggagaccccatctccacaataagtcaaaaaaaaaattttaaaaattagccaggtgtggtggtacgtacctagattcccagctacttaggaggcttagaggggaggattgtttgagctcaggagtgccaggcttcagtgaactataatcatgccaccgcaccccaacatgggtgacagaacgaggtcctgactctaaaaacaaacaaaaaaaaaacgaaacaaaacaccatgtgttgtagattcagttttttgacaaaggtgacaccagggaaatgaaaggtcttttatatttttttgcactagagtcagtctgaacatatttcgttgttgttgttccttagtataaaatacctagagaaatattacaaggattctctaaaaagaaagtactttcgtaaaggctttatccacgaccaactgcctatctttaggtccaagttctatttatctagttgaacaaccacagttacaaagtaccaaagttctggaaaacatattcacaagaccgaggagaggcaaaggcaagatatttatgcctctgtataccttgatgttgcctatttcctttcctataattcttacctggcttctttcttcatgtctatatatcacctttaaagttcagcttacttcctagctcctaaagaaggtttcctagcctgtcccaagtcatatttatttctcacttacatgcaatattactgaatattctgcccttacggctacttggaggctcagaatatgtcactgtgtactaaaaagttaactacgggcttgctatttggaatacatttactcccaaagctgggctctactcttaagggtcaatcacacggcccaccacacacaaaacgtacgaggcttggatataaacctaagaaaacatgcatcatctcgcgagtccaggtcaatcacggacagcttccccaggagatccgtggcccttttttaggcctttctatcttgaaagagcagccatgcagatacactaaccccaccactggtacttaagcttgtaaacgccagcaaggaaaaaaaaaccaacaacataaaacatgggacgcgcaactttagtgtaaacgcaagaaccagtcagaaataatcgcaagctaggccccatacttacgcgggacgccagccaaatccgcgtgcgagtaacctgcttcgccggctccgaaaaagccggccaatacccctgtggttttgtcgccgcttcccccgcctccttccatggtatcgcagcaaaccgagtggttcccgccgctgcctcaagcctgggtggtccgctgggccgttactcctcaataacagcgggtaaccccgcgttgccagcgcctacttcacacgctgacattccgggcgccggttcccgttaagcgccacacttccgctttgcggcagtgtgcgccccggaagccggaagcgcctgacggcagctttccggtggtgggaaagtgaacgaatcccgaatcaaagcggcgcattgaggcaggtggggtgccagtggaagagggaaggcaggcgagtgtttacggcctgacttgggaggccggcggatcagcaattgcagaagcaggcagcggcagagagggaatggtgcaggcaggcgctgagaaggaggcgcagtccatctctctcagggttagtgaatgaggctctccgcccgggccggcccggggacagtgcgctgctggtcccagcatgaatgcgggccccggctgtgaaccctgcaccaagcgaccccgctggggcgccgctacaacttcgccggctgcttcggacgcccggagctttcccagcaggcagaggcgcgtcctcgaccccaaggacgctcacgtgcagttcagggtcccaccgtcctcgccagcctgcgtcccagggcgggcgggacagcacagaggcagcgccacctcgcttggtacgtgggaaaataaaaatctttgtccttcgcctcggcccgaaccttctggtctcagtctgaggacccaggggctccagtcactcctttctggtcttgtgtgcatcgtcactcttgaggtccacttgctgagctaccaaagccactagtgggtgaatggggccgcatttttcccagtgcgattgatgtgagaaactctgatgagcagtcactcacagggcggaaaatggcaggagactccaccacctgtttgcttcttcaggtttgattgagaaattgccttagtcgtcaaggagatctaattgtgtatgtaaaacagtagggcgcttcagcctctagataggaagaaaacaacttcacttgttcagattctgggtcccagggtgcagagctattagtttaagctggcattgtacccgtccctggtatacagtgttgaacgagagaaacttggcctctgccttcataccttaaaatctatctggagagatagacgatagcaaaagttaatataataaaaggtaatggatgttctgatagatgaatgacagattgttttacctaactgaatttatggaatcgaaaatagtcctccagaagatgagatgcttattctgaggactgtagaatgagtaggagttagatgaagaggaagtaagaagtgtttcaggagtgcaaccgaggccgggcgcggtggttttgcctgtaatccctgagctttgggaggctggggcgggtggatcacctgaggtcaggagctcaagaccagccttaccaatatggtgaaaccccgtctctgctaaaaatacaaaaaattagcctagcgtggtggcgggcaactgtaatcccagctactcgggaggctgaggcaggtgaggcaggagaatcgctggcatccgggaggcggaggttgcagtgagccgagagggcaccattgcactccagcctgggcaacaagagcgaaactccgcctcaaacaaaacaaaacaaaacaaaacaaaaacaggagtgcaattgatatatagagtgaacgcaagagagtgtgagagatgaggctgcagggtggtacagaaaagtcagatcaaattggatatgtagacattgctaaggattttgaactctaagggcattgataagctactcaagggtttttagtaggggagtgacttgattagacttatttatttgttgaaaagtctgtgtggctggtgtgtggaaaataaagaatggattgaaaaggaactcaagtggagcatcaagactcagttaaggagttaatctaggttggaaataattgtagcttaggcctggatgctggcaatagggaaggggatggattcatgaaagaatgggatacttgagaagaaatatttctgtgctggagaagtagattggggagttcgtggcataaacattataatggatgctatgggcatagataacataaacatgtagagaaagtaaaggtgacctagg

SEQ ID NO: 914142 - DNA, 4001 bp, Homo sapiens
gccattccaatagtgctctggagcctcttctccctggccttgaattaggtcccataaggaactcatggtacctgggccaggcatgctacctgctgaggttttctccagttgtccaggaaccaactcctctgcccaccttcctaactcagaagccccaagagatacagcagtaggtagatattctgcaggaaacttcccttactaagaccaggcccctcaagactagtttgatctcaaaccttcacaagattctcaagtctcacaaactcctcctgcctcctagtaacctggtcttccccagactttacccagttctgaccctcccaacccccagcctagacccgagccactgcagtgatagaaacaataaaaaataacgacaatgccatcatttcacttgcagagaattttcccacaaatcacctgagtcctcctataattactgccaccaatttagagatgagtaacctggaactgatagaggtttccagggcgtgaaggggcaaccactggcccacaggccccgcagagacctggccggccacagccccgggaaggagcacctgcctcgccgagggtggaggtcgcgctcttccctccccattcttctctgccgaccgccaagtgaaacggggccccacaaagccggagataaacaccactactcgcgggacactggccatgggccaggagcgtctgtgcgagcctctgagcccagcatctccctgggagcgtgagcgtgagcacccctctgtccgtgctggaactgccccacactcatcagcttgctggaacatgcgcttggcccttcggaggctaacgcttcaacgactccagctcggaagccgctcccctcaggactcacgagccgatcagtggccccgaggaagcgggagctgcagcgcccgggcggcgattgcgcccgaaaggcccgtacgtcctggggcgccgcttcctggagggattagagcacctgccggcttccatctccgcccgcccagagcgaccctcaggccggtaccgctacagggaagtttccggctattcgagtcttgctcattctccctcggcgacccctttccttttgcccgctgtgacgcttttctttttaaaatctcccaagagtaaccacagatcttgggaaactttgcgcgaaacttaaaaatgctgtgaaatcggagccaggaactccatctgagcctcggagcgccgcgcccagtccagctcttctgctccggcccggagcgtctggcggtggccagtgctgcccactcgctgtcaggcggccctggcacccaccccggcccctgggcgccctctcggcctctggcacccgctctgattcgctttgggaacgcgccagctgtcgccccccggtgcgcaccgcaaacctggggccgggacatcccagcctcggagtggtttttaagcaattcctcggaggcattgtcttccgggggagccggggatctcaggggaggggaggggagacccgccccatagacggtagtgcaggcttgcccaccacctcatttgcatttcaaaggcaaacttctgcgggacttccccagcggcggcacctaccggctttgcaagggtcgtggtaatgctccagctgctgctccgtgccctcctcgccgtccagctctgagtagtctgcggtggcgtccgggcgctccccgagtcccccggcgccgcgaggcagcggcagcagcagcagcagtgacaccagggccccaagtgcagtcgcccggggcatggtggcgcggggccggctggggcagagggagttgcgtgcacgaaagctcagctcggccgaaagacggcgcacactgggtcggtcggctccggccgggactcggtggttacacagggctgctgggcatggctcaggcgcggagcaagcggagcgcggcgccccctgtcttcgtcgaggcaaccgggaagcagccgctcggagctacttgcccggcggccgaggctgcggcggctgcgagtgtggcggtggcggcggtggttggagcagtggccgctccgcccctctccaccagggctggaccacacagccttcgcccggggccctaagcagccaatcactcgggcgcccgaggcgaggcccctcctcttcccggcaccttcgcaacttcggaggcaggcgagcgaggtgaagatgctggagccaaaggccggggccagctccgcacccacccagcctaaggcgcctgcccggggcgccacctcggcctctggctcccgagaatgctgctcctgaagatcgggactgggcttctcgccttgttttatttccataactcactttacaactccccgatgcacacgtggccagagtggttagaactcggagcgctggaccaggagccctgtgtacggattcatgtcactaccaactggctatgtgcattcgggcagctgcttctttgcagggatgagtgaatgtctctcaggtccctctcagcaaagaaaaaaaaatcgaggatttcgattctctcagctctctccacattccctagtcgagccatgaagggcgcttgctggcggcaactaacctaacctagtggccggcgataggtaatgaaaaaagatttaagtccacagatttcccctctcggtgaccctatctttcagtaaaaccgtctaagatgcttcacacagtcaaaaagacacaaatgaacagctgtacgtgctacttgtgttaaattacagacatgtttttattaaataagccactcaccgttaacttgatggaataaaaatgaccaatttctgaagtctgttttttttttgccaattaaaaacatatgcccaaataatgacactaatcaagagctatttgaaacccacttctattttgtacctaaaatgtaaaaattctcagaactgagccattttgatttagagatataaaaagtattattactgtgaggcttttcaaagatctttttatgcaagtaaaatggccctgtcaactataacacacaaatgtgtatgtgtagaaatgttttgcatcatgcccagtagaatcttttttcaatttaaactgcaagcagaaaaatggacaactttccttttggatttccacatggtttcacatacatcaatgacaaaatagtcaacagggagcccagagctgggcttcacatcaaactctgaatttcttgcacttatggtcatctgtcttctcatctatcaactgggataacaagtccttcacacaagtaaagggctaaaagttaactattggaaggatgctactcatattttgtcctcgttcttagaaagaaatgcaatgttgaccctgcctcatgctgttttcatcaaatgggcacataacatacagaatggagccagacagggcaagatctggttagaaactggcaggtggaaggaaggaatttgaagaggataaatgccaccaaatggcaggaaggccaagtggccagcgcataggcaaaggagtgggagggggttgaatggcatgcatttctgcctgaaagccaggagtcaaacccaacgccatagctctctgcattcacccccatgaaggtcatcacctctcagtagacgagtccaaagagtcaacatctaaaaggcctaacaaacttctgtgacacttccaggtctccagatggcactaggcaaaccaccaactggcttccttattagaagggaattcctctggaaaatagacatgagaggccacctcttgtgcaagcaatgaggttgtgagcttttatgacctctaatgcccagctggtgagtagtggccaggtcttctcaccaacaccctttgtccaaatattttgaagacagtggtgttgaagaatgaacaagctgcacagttttatgttattaaagtagaaggccagtttagttgctactttggctatcaaccaataaatggcaacaaaatatttggttcactagaaagatcagaaaagaataattgaaaagggacaccataagatagaactataaaagct

SEQ ID NO: 914143 - DNA, 4001 bp, Homo sapiens
tgcagaagcagtttccctggctgtgctgctgcctggaacagaagcaggaagccaggggtgctttggaatctcctggcccagtatctagctctcagcagcttctcccaagtagttatgtaaaccccccttccactgttgggcccttgaaccgggggacccccaggaggccccatctctgccagcagcagccagtgcctcctgcctcctctctctaagatcggctggctaacctgggctcaatttgtggctgcttcccagcccggacggaaggatcgtggtctaggatccagggaaccctaaggggagcagaaagtgagaacgggggaagggatccacgccagagggagagttgagtgcccagagtggaaacgggagcagagggagccagggccagcagaggaaggcgggagcgggcagcagagaaggcggcagcggccaccacttagtacccaatgtcccgggagtagtcttcccgccaccgatcaccagcctaccggtgcattgttcgtgcccaagataacagggctgggcccggggtaggacacccagccgggagagaacgaaaatgaaaagctagctgtcctgggcggctaagccccgctgccatcctcccagatgaagcctgctctccggaaaaaaaaaaaaaggccactggttctgctgatttaccggggctcagagcccccactggccccgcagcaccacgggcaccggagctaggggcgcgaagtgcatgtgtgtaggggactggaggtgggggaacctgttcttttcttgtgtctgatcctggggctcgcttcctgggtcctagaacagcagccaggacggaagaaactgttcacgttgcacccctttctctaagattcccaggccaagagtagctgcagaaggtggtcctgaatctatggcctccttctctctgcctgacccggctagtggatccggagaggggaccagggagagctcctccgagcaggggtccttcgggagacagagaggggtccaggctgagagaactcttcaagcatggcgagtctgcgttatagaatcgggcgggcggctcaacttgggggaagcaccaagaagagctgggcgacctggagcgcagaaccggctttggggagccacccggcggggcaggggtagcacggagcccgggccgcggccaggcggggagcgcgcgggccggactcacctgtgaacctgtcctttgtgtatctgcggttactctccatccaggggaaggtgaggccagtgaggttgttgacgcccggcatggcaggcacagagggcacggtgggcaagccggtggccaggggctgggggtgggccacggctccggcgagcggcctgtgtgccggcacccggattacccccgcagcgctgagtgccccggcaccgccgctgctgccgccgccgccgccaggaccggggccgcctgccaaggccatgttcacgttgtaggagccggtcagaggacccatgctgcaggcgccgccgccgcctgccgggcctccggggccgccgggacctccagtaccataggcccccgctcctccagcccccgtcgcggccgcggagcccccgccgccgtaagtgtaggcgcctccgaccaagcagccaaggccgtattctccgtcctggaggcgcgaggcgggtcccatgcagccaccctggtccgggctgttgaggatctggtcgatgccgaagctaatgggctctgcgtgacccgggtggaggtggtgcggacccaggtgctccatgctggccctggccccaccggggggcccgggcggcggcgctcgctgcgctcggctcggggggcagctagcaggggctgggaggcaacagcggctcctggctgcgcggagacttggaagcgaagtgcgcagaaaggctaaagtagaagggggaggggagggagagagggggcgccgtattcttcccctctctggcttctgcttccccgctccggctgctcgctcgctgttgactctgggacatcaatcaccaggcgaaaaagcccggtgcaagagagcttcgcggtttcgactgggtctctccattggctgtgcgcggagaggagcggggtgaatgacagcgcgagggaggggaggggagggggagaggaaggccagaagccgagacagatgcaggagccagagatagagggacggagaccaagactcggagtagttcatgaagagagagaagaggggaacaaggcgaggcttaaaaggaaaagggaaaacaggaagcgaccattcccagagacggacagacagacaaacccaaggagggtgaagtcaactgtcttcccggcctgttgggagccctcccctcactttgaactgggccaaaggagtccagcccacaaggcgtctgaggaagggatgtctctgcccaactggagaatctcctcaagggctcagctgcgaaacacctgtcactcaaccaggagatttactccaaatttcaagtccagctttttagaaagtagaagactgtctactccccaggtatggagcccaggccctgaggcaggacggtgagttcaggcttgcccttctttaaaacacaggcctatgaacaactggctatatgttataaaaatcagcaaccaccccccaactcagccttcttagacaaattcaggaagggaacatatcctgaaaggcaggcacaagtcaagagggttggtttggggtctgctgccagggtgcccatgcctcaacatacccctttggttttaaataaacagatgcgtcaagaagtaaaatcctacagggttcgaaagaggcaattcctacagtgtttgaatgaattcaaccagattgcattccacctaacaattaccccagggttggctattccagacaagaagcctttggactgtggtgtgtgttcttttcttacgtttggaatcttgggagggagccataggggcttaaggccgtgggggctgggattggtgggactaggatcagggaagtgcatccaggacaaatttaggcctttccaacgttttgccagtggctgtctggctgagagcccaagagaaaaggaggaaactccctttttcttcttcctgtctttcccctctccagtagaaaatgtttgctaccttttagaagccaagctttgggaaaggcacaggttccatcacttgggatctatttctgttctatttcagttcagtttcagattagacttttgggtaggccctgtctctatctggaaagatgctaggatgtgaagactcacattctctcccatcaagtcttattgcaatctatttgctttgggcatgtctgtcacctccacttgaagagatcttcttggaggcagagagtggcttattcatttctgttctctcctgaagaatacagccccaaacaacaaaatatggtcatcttgggtgaataacaaagaatgtatctctttattcaataatatttattgagtactgtactcactatgtgtcaggcactgttctaggcatgggggacatagcagtgaacaaaacaaaggtcctgacctcatgaagcttacattctatagagggggtcagacaataagcaaagaagcaaatacaacaagacagatgttagtattatggagaacaatataaactctacaccaatccttcgagatgagtattctccctattttacagatgtgaggaaagtacatttcagaatagctatgattggtgtggatcaatatggaggagctagactcaacttgcttttgtgggttagcctggaaacctacgtgctggttggaagtttgtatctgtggggaaaaccttgtctgagctctagccaggtggacaaaggcccactcaagacaaagccaaatgtgaaattggtagttgtttgtaaacactaagcagaaggctgggcatggtggctcacacctgtaatcccagcactttgggaggccaaggcgggcagatcacgaggtcaggagattgagaccatcctggctaacacggtgaa

SEQ ID NO: 914144 - DNA, 4001 bp, Homo sapiens
tgcccaggctggagtgcagtggcgcgatctcagcttactgcaagctctgcctcctgggttcacgccattctcctgcctcagcttcctgagtagctgggactacaggtgcccaccaccacgcctggctaattttttgtacttttggtagagacggggtttcaccgtgttagccaggatggtctcaatctcctgacctcgtgatctgcccgccttggcctcccaaagtgctgggattacaggtgtgagccaccatgcccagccttctgcttagtgtttacaaacaactaccaatttcacatttggctttgtcttgagtgggcctttgtccacctggctagagctcagacaaggttttccccacagatacaaacttccaaccagcacgtaggtttccaggctaacccacaaaagcaagttgagtctagctcctccatattgatccacaccaatcatagctattctgaaatgtactttcctcacatctgtaaaatagggagaatactcatctcgaaggattggtgtagagtttatattgttctccataatactaacatctgtcttgttgtatttgcttctttgcttattgtctgaccccctctatagaatgtaagcttcatgaggtcaggacctttgttttgttcactgctatgtcccccatgcctagaacagtgcctgacacatagtgagtacagtactcaataaatattattgaataaagagatacattctttgttattcacccaagatgaccatattttgttgtttggggctgtattcttcaggagagaacagaaatgaataagccactctctgcctccaagaagatctcttcaagtggaggtgacagacatgcccaaagcaaatagattgcaataagacttgatgggagagaatgtgagtcttcacatcctagcatctttccagatagagacagggcctacccaaaagtctaatctgaaactgaactgaaatagaacagaaatagatcccaagtgatggaacctgtgcctttcccaaagcttggcttctaaaaggtagcaaacattttctactggagaggggaaagacaggaagaagaaaaagggagtttcctccttttctcttgggctctcagccagacagccactggcaaaacgttggaaaggcctaaatttgtcctggatgcacttccctgatcctagtcccaccaatcccagcccccacggccttaagcccctatggctccctcccaagattccaaacgtaagaaaagaacacacaccacagtccaaaggcttcttgtctggaatagccaaccctggggtaattgttaggtggaatgcaatctggttgaattcattcaaacactgtaggaattgcctctttcgaaccctgtaggattttacttcttgacgcatctgtttatttaaaaccaaaggggtatgttgaggcatgggcaccctggcagcagaccccaaaccaaccctcttgacttgtgcctgcctttcaggatatgttcccttcctgaatttgtctaagaaggctgagttggggggtggttgctgatttttataacatatagccagttgttcataggcctgtgttttaaagaagggcaagcctgaactcaccgtcctgcctcagggcctgggctccatacctggggagtagacagtcttctactttctaaaaagctggacttgaaatttggagtaaatctcctggttgagtgacaggtgtttcgcagctgagcccttgaggagattctccagttgggcagagacatcccttcctcagacgccttgtgggctggactcctttggcccagttcaaagtgaggggagggctcccaacaggccgggaagacagttgacttcaccctccttgggtttgtctgtctgtccgtctctgggaatggtcgcttcctgttttcccttttccttttaagcctcgccttgttcccctcttctctctcttcatgaactactccgagtcttggtctccgtccctctatctctggctcctgcatctgtctcggcttctggccttcctctccccctcccctcccctccctcgcgctgtcattcaccccgctcctctccgcgcacagccaatggagagacccagtcgaaaccgcgaagctctcttgcaccgggctttttcgcctggtgattgatgtcccagagtcaacagcgagcgagcagccggagcggggaagcagaagccagagaggggaagaatacggcgccccctctctccctcccctcccccttctactttagcctttctgcgcacttcgcttccaagtctccgcgcagccaggagccgctgttgcctcccagcccctgctagctgccccccgagccgagcgcagcgagcgccgccgcccgggccccccggtggggccagggccagcatggagcacctgggtccgcaccacctccacccgggtcacgcagagcccattagcttcggcatcgaccagatcctcaacagcccggaccagggtggctgcatgggacccgcctcgcgcctccaggacggagaatacggccttggctgcttggtcggaggcgcctacacttacggcggcgggggctccgcggccgcgacgggggctggaggagcgggggcctatggtactggaggtcccggcggccccggaggcccggcaggcggcggcggcgcctgcagcatgggtcctctgaccggctcctacaacgtgaacatggccttggcaggcggccccggtcctggcggcggcggcggcagcagcggcggtgccggggcactcagcgctgcgggggtaatccgggtgccggcacacaggccgctcgccggagccgtggcccacccccagcccctggccaccggcttgcccaccgtgccctctgtgcctgccatgccgggcgtcaacaacctcactggcctcaccttcccctggatggagagtaaccgcagatacacaaaggacaggttcacaggtgagtccggcccgcgcgctccccgcctggccgcggcccgggctccgtgctacccctgccccgccgggtggctccccaaagccggttctgcgctccaggtcgcccagctcttcttggtgcttcccccaagttgagccgcccgcccgattctataacgcagactcgccatgcttgaagagttctctcagcctggacccctctctgtctcccgaaggacccctgctcggaggagctctccctggtcccctctccggatccactagccgggtcaggcagagagaaggaggccatagattcaggaccaccttctgcagctactcttggcctgggaatcttagagaaaggggtgcaacgtgaacagtttcttccgtcctggctgctgttctaggacccaggaagcgagccccaggatcagacacaagaaaagaacaggttcccccacctccagtcccctacacacatgcacttcgcgcccctagctccggtgcccgtggtgctgcggggccagtgggggctctgagccccggtaaatcagcagaaccagtggcctttttttttttttccggagagcaggcttcatctgggaggatggcagcggggcttagccgcccaggacagctagcttttcattttcgttctctcccggctgggtgtcctaccccgggcccagccctgttatcttgggcacgaacaatgcaccggtaggctggtgatcggtggcgggaagactactcccgggacattgggtactaagtggtggccgctgccgccttctctgctgcccgctcccgccttcctctgctggccctggctccctctgctcccgtttccactctgggcactcaactctccctctggcgtggatcccttcccccgttctcactttctgctccccttagggttccctggatcctagaccacgatccttccgtccgggctgggaagcagccacaaattgagcccaggttagccagccgatcttagagagaggaggcaggaggcactggctgctgctggcagagatggggcctcctgggg

SEQ ID NO: 914145 - DNA, 4001 bp, Homo sapiens
aaattattctaaagcctttatatacacccaatttgtaaaattttaatggtttccctaatcacagcagtgtaagtcacaagattacaagattaaaaagtagaatacagtacacttttgagcttatatgcctgtatcacggaactacacattgagagttctgagtttcatatggtaacttttcctaagtgtttttttaattggaaatatattagtaataatatcattaaacagaaggatggatgcccactgaaaatttaaaaatactcaaagacccaaatctatacatggtccctgtatactatgtgaaacaatagcagttcttaaactttgagacagcttatctgatgaaagaacacaaaaggaaatcgttttaagctgtttaacctcccaacaaaattatcttaggtgaaacaccacaagtacagtacaaaaacatgtcaccaattcgagatttgtgtctctaaagaaatacatacctacacaggtaagaagtttctggctgtgaccgaaggtagaacagtcaaaagtttagagcttttattagctaaaataagatcccagctagccaaggatccagcgaaaagttttgttgattacaaataaaatcggatccattaaataggtaaggacgactgcttcatttcctcacttaccagaaatgacataagactccctcagatcgttctgatttagtacaaacacagtctctcatagaaactcctatcattaatggtaaaggtataaaaaacaattactcgtcaagcaaactctcaatttacctgaccttcctgccttgctcaagtctaccactctgaaaaccacagttacagccctaagtgaaagccatttgaagagtcgttcacatgcacgttttgatgtgagaataccaattaaacaaactgccaatcacctttaggccaaatgcaaaagggactgtttctggccctgacctgaagactgggaaacgtcaagaccctttactgtcagaagctgccttagttagagactatcgggatgggggtctcacttaggggctggaaggtgaggagaaagttacaagaaaggcctaggaattgaacgcgtgtaggttgggtgcacttacaagtaagtataaactgctcttcaattcaagtttattaatgctgccccaccccagggttttaatccggtctgggcagaagcgggcgataaaagccaaaggagaccataaagtgtaggatatttcctggttagtggctgccgggtaatcacgatgcatccatcttcctcggcgtcgcagccctcagtagccagaaggcagtctccttccctggggggcaaaagccccgagcccagcctgcccgttgccccgctcccgcggtggatgaacctcaacccttcccaggctccttcctggccccagggtcccaggaaccccgagaccctggggtgcggcgccactgaggcccagaccgggggaaggagaccctgtcactcgggagcggagccctgtcccgggagcgcacggaaatgcctcctccacgctcccaaggttcctgctccgccaggcccaaccggaaggagtcctcgggccgcagtggggcaccaccgggccgccgggcactccaggctgcgtggggcctgcctcagtgggcaactggggagctagcccggggcggccgcgccggccggggcgcctcaccgtgtgttcgtgctcgtccgcccgggtccggggcagcagcagcagcagcagccacagcgcggcggccgccgccacgccaagagcgccaggcagcggcctcatcctccgcgcccctccggcccggagccggctcaccgactcctcctcccgccgccgcctcctccgccgccgccgcctccgccgcggccgattcgcatccacggggcgcggacagacgcacggggcccggcccagccgctgcctcctctgccgccgccgtcgccgtcaccgcccgctcctgagcctcccccgccccccgcgcctcctcagcctcttcctctgactcagccacgtcatccggccaccccggcacgcgccggaagtgcctcgcgacgcggggccgccaccgccgccgggccgagggagggcccggcaaccgccgcctgcgcgccggctgcccctcggctcctgggagccgcggcgctacgggcctgccgagcactcgggcgggcgccgagcaggctgggccccggcgcagtggcctagcctggaccgcaaggccgaagccgcctccgggccgcgtcccggtgtttcgggttgtgtaaccttggccaaaatgcttaagcttttttcctggctgccaaatggggccgatcgtctgacctgctgcctccggaacttgagggatcagatcaaataaccctttcctggcgctcgtctgccgctgtgaatgaatcacgggctcctgtaatcaccgttaggagagattgttaaactcgtacagggttggatgttttaaagttactgaatatttactggacccctactgttcaatcaagacatgctaagttagcttgccattcttgttcatttatgtgtttacttaactatttctgggtctcctcttcccagtcataaatatctcttggagtgtaagctcctcggagcagagatcctgtttccgtatttcctgtacctagaacagtgccagatccgtagtagacactgaaacaaaaaatctttaaaaaaaaaaaaatatacgaatgtggcaccaccatttacacaggccactaagccaaaaatctcgaacttgtcagattgtctcttctcagccatcagcagtcaacaagttctagcatttggtctcttaaaagtggttcaagagtttatttttcctctccttcctctgccagtaccaaccagtcttccgtatcactatgtattgcaagagtctcacaagaagatatccatcactgactgatcttcctcccgtttaacatccccaacaggtgccagggtgatgttttttttattctaaaaagaaaccagattatatcgctcactcccttgcttaaaacagttcttcaatgttaggtaaataaatcatggagtcaccacgagggcgttcatctgccaggcactattctgaacgatattggctcattaaattctcacagaaaccctatgcagcaggtacggtgaaaatgttcctgttacagatgaggtaactgaagcacagagagcttgagtggcttgctgaaacaccagacccactcagtctggctccataataggtctttttgctggtaatgatttaccaactatacagccactttaaaaaaaggaaataggtaagtactggcatggaatgataaccaagaggttctgttaaattttcaagttgaagaaaataagagtttaacttcattttatatggcaatatgttagtctgcccatagaaaacaatctgaaagattataacaaactactatcagtggttaactttctactttgtacatgcctataaatgtttggttattttttacagtgagcatgtgctaactatgtaatcagaaaaaaagttccctgctaaaggataaagtccaaatttttgcctattttatccctaatttatttccctaactttaccttccaccaatttctatgctctgcattcacccgtatatatttttacacctctgtgcctttgctctttatactccctttatctggcatgctctgcttcaccttgtgccttagatattatcctttcagacctagctgatgatcacctcctcagtgaaaccttgcatgatcccttgagaaatggagcattccttctttgggatttcaatagcatttggcgtgttgtgttgtaattatctattcacatttcctcttctacactgcattcggacctttttgattgcagggactatgatttgtttgtctttatatctgtcccagctgctgagatagtgcttgtcacatcataggtattcaactctttgctgaatgaatgaagacattaacaagtgaaaagtcaaatagcatagcaaga

SEQ ID NO: 914146 - DNA, 4001 bp, Homo sapiens
gaatcacgaggtcaggagatcgagatcatcctggctaacacgatgaaacctcctctctactaaaaatacaaaaattagccaggcgtggtggcgggcacgcctgtagtaccagcttactcgggaggctgaggcagaatagcgtgaacccgggaggaggagcttgcagtgagccgaaatcgcgccactgcactccagcctggaggacagagtgagactccgtctcttaaaaaaaaaaaaaaaaaaagcagggctgggttagtcccgcccttgatccctgccctttgcctccaccaggctccctcagcttgctcagtcaatccctgctgggtcgattggcccctaaaaggtcaatatcaacaacatcctcagccctagggaacagcagcagcagtcataggaaaactgtcatcttcagaccccactgtgcccctcctagctctgtgttctgcttaactgtgggagtcagagagaaggggcagcctgggaggcttgatgtgcctctctgagtaagacactaaagcaaggcagcaggtacaaagaagaatagtgatcataacagaggaacatttattaagctttcgccgggtgcacagcactgtgctaagagacacagaaacaatctgggaagagagctcagagcagcgcgggagaaaggggccacatcaggaagggttttgtaaaccttgtgcaagattctatgctgaggacaacaggtggggcgctgggggtggggaagtgacagatctgtttggaagaagccctctagcaggtgtcaaaactcttccccttcaccctaccaggcccctggtaggtaaagactagaaagggatggaagcagcaacatctccctgatttctgaaccaacctatggtgggtgggggaggttgatgaatttagtggcggaaaccaagaatgccgaactgggcccctggagtgagaggtatcagactgtacaagagacattagtgcagaggtaaaagctaagaagaggcataatttggagtcaggagccctgggtcaggtgtgaacattatctttaacttactatctgagtctattcctacatctgtgaagcagagaaaacaattccattctctgcctatcctcaggaataccaaatgaacaaatgaacatgaaaggtataatatgtgcccttttctcaacaggcagctgacccctgaattgtctgctgtgtttcctgtttcactctcggggtcttgtcttcctgcccagtctccccacagcagggtctagcaccagggttggggggtgggggcccatcctcctcctccggctggaaatgagctttcaacttgttgagatggggaccttctccctctccctcccccacaggtcccagaagaggcgacagcttcacctcaggaccacccacccctcccaagccactgaggagtttgggatcagcccaggagctcttcactcaatagctggtgctgaaacacgtgtagggctgctccccaccgcctgcacgttaaaatcacctgaggagctgtgcaataataccgaggcccaggcctcacccagaacagttaaatcggaatctcttcgggcgggcccagcatcggtgtttttcaaagctccccaagtgccaccagggttaaatgcctttatgctaatggcacggatcccgacctgaccagtgcatccctcgatcccagaccaccagggagctatttgacccactgcatccctttcctccagacccccggagagcctttctgcgaggattccacccttgcccccttgaaccccgcttcttccgcccggaccacacaactctcccaatccacaatatgatcaccccaaagacccccgcagatagcccccatgactcccagagcgcaaagcattcccctccccctcgggtctgtcgtttgtgccagatcggccccagcccagcccgctcctgcccgcgagccccggccgctggccagcgtctcaccgcaatcgtagccggcgaagcctaatcccacggctggcgggagccaggtgcgagccaatgcgcctgcgcgcacttctagggcttccccagcctctccctccgcccccgcccagcgattggctccgcgcggcccccgggcgcagctccggcaggtgactgcgcctgaggctgccgccgccatgtttgtcacgggcgcttgcccttagcgaccaaaattaaaagcggacactggcaaatagggtcaggttgcctggattcctgaccggctcaacccctctcctttacctccacgatagcttaatgtcatttcagttgaaaccaacacgttttttctaagcgctcaccttccttccctccttgcctagtactcgttgggagaacaaagagaggtcagcatcctccattgagtcttgtggtctgagcggatgcacagctgcagccgacttggaggtgtcagcggctcgatctgggactccctgatgctgcatcatgagcccttcaagggtggacaggtccaggttgagctgtgggcaccagggctctagccacaggagccagggctgaaggtgggaaacagccaccagggcctgaatgagcaaccatgcagcacaacctctttgtattaataacggcaataataaaacctaaggagtactgagtgcttgctatgtgcaccgtactacattcagaacaacacgtgcattctcttgttgagtcctcacatcattcctaggaggtaggcgcttttatccacattttatatgtgaagaaactgcatttcagagagattcaatgacacgcaaacagcaagggcccagtcgaggtggaacccgctatcctgactcccataacaagagtctttcctcttcccacacctgcacaatccctcaaaatcaagttttgtttggctcaatgtaggctgtggaggatgttttatgttttctcccaattggcctgtaagcctggataggtttttgggcaagcaaacagcacacattccagctctgcctggttcccctaccttgggacacagggcaaaaagcctgtggcctttgccttatgggggacttggaactcaacccctagctccaacacttctttgctaagggacttctttattattattttttgaaacagggtcttgctctgttgctcaggctagagtgcagtggtggcatgatctcagctcactgtaacctccacctccctggctcagatgatcctctcaccttagcctcccaagttgctgggaccaccacctcactccaccatgcctggctaatttctagaattatttgtagagatggagtctcactatgttacccaggctggtcttgaactcctgggctcaagggaccctcccgcttcagcctcccaaagtgctggaatgataagcgtgagtcactgcacctggctgggaccctccttttgtgagtctgttttatgctttacagggatttttcagacattaaatgagaaacaagggtgtaggagctttgtgaactgctcatccttatgaccttcattgatggttgtcggctaacttcctgcaacaggaatgttgtcctcctcctaacaaccacagcaaatggtccaatgtagacgcctagtgtccaggggctacagattattcaaccagttcctgaggagcccccagggatgccatgaaccttgcccccagaatccatctcccactaacctgtctcatttccctccttcccaatctctctctttcggacacccttcacacttcccatgtcaccccaagccacacatacacgcacacacatacatacaaccatctctcttctagacttagacaactgctgaaactcctcctgatccagaaagcctcatgagtagaagacaggtgatcattttgtccctctcctcacctcttacctccatctgtgctttcctggctgtgagaacagaaaacccagcattcagcctggggtccggcacactgggatctccatacatttgctaaaggagtctccccgcctttctatctgtggccagcatgtgcttttatttc

SEQ ID NO: 914147 - DNA, 4001 bp, Homo sapiens
gtaagcctgcaaaatgcaatgtaaataattaaaaatagacattactttcagttttacgcaaaattaaaattctacattaccatcttctgattatgagttgtgtaagctcactccgataagtttatgtaatttagtgtccaggagaattaagtccaacatttactacttagaatagcatgaactggcacaaactccagtcttactaacccatctcatgtgttattatcactcagtataaatgactgtagaaaaattaaggaagataccataatatccatacattcacagaagcagtaattgtagcctcccattaatgtcacattctatccttacgctctgctcacatccttacccacagtatgttagaacatatctttcaggaatacttatacactgttagtgggagtctaaattagtttaaccattgtggaagacagtgtggtgattcctcaaagacctaaagacagaaataccattcgactcagcaatttcaatactgggtatatacccaaaggaatataaatcattctattatacagacacatgcacccgtatgttcgttgcagtactattcacaatggcaaagacaggaaaccaacctaaatgcccatcagtgatagaatggataaagaaaatgtggcatatatactttatcgaatgctatgcaatcatgaaaaagaacaagatcatgtcctttgcagggacatggatggagctggaggccattacttttagcaaactaacgcaggaacagaaaaccaaatcccacatgttctcatttataagtgggagctaaatgatgagaacacatgcacacacagaggggaacaacacacaccggggccttccagagggtgaacggtgggagggagaggatcaggaaaaacaactaataggtactaggcttaatacctgggtgatgaaataatctgtacgacaaatccccatgacacaagttaacctatgtaacaaacctgcacttaaaagttaaaagtcaaacaacagacaaacaaacaaatatatctttgaaagcatcacggggattccctgctaaggaattcttttacaggctgggcgtgttggctcactcctgtaatcctagcactttgggaggccaagatgggtggatcatttgaggtcaggagctcgggaccagcctggctaacatgaaaaccccgtctctactaaaagtacaaaacttagctgggcatggtggtgcatgccggtgaaataatctgtacaacaaacccctaatgacacaagttaacttatgtaacaaacctgcgcttttacccctgaactttaaagttaaaacaaacaacaaacaaaaaaacaaacaaacaaacgtatctttgacagcatcatggggattccctactaaagaattcttctacaggccgggcattgtggcttctgcctgtaatcctagtactttgggaggctgaggcaggcagatcacttgaggtcaggagttcaagactagcctggccaacatggcaaaaacccgtctctactaaaaatgcaaaaataagccaggtgtggtggtgtgcgactgtaatcccagctactcaggaggctgaggcaggagaatcacttgaacccaggaggcggacgttgcagtgagccaagactgccctactgcactccagcctgggtgacagagcgagactccaaatcaaaaagaaaaaaaagaaaattcttttacttaccatcctttaatttttctgtaaatataacgtttcttgtgcaggataacttttacaggaacccagatcagtagagtcactaacgcaacataggcaatagaacaggagatgatcagccagtagtgtgtgttgtcagatctagcccttgttccttggtaggcggtggcaaactgttctgtgatcacgagtgtggggatggagaaagcggcaaactctaggagctcaaaaaccacgaacttaatgagccttccagaagccatcctgaggaaaagcaagctgccaagaacctgggactccctctttgactgtgggcagcatatggacccacagacactgaactgggatcaagttccttgtcctcgaatcgctaaccagtgactttttattcttttattgaccctcatatggttcaatgatctcctaacttaacaaccgtggtctcttaaaggaacaggaccattgtggaagtgatcactcaacatatttgcacatccattattagaagtcaaatgaactttagagcatgcccgggagcatgggtaaaagcagggttttaaaaaggtgtttattgctaacgttagcacaaaaccatttgtgtgatagtcaattcttgttaagtaaaactgctggaataatataattttagagttaaaggggaatagatagaatccaaccctctatttttacataaaagcaaattcaggcaaagggagatactcaaacctaagtcttcatcttggaaaaccatccctccctttcaagtgcttgaaaagggagtttgtattcactttatcaactctctaaccaggattctccctaatacttaagatatttattcattattgtgcattagttgccatataacacaaattaatgttatttttgttttgctgcacaggaaactgaaatggtgacattagaagcctgttatcaagatttacacattaacagctatctgtgactagctcaaatgcatatcaaatgtttaaagaatgacaattgtctccatgaatatccttcctttgaaaaacatacttgagaccgggcatggtggctcacacctgtaatcccagcactttgggaggctgaagcgggcagatcacctgaggtcaggagttcgagaccagcctggccaacatggtgaaacctcgtctctactaaaaaatacaaaaattaaggccaggcacggtggcccacacccgtaatcccagcactttgggaggctgaagcaggcagatcacctgaggtcaggagttcaagatcagcctgaccaacatggtgaaaccccatctgcacaaaaaacgaaaaaaatacaaaattagacgggtgtggtggtgcatgcctgtaatcccagctacttgggaggctgaggcacgagaatcgcttgaatctgggaggtgcggaggttgcagtgaaccgagattgcaccattacaatctagcctgggcaacaagagcgaaactccgtctcaaaaaaaaaaaaaaaaagcaaaaattagaggggcgtggtggcacatgcctgtaatccagctacttgggaggctaaggcagaagaatcacttcaaccaaggaggctgaggttgcagtgagctgagatcatgccactgcactccagcctaggcaacagagcaagacaccttctcaaaaaaaaaaaaaaaaaaaagaaaagaaaaacatactagagcacttacaatgagcattttagtatgtgttagggtgtgaagatgaatgaatgacagcagttcctgttctgaaagtgcttgaggtccaatggaggagataaaatgaggaaccacaacaaaaaaccaaggccagaagagtgtaaatgaagtgctacagggacacaggtgaacttcaccttgcttcaccttggggttgtgggaagaggatgggcacataagcacggtcaggatggacgggggcactgtggtgtcggtgacatttcagacacagccaaggaggctgcaggggttagtgaaaatctggtgtggcacagcaggaaacaggaggaggcaatgttagaaaaatagtttgggggccaggtggggtggctcatacctgtaaccccagcactttaggaggtcaaggtgggttgatagcttgaggaggccaggagtttgagaccagcctgggcaacatggtgaaacctcttctttacaaaaaatacaaaaattagccaggcacggtgtcgcttgcctgtggtctcagttactccagaggctgaggtgggaggattgcttgagcctgggaggttgaggctgcagtgatctgtgatcgtgccacagcactccagcct

SEQ ID NO: 914148 - DNA, 4001 bp, Homo sapiens
tctgtaacctccgcctcgcggattcaaacgactctcctgtctcagcctccagagtagctgggactacaggtgcatgccaccacgcccagctaatttttgtatttttaatacagacagagtttcaccatgttggccaggctgatctccaactcctgacatcaggtgatccgcccttctcggcttctcaaagtgctgggattacaggtgtgagccactgcccatggctaattttgtgtgtgtgtgtgtgtgtagagatgaggttttgccatgttgcccaggatggtctcgaactcctgggctcaagcgatttgcccgcctcggcctcccaaagtgctgggattacaggggtgaaccaccatgcctggctgactcctattaatacattccaccaaaaccattattttataaaagatattagcaaattttgagtttatgtgctttggctagtttctttactgcagaaactggctccagccaaacctctgtttaatttagaattcctttctcggctttccctttttgtacggctaaaactgagaatgatccactgcatagagatggaaaataagtgagataaggttgtgacattttaatagcaactgcttaatcacataaatttttcgtaatcttaactttcagcctctgtattgtaacttctgtcagctaagacttttctgagaataactcaacagtttcaaaatgtattgtcccattcaaatctttgtcaagagcagtactacctctctcacgatgttgtttcacatctgaaagttaaataatgcacaaatatcactgcatcctcccaaaccaaagggaaaggggagcatctgccagctccacaagatcccaatttgaagtccccaaagctttcctccaactatattctaactagtcacagacactaaatcgtagaacagaaatgcacctttgaaaattttcagttcaacacctccattgtacatatggggaaatcaggacataggttgtcagatttgacaccaacaaacaacactgtggacaagacaaatctccaatctccaggatctattggtatacccaaatagcttcgccttccttcaaaattttaccaccttatcacttgacgttaggagttcgaggccagcctcaccaatacccatgtctactaaaaacacaaaaaaatagctgggcatagtgtaatcccagctacaggtaaagacatgagaatcgcttgaacctgggaagcagaggttgcagtgagccgagatcgccccactgcactccagcctgggtgacagagcgagactccgtctcaaaaaaacacaaaactaccaccttagcccccaacctacttttccacgcatctttctcgttatcctttaaacagattatttctcagccaaacaaacgtcgctctttttctaggtacagctttcttcttgcttccacacctatgtcagaacagttatagcctctttatcctcccttaccacttaaatcctacccatcctttagatttatccccgttttccaaacaattcctattggctcaaacattctgcttcggaagccctattctgacttggcaggcctatggcagtctgttaacttgactttccgcttcgtgagaggcttaggctcggataacccgttagtaaccatgcagaggtgaggacccaaagacaggaacactagaaagcagaaactatcctaagagcccaccgaatttccgcttacatgagtaaccgagacaaccgtcagatgcgcgtgcgcacaggccccgttcccagagctcccctcgccctacgagggcccggcgggccaaaacagaggcccgccccgccccaccccacgcctcaccgcgaagtagcccagccccaggactgtgaccagagagggcaagggtcttgctggacggaaataggcggtagccgcattgctggcctccgacttcaccatcctcttgaaaaacccagacacagagttggctgggagctccccagccgtccccgcccccatataagaaaagcctggctagccggtttctcagggccctgggcgcccgcccaagaccctggcggaccagtatgcttgctctcattgcggagtctggtcccctcccctccgctcctagcgcgcgggagtcgggattgtgcttgcacgacttcccccggcccgcggcctgtgagcccaggtcctggggtgaaccgagcgctcgctcgttcgtcagaccgtagcgctccagcggctgtccttactgtgtagtagccaaagctgagggtgatgactgtgaaccagaacagactgcctcgctgaaagtaggtcgcgccggctgccgtagccatggctgcaacacctccccgggagcgcgcttcaggacaccgtcgagcgcgagcgcggaggcagggccggggccggcccgcgctccctcgccatccccgcagggagaagatggtgctggttgggaagtccctgagagcgagtctccctgtctggccccagtacaggggccttggaatcacacctgggctcaggtctggagggctggtcatcatcttgtaggggagacactcctgtcacttttctgggtttaagataaagatgttcgggctggcgcggtggcgtgtccctgtaatctcagcacgttgggaggctgaggtagaaagatcccttgagcccaggagtttgagaccagcccgggtaacatagctagactctgtctcgaatgaatgaatgaatgaatgaggtgttggaataaattccagcaatttgggaggccgagtcgggcagatcacttgaggtcaggagtttgagaccagcgtggtcaacatggtgaaaccccgtctgtactaaaaatacaaaaaatttgctgggcgcggtggtgcctgcctgtagtcccagcaactccagaggctgagacaagactctcttgaacctgagaggtgcaggttgcagtgggcccagatcacgccactgcactccagcctgggcaacacagcaagaccctgtctcaaaaaaaaaaaaaaaagatggtgttttactaagagtctaatttttgaagttctctgtgctgtgcaccttgagaaataatgctgtcctcattagttaagatgtttggaactatacagcaccatggttatgagcagggactgtgaaacaggctgcctggatttaagtcctggctctgtctcggctatttgtgtaagcttagattaattacttagcccggctgtgtcttagtttctgtatctgtaacatgaggatatgccagttttgggaacctcagggtttttagggtgggttaaatgagttgatatctgtaaagaaagcacagcagtgtctggcccatagtgctttgtaagtgtgggtgattatcaatactgctgagcctttagcatgtgtgccaggccctgtgcgaactgttgtatcatcaatgagctgtgggaggtatatgcagctgaagtgtctgattaaacactatttaatcatagaaatagaaaatcatagaaatagaaaaactatttcacctgggccttaaaaatgggttactggccaagcgcagtggctcaagcctataatcctggcacttttggaggccgaggtgggtggatcgctcaggagttcgagaccaccctggagaacatggtgaaaccctgtctctactaaaatacaaaaaattagctgggggtggtggcgcgtgtctatagtcccaactacttgggaggctgaggcacgagaattgcttgagcaccggaggcggaggttgcagtgagccgagatccaatcactgcacttcagcttgggctatagagtgagactccgtcaaaaaaaaaaaaaaaaagttactatactgtagctggtatttattgaacacctactatgttcaaggcattgttctaagtactatacaataattaactaatttaattcttaaaacaatcctaggcagtaaactattgtccttatttcaaagaagaagaaacagcacagggtcctgtcatgcccaagtgggtgaggaatac

SEQ ID NO: 914149 - DNA, 4001 bp, Homo sapiens
aatacattccaccaaaaccattattttataaaagatattagcaaattttgagtttatgtgctttggctagtttctttactgcagaaactggctccagccaaacctctgtttaatttagaattcctttctcggctttccctttttgtacggctaaaactgagaatgatccactgcatagagatggaaaataagtgagataaggttgtgacattttaatagcaactgcttaatcacataaatttttcgtaatcttaactttcagcctctgtattgtaacttctgtcagctaagacttttctgagaataactcaacagtttcaaaatgtattgtcccattcaaatctttgtcaagagcagtactacctctctcacgatgttgtttcacatctgaaagttaaataatgcacaaatatcactgcatcctcccaaaccaaagggaaaggggagcatctgccagctccacaagatcccaatttgaagtccccaaagctttcctccaactatattctaactagtcacagacactaaatcgtagaacagaaatgcacctttgaaaattttcagttcaacacctccattgtacatatggggaaatcaggacataggttgtcagatttgacaccaacaaacaacactgtggacaagacaaatctccaatctccaggatctattggtatacccaaatagcttcgccttccttcaaaattttaccaccttatcacttgacgttaggagttcgaggccagcctcaccaatacccatgtctactaaaaacacaaaaaaatagctgggcatagtgtaatcccagctacaggtaaagacatgagaatcgcttgaacctgggaagcagaggttgcagtgagccgagatcgccccactgcactccagcctgggtgacagagcgagactccgtctcaaaaaaacacaaaactaccaccttagcccccaacctacttttccacgcatctttctcgttatcctttaaacagattatttctcagccaaacaaacgtcgctctttttctaggtacagctttcttcttgcttccacacctatgtcagaacagttatagcctctttatcctcccttaccacttaaatcctacccatcctttagatttatccccgttttccaaacaattcctattggctcaaacattctgcttcggaagccctattctgacttggcaggcctatggcagtctgttaacttgactttccgcttcgtgagaggcttaggctcggataacccgttagtaaccatgcagaggtgaggacccaaagacaggaacactagaaagcagaaactatcctaagagcccaccgaatttccgcttacatgagtaaccgagacaaccgtcagatgcgcgtgcgcacaggccccgttcccagagctcccctcgccctacgagggcccggcgggccaaaacagaggcccgccccgccccaccccacgcctcaccgcgaagtagcccagccccaggactgtgaccagagagggcaagggtcttgctggacggaaataggcggtagccgcattgctggcctccgacttcaccatcctcttgaaaaacccagacacagagttggctgggagctccccagccgtccccgcccccatataagaaaagcctggctagccggtttctcagggccctgggcgcccgcccaagaccctggcggaccagtatgcttgctctcattgcggagtctggtcccctcccctccgctcctagcgcgcgggagtcgggattgtgcttgcacgacttcccccggcccgcggcctgtgagcccaggtcctggggtgaaccgagcgctcgctcgttcgtcagaccgtagcgctccagcggctgtccttactgtgtagtagccaaagctgagggtgatgactgtgaaccagaacagactgcctcgctgaaagtaggtcgcgccggctgccgtagccatggctgcaacacctccccgggagcgcgcttcaggacaccgtcgagcgcgagcgcggaggcagggccggggccggcccgcgctccctcgccatccccgcagggagaagatggtgctggttgggaagtccctgagagcgagtctccctgtctggccccagtacaggggccttggaatcacacctgggctcaggtctggagggctggtcatcatcttgtaggggagacactcctgtcacttttctgggtttaagataaagatgttcgggctggcgcggtggcgtgtccctgtaatctcagcacgttgggaggctgaggtagaaagatcccttgagcccaggagtttgagaccagcccgggtaacatagctagactctgtctcgaatgaatgaatgaatgaatgaggtgttggaataaattccagcaatttgggaggccgagtcgggcagatcacttgaggtcaggagtttgagaccagcgtggtcaacatggtgaaaccccgtctgtactaaaaatacaaaaaatttgctgggcgcggtggtgcctgcctgtagtcccagcaactccagaggctgagacaagactctcttgaacctgagaggtgcaggttgcagtgggcccagatcacgccactgcactccagcctgggcaacacagcaagaccctgtctcaaaaaaaaaaaaaaaagatggtgttttactaagagtctaatttttgaagttctctgtgctgtgcaccttgagaaataatgctgtcctcattagttaagatgtttggaactatacagcaccatggttatgagcagggactgtgaaacaggctgcctggatttaagtcctggctctgtctcggctatttgtgtaagcttagattaattacttagcccggctgtgtcttagtttctgtatctgtaacatgaggatatgccagttttgggaacctcagggtttttagggtgggttaaatgagttgatatctgtaaagaaagcacagcagtgtctggcccatagtgctttgtaagtgtgggtgattatcaatactgctgagcctttagcatgtgtgccaggccctgtgcgaactgttgtatcatcaatgagctgtgggaggtatatgcagctgaagtgtctgattaaacactatttaatcatagaaatagaaaatcatagaaatagaaaaactatttcacctgggccttaaaaatgggttactggccaagcgcagtggctcaagcctataatcctggcacttttggaggccgaggtgggtggatcgctcaggagttcgagaccaccctggagaacatggtgaaaccctgtctctactaaaatacaaaaaattagctgggggtggtggcgcgtgtctatagtcccaactacttgggaggctgaggcacgagaattgcttgagcaccggaggcggaggttgcagtgagccgagatccaatcactgcacttcagcttgggctatagagtgagactccgtcaaaaaaaaaaaaaaaaagttactatactgtagctggtatttattgaacacctactatgttcaaggcattgttctaagtactatacaataattaactaatttaattcttaaaacaatcctaggcagtaaactattgtccttatttcaaagaagaagaaacagcacagggtcctgtcatgcccaagtgggtgaggaatactggaaaacaattggcagctgagtgttccagttccagagagggcactctggaaccaaccaaggttctctttcctcattttttacgtgagtatcttgggatataaagtcttaaagaatgaatttcagaatatgtgaggaaatccatttcccaggtagaccacagtgctcttgaatatcaagattaacagtaacaattgtaacaattggtgttttcttagtccttatcatccttgatcacaccaccctctttattcttctcctccttctgaataactccttgttttctcagctttccttttctttcttctctcctagaataagttttgcttattatcttctttgtgttttcagtacctatcagattcaattttcaccttc

SEQ ID NO: 914150 - DNA, 4001 bp, Homo sapiens
gggatctcgctttgtcacccaggcttgagtgcagtggcctgatcacggctcactgcacccttgacttcccgggctcaagcgatcctcccaactcagcttccccaagtagctggaatacaggcatggctaccacgactgactaatttatttatttatttatttattttagatggagtttcactctgtcgcttaggctggagtgcagtggcacgatctcggctctctgtaacctccgcctcgcggattcaaacgactctcctgtctcagcctccagagtagctgggactacaggtgcatgccaccacgcccagctaatttttgtatttttaatacagacagagtttcaccatgttggccaggctgatctccaactcctgacatcaggtgatccgcccttctcggcttctcaaagtgctgggattacaggtgtgagccactgcccatggctaattttgtgtgtgtgtgtgtgtgtagagatgaggttttgccatgttgcccaggatggtctcgaactcctgggctcaagcgatttgcccgcctcggcctcccaaagtgctgggattacaggggtgaaccaccatgcctggctgactcctattaatacattccaccaaaaccattattttataaaagatattagcaaattttgagtttatgtgctttggctagtttctttactgcagaaactggctccagccaaacctctgtttaatttagaattcctttctcggctttccctttttgtacggctaaaactgagaatgatccactgcatagagatggaaaataagtgagataaggttgtgacattttaatagcaactgcttaatcacataaatttttcgtaatcttaactttcagcctctgtattgtaacttctgtcagctaagacttttctgagaataactcaacagtttcaaaatgtattgtcccattcaaatctttgtcaagagcagtactacctctctcacgatgttgtttcacatctgaaagttaaataatgcacaaatatcactgcatcctcccaaaccaaagggaaaggggagcatctgccagctccacaagatcccaatttgaagtccccaaagctttcctccaactatattctaactagtcacagacactaaatcgtagaacagaaatgcacctttgaaaattttcagttcaacacctccattgtacatatggggaaatcaggacataggttgtcagatttgacaccaacaaacaacactgtggacaagacaaatctccaatctccaggatctattggtatacccaaatagcttcgccttccttcaaaattttaccaccttatcacttgacgttaggagttcgaggccagcctcaccaatacccatgtctactaaaaacacaaaaaaatagctgggcatagtgtaatcccagctacaggtaaagacatgagaatcgcttgaacctgggaagcagaggttgcagtgagccgagatcgccccactgcactccagcctgggtgacagagcgagactccgtctcaaaaaaacacaaaactaccaccttagcccccaacctacttttccacgcatctttctcgttatcctttaaacagattatttctcagccaaacaaacgtcgctctttttctaggtacagctttcttcttgcttccacacctatgtcagaacagttatagcctctttatcctcccttaccacttaaatcctacccatcctttagatttatccccgttttccaaacaattcctattggctcaaacattctgcttcggaagccctattctgacttggcaggcctatggcagtctgttaacttgactttccgcttcgtgagaggcttaggctcggataacccgttagtaaccatgcagaggtgaggacccaaagacaggaacactagaaagcagaaactatcctaagagcccaccgaatttccgcttacatgagtaaccgagacaaccgtcagatgcgcgtgcgcacaggccccgttcccagagctcccctcgccctacgagggcccggcgggccaaaacagaggcccgccccgccccaccccacgcctcaccgcgaagtagcccagccccaggactgtgaccagagagggcaagggtcttgctggacggaaataggcggtagccgcattgctggcctccgacttcaccatcctcttgaaaaacccagacacagagttggctgggagctccccagccgtccccgcccccatataagaaaagcctggctagccggtttctcagggccctgggcgcccgcccaagaccctggcggaccagtatgcttgctctcattgcggagtctggtcccctcccctccgctcctagcgcgcgggagtcgggattgtgcttgcacgacttcccccggcccgcggcctgtgagcccaggtcctggggtgaaccgagcgctcgctcgttcgtcagaccgtagcgctccagcggctgtccttactgtgtagtagccaaagctgagggtgatgactgtgaaccagaacagactgcctcgctgaaagtaggtcgcgccggctgccgtagccatggctgcaacacctccccgggagcgcgcttcaggacaccgtcgagcgcgagcgcggaggcagggccggggccggcccgcgctccctcgccatccccgcagggagaagatggtgctggttgggaagtccctgagagcgagtctccctgtctggccccagtacaggggccttggaatcacacctgggctcaggtctggagggctggtcatcatcttgtaggggagacactcctgtcacttttctgggtttaagataaagatgttcgggctggcgcggtggcgtgtccctgtaatctcagcacgttgggaggctgaggtagaaagatcccttgagcccaggagtttgagaccagcccgggtaacatagctagactctgtctcgaatgaatgaatgaatgaatgaggtgttggaataaattccagcaatttgggaggccgagtcgggcagatcacttgaggtcaggagtttgagaccagcgtggtcaacatggtgaaaccccgtctgtactaaaaatacaaaaaatttgctgggcgcggtggtgcctgcctgtagtcccagcaactccagaggctgagacaagactctcttgaacctgagaggtgcaggttgcagtgggcccagatcacgccactgcactccagcctgggcaacacagcaagaccctgtctcaaaaaaaaaaaaaaaagatggtgttttactaagagtctaatttttgaagttctctgtgctgtgcaccttgagaaataatgctgtcctcattagttaagatgtttggaactatacagcaccatggttatgagcagggactgtgaaacaggctgcctggatttaagtcctggctctgtctcggctatttgtgtaagcttagattaattacttagcccggctgtgtcttagtttctgtatctgtaacatgaggatatgccagttttgggaacctcagggtttttagggtgggttaaatgagttgatatctgtaaagaaagcacagcagtgtctggcccatagtgctttgtaagtgtgggtgattatcaatactgctgagcctttagcatgtgtgccaggccctgtgcgaactgttgtatcatcaatgagctgtgggaggtatatgcagctgaagtgtctgattaaacactatttaatcatagaaatagaaaatcatagaaatagaaaaactatttcacctgggccttaaaaatgggttactggccaagcgcagtggctcaagcctataatcctggcacttttggaggccgaggtgggtggatcgctcaggagttcgagaccaccctggagaacatggtgaaaccctgtctctactaaaatacaaaaaattagctgggggtggtggcgcgtgtctatagtcccaactacttgggaggctgaggcacgagaattgcttgagcaccggaggcggaggttgcagtgagccgagatccaatcactgcacttcagct

SEQ ID NO: 914151 - DNA, 4001 bp, Homo sapiens
gatatttccactctggcttattaaacctactcagtcaaagttaaatcaatgttatatgacctgctgagtgaacaaacacttttctccccctttgtttctttatccctgaggcttacttgggaaactaacaccatttttctttgagatttccaaaaggcacactggaaagtacctcaaatgtctcacgcttaataaattcttcatgggggtggggaggtggagccaggggtagtcacattcccatcctggtcgtattaaattaggattgttcttgaataatttcagcattgataattctagaaatttttcaacagtagaaaatgtaagtaagattcacatcatcttcagaggcaacatgttttcttccgtgaactgtcaggaaatacaaagccttttgtagtttagtatgtaaaactgtagaggggttgtttcattttttttgaacacaatgactataatgccattgtgtatgtaattgtaaattgcctaataccattttctcctttctcatagcatgagatatttttaatgtattgatatatatatatatatatatgaaaacacatcctatttaaagaattaaaagagaaagaggcctaacttggagaagttctggatgaacttccagatggattcctctgggggttgggggaggctcttcgtcaatggcaagagaatctttttctcaattatttgattgccattcaagcctttcggggaggaaataagcaccacacgtggcgtgtagttattgcacacagacgttaagactgaaccactacctgctggtcccttcaccagcgttacaacccgttccttgcaagataggcaggccgttagccaagccccaaagccagcaaacccagacacctgaagctggcgctgtgctagagaacgcgcgacgcgcgcggctggagggaagggaagcggatgaaaccacagacgtgcagcgagggtcttctcgtcttaggagggtggccagtgtgctcagctcttgcgaaggtcgctgatgcccagcgaaggacattcccacatgtgcacgcacgcagagtaacccgcgcacactcacacaccccagtttcagaaggcacactacatggcaacctccttgtcccaagactcccctatttgcgggcacattcagcaaaatagaccagcgcttcctctctttactcatcttccaagtttccaaacctgagactgggtgactcttgcctaggctcacagatcgagccttcccagtgttgcactgggaccctagggtggccctggggtgcccaagagatgcgcaagcatctcgcgccttccaagcgatcagcgaggaaaaacggggtccaaattcgagtagaatctgcgggttgcgggaagatggcctgcgagtgcggtgggggacaataccctagggccccgtgcgccctcgctttcccggggcactctcaccatttgtagcctctgccgcgcttgaacttgagggtgagcgcagtctccaggaagagcaagaggttgagcagcgcaagcagccagtaccgcggctccttcttcacctcggtcactcgccagaccccgaccagcgagtgcagcaggaacagcaaccgagtggccagggcgttaaggaagaccagtccctccatgctggccggagcactctgcctacgtccccttgcctgcgcccccaggaccctgccgggcgtgcccggagcccaccggtgagcaggaatatgacaagcactgagacctgctgctgcttgtggtcccttctcaccctcagcgcccgatgccggtagaactggtgcgcggctcgcccctcccccaaacttcctgagaactcttcaaagaggggtgagtccaaacccagcttttccagactgctgggttttccagggagtctggggctgcgctgccctgtctccagggcgttattctccagcgctgcccatccccctcccaatctcggggccagtctccatccctgtccggtatccccgcccccgggcctctgtgaggttcccaagaacttccccatcacgagggggcggaaagaggagggaggaggactgaaggtcaaggtgcagcacagccagaaaggcggaggaggagagcatctctggcagctccgccttacttttccaccgaagtactttaattcactaacacgtttcacgctgtcatgctgacccgaagccgggacgcaggagggccaaagaatccaagcaattttagaaaccccgttactgcccagcttgaattaaaacttcctaggatcagaggcagtcagaccctctgggctttctgcgagtttagcgcacctccctgggccagtgggtagccctgctcacttttactactcgaagattccttattgtgccatcccccaccgcaccccacccctgttggttatttttttttcttgaaaaaaatataggggtagcaagataagacggaagaagggaaagtggaggaggagaggaatgataaaaccaggaatgccattagaaggtaaaatgcatgcactctcaaattcaaggacctgtgctcttgagatcaatgaccatgaattaaactctcctctttccagcgtccaacacaagaaatgaagtcggggtttcccaaaacaccttcatgatttttgtttgcttgtttggtgtcctaccacctgtactactattgacttaatatttttctttaaatgtcctcaaatttttactcaaataaatttattttaaaaagaaactttgtatcatttgtaaatggaaagcctgtataattggctatagttggaaagtaattacaaaaatagctaaaatatgatgaactatgttattgaaatctctctagatattaattagtgccttccaaagctctctgcctcaaactccctctttctttgttataaagggagatatagaattaattagtcatattactataataccaagcaggaatgctcccttgaccacattagtaacattgaaagaaaagtacaaagggaatatctttcctggttaggtttagtcaagttaaaatcatgtcatacttttcttaaaatcaagttgaaaaattgcaaattatgtgattaatgtctccattagttgagaaatatctaactgctcacaagaagcttagaagttatttccaatactgagagctgagagaatttttgttttctcctgtgggtcagcattctcccacatcttacaggaaacccagcaatgatttcctggtgcagtttattctagtttatagtgtccttcaatgttggctgatgacacagtgaccacacgccattcagtgaagcggaagagcatagtgtggcagatgaatgctgtggaaggaagcagtgtgctgtgggggttagagccctgtacccaccaaccagctgacttagacggctcactaagtcacttagtagtattgtgccttttgtccttctgtaaatttggtactaaacctatctactcacggggtcattgtggggatcaaatgagttaatccatatgaagggcctggcaagtggtaaatgcttggtagacatcagtgattattgggagggccaagaaagttacgccaggggaactgctcttcgatgatctgagacaagtaataacaggattggagtggagcaacataacattcctgtcaaaaaaccccagatgaacacatctggaactgaacaagttgagtttattacttttttagggagggggcacactccatgggccactgtggggcgtctcagtatgaaagtcttagaaaggttaaaaagcattggagataacttattagatatgatttgggcttgactgaggtgattttggggcttacagaagtggggctttactctagatggaatgctattaggaagctgggttaattttatgttgggtatgttgataaatctaatatagaaagggatatttgtggtttgtacaatattcatgttcagacataattttggagcggtcctatttgatccaccatgatctcagagtggccttacctga

SEQ ID NO: 914152 - DNA, 4001 bp, Homo sapiens
tcagctctgggtggagtgtggctgggggaactgtgggattcttggcattttacagatttggaaaccaaagcctagagggagcagggtggactcagatcaacagacatggaaacctatttagggtggccttcctctccccaggatggcttttttgcttgttgggggtcttggccatcattctcttatgtgtagacgacaacgtggttctgaaagtggctggatctggctcctccctcagtgcctccactcagagcctcagcagagcaattctgaacctcttcctgctgcctactctggaagacagggaaggttttggccagagccctggcctttgtgaaagttgaaggaccagggctccgggctggctgtccctctgaccatgaccttgggcaaggtcaccacctgcatttgagctcaggtgccccatcctgtagcaggaggggtggggttaaaccatccagcagcccttcatgatctaactcatggcctagatgctggaagagcccactggccagctcacggctgaacccagcccagtgctcctgaaatgacccagcttcccattgagctctggagtgtgtcatgggggcttctgctgagaggttttcatcctcagttccacttagccatgctcagttcctgcatccttaatctgtccaaacacctggccagcaggtccccatcatacagatcagaaagtgcagcctcagaggggtcaggggctccccaaggtcatatatcacgcaagtgactaggctggggcaggaacaagcactatgtgattttgacctaggagaactttcccatttggtaagacccgtgggtaagcttttgcccagtggtggggaagggctttgatagggggtgtgtctctctttgtccccaagggacaatgtggctcagagttaagggctcagaattctgcctgttcatttccccaaaacagatcctggctctgtagggggaatggggctaagggtcaggcctgccctggggaagcgagcaggcagggctcaggatggtggctctgggctctgctctaacagtctgccctcctgtccagttgagcagccctgtgattctgctgggtgaaggaaggagcccagcatctctgggaagcatctctgctgctaagaccacagtgcattcctgcagtcagacctcagacaggggtctgggttcctacagggtgttctgttaacagggtccagcatgggcccgagggaagcctgtgatctccacgtccagccaggctcagcctgtccctccagggcagagctgctcatgactgggagttctctctccatgaggtagggctatggtttgagtaaagcaggatgagctcagttgaccttttgtagatacacagcgaagcccagccctttctatcttcaccttctgtctccacctccatctcatgacaactctctgcgtaggtggggtggcccctggaatcattttgcagatgaggatcttgaggcttcccaaggtcacagggagggtgacttgccaagcaaagatccagcacccagccctctggtccccagccctaggctcaccccactgcacttgctgctgctctacagagcagtgtttctaggggtcttgggaaaaaaattgaagcacagaagtggccagatgtgcctgctgtctcctggccacctcccacccctcaggcagccctatctgtggtgccagtgtgcaaggatcagcagccaggaggcagggtcttacctgcagcagtggtgatgcccaggagccggcaggtgtattccagcccagtccagaacacctggagctgcatggtgccaggggtgaggacaaagtcctggcagggcaggcagcaaagtcttcggccctgagatgctcccgaacacccttgtgtaggtaggaggctgctggctgtggctgcacaccggggccctgccttcccaaaccagtcctggccaccgcagcctggccgaggtgtgaatagggctcaccttctgtgctctcagcccgtgcccttgccaggcactcagcttaatcattaccttggaagaatgctcctgctgctcacacaaccccagcctgggctggagccgctcagccccagcgcagcccagccgcctgagatcggcgattagggctgggctggaggcagtctggagctggcaattaaccgtttctggctgggaggagggagccaaggagtgggccaggcccttcctcaccaagccatgcctagaaagtcacacctggatttcacacttgctgggggcctgtagtgtctggctctggaggggacagtgctcttgcaggtctgtgcttatgtgcatatgggagagaggagtgtgtctttaaatcaccagtagaaacaacttttgaaatgagttccaagctttattcttctgcgtataggtggattagaaagcttttcaaatctgtcccggatttggactctgactagacatacttagctcaggccccgccacgcagaggccttccttcctcattaacatgcatcccaacatgggacgtgggaaatcattttgattctttgttttgcgaggggagttgctatgtcaataattaaccgggtgaccttggggaaacccaaaggcatctgtgagccttggtaacttttgcagaaaataaatgtgaagttttggctgaattggtgtttttgatgtacttggagtgtccctgtagctgtttcaaggagcccagcctttacacttggacagtggtgggctttccctcattcttaatttactaacggatgtgctagattgaatggtattaagatttatctctcaggtgtttttctgaaatcttttacccctttgctcatataagatagaaaacaaaacaaccaaataaggaaaaaaactccaagcaaacccaatacacatgctcctcaacttatgatggggttatgtcccaaaaaacccatcagacattgaaaatattttaagttaaaaatgcacttaatccaaccaacctactgaacatcagagcttagcctggcctacttaaatgtgctcagaacacttagtttatggttgggcaaaatcatctaacacaaggtttatgttataaagtgtggagtagctcatgtaagaatatattgtagggcatgttgctagcccaggaaaacatcaaaatccaaaatttaaagtacaatttctactgaatgtacatcattttcacaccatcctaagttgaaccatggaaagccaaggtctgccaataataacggaaaactcaagaacaattagtttggcccttccctcccctcccttcccctcccctccctccccttctccttccccttccccttcctttctttcctcttttctttttttttttttttttgagacaaggtcttgtctgttgcccaggatggagtgcagtggcacaatctttgtggcctcaacctcccaggctcaggcgatccttccacctcagcctcctgagtagccgggaccacaggtgtgcaccatgcctggcttgcatgtttcttgcttgaggatgatacaccctcaacatatataatgaatagatattttttgctattaaaattattttaatttgattgattaatttgatcaagaatcatggcattccataaagattaccgttttttgtatttttccgccttgaatgagtttaggaacttctgtgctcgtgtgatcttcaagatcaagtttatgagtgtatgatttacatatttatttcctgggttagttgttttctattagcagactatcaacttcaatcttcttaaactttgacatatcttgacaccacacacacccactcccccaaatgcaggtgttccggtctctgtggcatatgctgaattgcacagatggagctgcgggggctgggcttcagcagcgatggcagctccctgtcctttaggaacccttgatttgcatgggtcgggaagctctggctggcccacagtgctcacttgcttcttgctggccaacagccacttatttttttttgtatct

SEQ ID NO: 914153 - DNA, 4001 bp, Homo sapiens
tttatcccacagatcaagtgaacagaatctaagtaaccctaccctttggcttatgtatcagttgatcgtgacagtttgccaaatgagttgtttaaatgttgactacatggtcaaacaggacaacctaaattagctgaagaacggcagcacttaccaccgaaatttcgggcaaaaaggctaactaggtgtgtttgacttaagtattcttccttctctttccattgcccacaaaccgtttctagttctcccacctaggttccctaaactttcttctttttaaaagactccccaatggaaatccaacaaaggtgcaattgatcaaaaaagcatacctcctggtagtatttacatttaaaatctggaacaggttaaagcgaacaaatctccaattggtagaaagtgtaaaagtaatatctgtgaaagaggaaatatttctcactgctccttttctcttcatcaatctagccccaaaagaacaggagtactttaaaaggtattccccgatttttcaaaaaattgttttaaacaatcatgaaatacacaaaacaaaaaaccaggattgtcagaggtaagaggaggtactcccattttcaatcacgcatgactcacctgaagttagaaacagtcatcatctttcctacaagtgaacagcatgcatgctttatgggaataagctgaatatcccatctatggctcttttaaatttttcgactaaatttaatatgcttaaatcataaagtgaacctaataaatattaaaataatgtaattcaaacgatctaaatttcagaatgaagcaaggttagtcccaacttaaattctagattcaagctaaagtacttgcactatcttttctcttatactaccactttccgcccaacttgtatgtgtgtgtgtctaaggcttcccgcacccagcctaagtcaggtttcagttctcccaaacttgcctatttcccgttctagtcactccagaaacttggtaatgattggctattctgataaaccaattaacgctaatgtgtcaacgtcctattaagctactcctcctaaattacatccttgtattttacaaagtccttcaagaccttaacccaaatggaacttgcaagaacgaaaaattttggaggtaactgaccttttaaatcataaggtctatcaactacgtcccctactctttcttgtgtgtagaggccttctagggtaacaagaccggaagttggtacaggtattgttgatactgtaaaacaaaacaaagccaaaaccccaaaccacccccaacacctggcaaaaaaaccaaaccaagacaaaacaaaaaacttccagcgagtgtggcacgctcaccctacccctaatctccttagtccccactggaagagagcgagatcaccaggaccagagtcctggagaaaggtcgggaggcggaggagcactggtttcagacctgtgggccccggctgcgcaggtggggtctggagcgaggcgaggggacgctggccccggttacctgcggcgaagtgcagcggggtggatttcctgcccgccgtgtcgcggctgttcaccttctcaggcgtcaccagcctcttgactcgttccacgtccccgttgcggcacgcctcgaacagctctcgggcggccggctccacggcctcggccgcggcgctcgcgcaggccgctcccccgccggcgcagcggcgacccgacatgatcctggccgccgccacagccagcaacagcgccagcaaccggagcaggagccccggccccgcgagcaggagggcgaggccccccggagaagacgcgctcagggcccgggccgcttggctccctgctgtcaccggatccggcgcagtcccatggccgcgcccacgcgcgcccctcgctgggctccctgccccccggctgccccgcggcggcggaggcagcgcgaatccgccgtccgggtcctgaaacgacgcggcggcggaagctggcaaggcccctcctgccagctccgtccagccccgggagcgcacgtgacgtcgtcccgcgcgtgcgcagtggccgggcaccggctgggcaggtttcggctagcgaggcggcgcgaagggtttgtgggaaatgtgaggcgagaggcttcggcggcgggagaaggggcttcgtcccaccgccatctttgcggtgggttctgctgaagccgaacgatcctgcatattgtgttttttgttgttgttgttttaagccctgggctttccaggctgaactttctcactaccattacactgaaaaagagcccttgaaagttttgctcggatcttgcacattcttttggaagtcttactgtggaaattgtccgtgttttcagcttccacatccctttctcctgggagatttcttttccgttttttttactttgtctcttttctttcctccgcaactgctttgttgttgttgttgttgtttcttgtaaaccacttctcaaaagtgaactagttgccgtttaatagaagtttggatgaactgcccccaaaataaaggaaatccgaacagtcatggaagttgactccaattggagggatggctctgatcaattactctttccacagtaagttattagctcaggattgattagaggaactttttgtaaatcaatattgtacctgacatgcctaaagtttggatacactgagcatacgcatctccaagaaagttttctgagttataatctttttctttgaccaacaaacaaaagaaaagcatataattgattttcatgcttaagatactggtgtagttttacacgataattccccactacacccccttgtcttaaactgaaagaaaggtatgcctatacatacattttacttacagaagatgatacatgttgacctttgccattctgaaaagcatcccccccccaacctcctaccttaacctgtttttcaggaaatccagtttttgttggggaatgttgactcactacagtgctaaaagaggatgtacacttttttgagcatttttatacatatgaaattgaagttatggtgcttatcaataacatgaacatgcatgaacgaacctaggactagaacactaccaatatgattgcgtttatcatttttcttcccataaatctgctatggtgatctatgatcagtgataagttgaaatcactgttgtaattgttttgaggcaccacaaaccacacccatagaagacagcaatcaatcaataaatgtgtatgttctgactgccccactgacaggctactctgccatctctctccctctcctggggcctatctgttcccttaaacacaataatattgaaattaggccaattaagaactctgcaatggttttctaggtgttcaagtgaaaggaaaagttgcgtatctctcactttaaatcaaaagctagaaatgattcatcttagtgcagaaggcatgttgaaagctgagataggcccccttgcaccaaacagccaagttgtgaatgcaaatgagaagtttttgaaggaaattaaaagtgctactccagtgaacacatgaatgataagaaagtgaaacagacttactgctgatacgaagaacgtttgagtggtctggatagaaggtcaaaccagccacaagatttccttaagccaaagctgaatccagagcaaagccctaactgccttcaattttgtgaaggctgagagacctgaggaagttgcagaagacaagttaaaagctagcagaggttggttcatgaagtttaaggaaagaagctgtcttcataatatagaagtgtaaggtgaagcagcaaatactgatgtaggagctgcagcaagttaactagaacaggggtccccaacccccggcccttggaccggtactggtccctagcctgtaaggaacaaggacgcacagcgtgaggtgagcagagaaggtgcagggcgggggatggaggcagggtggggatgggcggggagtgagcattaccgcctgagctccacctcctgtcagatcagcagcagcatt

SEQ ID NO: 914154 - DNA, 4001 bp, Homo sapiens
tgtttttcacttagtaactagcacacagttaagtcttactgttgaattaattccaacagttagtaaacatgcttaaagagaaaatcggcattatgctcaagaatgtaactgtagcacactgtacttgcaaaaaaactgaagaatgatctaaatattcgacacttaaggaatggctgaattacagcttatgataaagtactaagcaattcattaaggagtttcaagatatgggaaaacgcggacattatatcactttagagaattaacaaagagtaaatagtactagagttttgctttgatgctgctaagttttaaaatgagaaataaagatagccggcaaacaagtactaaaaacttaatgatcattaacctagtctagaattgaaactcaataaatctgctcaaaaaacttatacgctaaacccattaaatattgtctgtatcttacagttactcttgttactcttggtcctaaataaggaagcagggaagtttcagttcggtggttgtcttagtaatttaagaataaacatgcaccttcaaagcctgtttgtcattctgtatccccagctcctagcacaaaatctggcacagaataggagctcaataaataattttgagtgaatatcaccaaaagtaaaactttcagttccaactcagcatgaaagaaatcaaaaacctcaaaatcaaagacgtgcataaaagtaatagtttgcttgataatatctcgtgatgtcgttttaaagtaatagtgataataatgtataatatttggagtggttacaatgtatcaggcactaacaagcacttgacagactttaatccttataataatcattctcttttaaaaccaggaaacaggttcatcactgttcacgaagtagcccaacgtcacactgccaccaagctggaactcagttctctggcatctaaacgcagaactacagaagacacgtttctttccaacgatcagacgtccaagttcttcaagcttcctctaccatcctatttagcattcgcaaacttctaccttgaattgtagctattatcccttccaagatccatctctcaccaggggagcccctgacactccctccctccccagctgggaagccccccaggatgaaggaccgagtctccatgcttctcggtggctgcacacttagaatgggggcttggcaccaggcgagggtctcgcccctttgataccctttgaggttgatttactgccttgcgaatcccgactcccaactgggccctttgaggcgccatgtgcggcccctcgagccagactcggcgccaggagaagggagtcagcgtctggaggggtggacacggcggcgcgcaggagctgtttccaggacaaccgagggccgccccacagtgtccgccccacagtgtccgccccttgcgtctcgccgctccgccccttcccggcgcgggtgctccaaccagcccccgtgagcgaatagagagaggggtgctagatggactctcacctctcagcgcgtggtgcatgccgcccacgccgctgtatagctccagcacccgcaggggctccatccccgcgcctcagccgccgcagccccggagctaggcctgccggtccgtcgctcctcctccctccatcgcgccgctccctcagcctctggttccgcggcgtttcagttcccccgtctcctaccgctccaggctcagggcttcagagggcctcgcggcctggggattggcaagggtctagaggggaacaaaggacggaaaacaataaggcttcccgaatgaatggcagccactctgtagcctgatttacgctccatttccttctttggtgtcaggggccttgattggaaaagaaatccagagttcagtaaaggggagaaaactgccttggtttccaagtgaattaacactggttagaagccagaaaaaaatcatttttcagacaagctgcttttctgtcacttagaagcctgaacattcaaacattctttccacagtgtgccttgtttcctgcctgccctgggtcaatagagagaaattagaccagcctctcccctagagaagattccagaattataagtaaggacacaagtccactcgcagcagagaaagccctgtgtgcgtgctgataatacagaggatgtttgttgtgtctattagtggggttaattatgttttagcttggaaattacacctacatagaatacacagtgaatatcatgtaggattatttatgggtctttaagtgctatggccttgattcctcaggatgatccagtaaccaactgttagaggctcatgttgacgaaaaaagccaaactccgtaaaatgtttgaagaggtttattctgagcacaaggtgaggaccgtgacccatgacacaaccccacagggtcctgacaacatgtacccaaggtggttgggctacagcttgggattatatggttttagggagacataaggacattaactggtatatggaaggtgtacttagtttggtccataaagatgggacaactcaaaaaggggaaggattccaggttacaggtggattcaaagattttctgattggcagttggttgaaagagttaagttgtgacctaaagacctggaatcaatagaaaggaatgtgtctgggttaagataaggtggagaccaaggttcttattatgtagacgaagtctcatacgtaacaggcttcagagagaataattggcaaatgtctcttatcatgtgtaaaaagatgccagactcttagttaaatatctcttggatcaggaaaagacctggaaagggaaagggagtctctatagaatgtagattttccccacaagagatggctgtgtagggccatttcaaaaagtgtcaaagaaatttattttagggtaaaatgctttgatttagggcctgctatctttcatgtgatgctatactagagtcatgttggaattttggtatcttattgctaagaagagtctgttatgtcggtatgaagatctcttgttttaataataatactggtcagttgtgcctgaactccaaagagaggaaagtataatgaggcatgtctgacttccctttcccagcatggcctgaactagtttttcaagtttctttggaatccgcttggtggaggtgttcaatcagtcagttggggggagcttagaaattttgtggggggagcggtgtttacagtcaattataaataaaaataatgtacccatatggaggatagaaaatgttcccgttgtgaagtgtttttctctttgttcccaacactgccacaggtttttgttagggggaacttgggggtaccacttgtaataacaataactgatttgttagaaatgttgcatgcctgctaatgtaatgctgttaacaaataaaagtataaccactgcatccaaattataacattcactggttccttttgatgtggtctatgaaattaactttttaaattgtacatgtgcattggccacgtgctttgctttttgttagtcactttcagataagaagaggtgtatggtagaaagataccagataactcagctttagccctggcgttgccagttaactgattgtgtgactttgagatgaccctggtttcctcatctgtaagataaagcagaagggaacagaaagagatggattgttgagggtgttttagttccaagaaatgaattcatggctgaattcaaattagaaaaaatgagacctgatttggcaacgtgttaattatttattgaatttgaaatatgtagaaagaagacttgttacctgctttaagcaaatgtactcttaaactaactcagcttacagaaaccatgtacacactgacatatgtataatgcatgaagcaaactttttaaatatttattacatatagtaccagaaataaacatcagtacataaaatgtaaagggaactatatagtcacagtgatttatatatagccaaaaaccaatatattaaacaaatctggaattttcagcattcgtg

SEQ ID NO: 914155 - DNA, 4001 bp, Homo sapiens
ttttaattgctaaacagtgactcattctgactggtccccccacacaggaaacagccccatctccaatcatgccctgaacagagcttcctcatagccagcctccgcactggcctccactaacctccagggatccccacccagagacactcccagtcccaccagagtgcagcctagcccccagatatcacacccaggccccaggccccaaggtggggcttcagagaggactcctcggtgtcaggccaaccccttcattttggtatgactcaaccctgaaagccagaggactggggagggacctaggaggagccccctccactgaaggggacggaagtattgcctcagtccagctccaaaaccaggcccagaggcctgaggggggaggcggtttgacattggccgcggccgcagggtgtatacaatgggaggggacgcggttccgtaatcacccagccggcagcccaggggagccagctgcctgaaaccagatttcaaggcggctcaaccttaaacccacaggattctttttccgtcttccacttcccctccccaaatgtgggagggcggcgagagggctgtgctaggcgaaagggccaggatgatgaagacagatacttgaaggcttgttcatgcggcccgtgcgacacacaggcacacagggcagcgattctcacacagggagagccggctctcgggaggaatccaaatagcggagccgctgtcggggcctcgctggctgcccaggccctgtccagagagacggccggagttctgctctccctctggaaactccccccactccccccccagtgtgtttccaatagcgctgaaaactaacatggctgcttttgtttacttcctcattggtatgccagcatcatggatcatgtcagccacagcagcggcaccgggacactcattacataaacagcagctggagaggcaggaccggggtcactgcctcggtgacttcccgtagggcctacagcaacaagactgggggagggagctgcgcaccacagaaaagcaacacccagactctacccctgacggtcccacaccccaatcccataaagcactcagaagacggaccctgtgcgcacaggtgcgagaatgtaccaagtagcgacccggggcccttcttcccaggaccctgtccccaaactttcagagaagagtttggccaggggccactggcctgatgtcacaagagtcagcctgtcgggatgggtggtcccggggcgggagagaggaagggactgtgtgtctgtgtgtgtgtgtgtgcgcgcgcgcgcgtagggtacttgcccggatttcattccttcggatctccacgtcgcacaccgagtgtccctgatgcgcgccgctgtagtagcagcagtactggcacacggccacctgctcggcctcgcagtggtagaggcggtaggcgttgtgctgcgggcagctccaggcccgcacgtcgtccgcctccaccaggaggtgcccgcgggcggtggagggctgctgcaggtgcgtctgcacgtgggactggcagcagggcgcctcgcagcgcaggcagaccttctgcgcgggcagcggggggccgcggcggcagaacacgcagtgcagcgccgccggcggcttctccacgtgcagggcattgaacttctccacgatgttggtgagcttcaggttcttctccaggcccggcttctggttgtaggcctggttgcactctgggcagcgtacgaggccgctgtccttggcccacgcctcgccgatgcagccccggcagaagttgtgtttgcacggcagctgcactggctccacgaaaacgtgcaggcagatagggcagatgagctcctcctcgaagcagttcttccaattctccgccatggcggccgcgggcagggggccggggcaggcctccccgactccccagccccgggggtccgtccggagccgctgtaggcccaccgagccccgagctccggccccagccggccccgacggtcgctcagtcagcagcgccttccgcgtgcccgccccccggaggagggagccgcggtcctcacgccgcgcgcgcagcgggctgcgtctcctcctcctcccgagcgcctagcgggaggcggcggactgcgccagggccgcggccgggactccagccttggaggggagcgccggggtccaaattccatataagaggccgcctccccgtcggcgcggctagggcagtggcggcccgcggcctgcgctcgtccccgcggctgacattggggcgcgccccgcggcagacggagcttgggagcagcacacttcttccggcggcggcggcagcggcggctcctgcctggctcgtcggcgccgcacctccctcgcaggggccggagcccggggtctgcggggccaggaggcgagggcggccgcgccgagggctgctagatccggacggggcgggaggggcaggccggcggtccccgggccacggtgcaggcgtcccccggctggctggccgggcgcgggctgcggggcgcgggcgggccgactccggggcgctgcgtgcgcgcaggggcagtcattcagatgaaattccagtccccggccagagacaccagcccgcctctgccttcctcctcccttcacaaatagaaacggaagggggagggagagaagtggaaaaaaaggcaaccggcgagggagggagggagaagccccggcggcgctccggcctgacccccgggcggctacttctgcgctcccccgaggcccggcgcccccgccgcggagagaccccgcgcgcccgtctccgcgctgggcgggcgcccgggctctgccgaggaaaacaaggattgatcaaactagaaaggaatttttctcaactgctaatgaacaggaggctcggctcccggccctcccctcccctcccccggccctcccccttcgcccccccggccccctcctccccactttcttttcttctcggcctctgctggggcctggaaggctcggggctgcggtcggagccagcctgcggcggcggggccaggccgagccgccaccctcagcgcccagccatcttgggctccgcggcggcggccggggtctgggcgcgctcgctgagggccccgcggcgtcctctcgctcctgattcttttttttttttttttggtgggatttttttttttccaaggggagggctggcggcctccaacaaattaggagagagagagggagaaaatgccaagtcccgatttctctccacctctgctccacccaccccggtcctgtccaaaaaataaaagaagatgagaattggaagaagtcggcagaaaggcgagagcccgcggtccccggctgctgcccaggcgacgcgtccggggcgggcccgcacccgttgctcggtccgaggtccgtctgtctgcccgcggcttctcaagggaggggagggcgcttcgggcagggtctccgcagccgctgtcgcctcagagctttatcctcagatcaaaaaagaaaaaacaggaagaaaaaaatcccaaccccaacactctcatcacagccaccttcagccatcttgcgcgtattattatttcaggaataatctgtttaataaaaatacctgcgtatccagcccctcccccgcgtcctggggtccccgcccccttttaataataatctcgataataaaaacgatcggcgggccgggcagtccgtggcggccctttcctgcctcgacttgctcgggcccggctctccccccgcgaaggggcgccccggggtgggggtgcgtccccgtcacccgcgcggggaggaaagggcgccctcgccgccgccgcgaggaaggcggcggcggagatgccgcggcccgcgggaccagccggaggggcactcgggggtcccggggcccccgccacggcccggcctgggagtccgcagccggccgtatacaatgggttcggagcagagcggggcaggcagggtggggaaacgggagggccaggggctgcagcgagccgagctcc

SEQ ID NO: 914156 - DNA, 4001 bp, Homo sapiens
gccgagatcttgccattgcactccagcctgggcaacaacagcgaaactccatctcaaaaacaaaaacaaaaacaaaaacttcccaagcaattctgacagccaattacaatgacatttggaaagccctagcctaactaacataaatacaaaataggccaatcacaagcaatatagaaatcgaggataatgagaatgtctctagctaaaggttctagcctagcaagagccttgaaacattttaaccaagattcaacaagaaacttcagttcttagaggcagattagccagaaggccagaatatggctttgtcagaaacttgtctgaaagaatggtaatcattaccttaaggataaaaaaaaaaaaaaaagaaaagaaacccagagtttagctaacaaatcaggaaagcagcagttctatgaaggaaaactaaaaaactatgatgataccacaatacatatccttgatgcaattcctcactttgacgtcctctgtatgacccatactttcaggcaacaaagcaaaactttaataaaagaataagtagtcgtgatactggaattaaacatctgcaggagtgtacctatttgcccataaacacttaaatctgtactgtcagttataattcccatcagaataatttgtttttgcatttttttaaagtgtaaagttttccatgggacactaaacaatgtaagaaagtccctgttactggtttaatggcgagacagaatacggccaaactctggagggccttgaataacctaactaactagttttaccaccacaaggtgcagaaattactaggctatcagctcagttaaggtaagagagttatctttcatcttcaagtctctataggctagcacagacctggcttattgtatatgtccaatgaacttaaggatcctggatgctttatgtgtgaaatcatccgagctgattaacggggtgattctctaggcttttctactattttcccagtgtacgtgaataaacgaatcaataaaatgaacactctcagcttagtggccaagttatatttagtgttcctcaaatgtggtccataaactacttacactggaatcacctggagcaactatttagaattgcagtttcctaaaaataccccgaactctccgaatcacaatctcggacagggcagggattaggaatctgtatttgtacaagagactctaagtaattgttaggcccattaaaatgtgaaaacgactatattaagtcttggttaacgaagtatatctgcatttccaatacattttgaggaatgcaactttaggggtgcagaaccagtacttccttttggggttcatccacatgaacccaacaaaagcctcctgagggatcgatcagattacagaaaacaggtctgcacgcccaagggcagggttttattgtgtaagtacgggatttttttcctcccgttgagaactacaactgccaagtaggctacaagagttcgtgccagggcaagtccaagcccgagatgcccgagattcctgtccagagctaattcaatggtcagtctccctttcccctccttttgtctcttgaatcacgagcgtcgcaaaaagcctaatgtgcttcccctctcgcagcgaccgcctcagcctggtccccacccgggctgcagtacctgccagcagcttctccttcaaccgattcagcagctcggctgaagtgggccctttgggcttgtgcacggcgaacacgccgctcaaggacagcagcttggtagccaaagcggccttggagaccctggcttcggatccggtcctggccgcggccgcaaccaccgcggctgcagcccttgctgacggggtcgcagccattgctgcgaccgttcctgcagtttcaaggacaggggatgtgtctgttttcaaagacggcgaagacaccaccgccgcctcagaagcggccatacttttgtagcccagacctgtttcatcgtggaggtgcacgctgatgatgcaacaagagtgcgcctgacaggaccctcttcctcataccgcgaagctgcgcagaacggagaggtcgcacggacttgtgggaattgtagtccatggccttcccatatagaccaagagcttgctgtgcccttggactttaaatagaaaattttaaatgttgacttttcctgaggcttgtgaagatccatggcttcctgggctcactgcttcattgattgtattgtgctcttacattcaggttcagaattagaagacatccaaatgtgagctctattagagcaaggaacttatgtaccacgttaactgagacattcccaaatgcctcacatgttgtaggcacttaaataaatatttgaaaacgtataaataagtatgaattcttcaaattccccgaagaaaccaagccaatggtaaatcacttgtgcttattttgatgctcttcatgcactcctgttcaccctccccaaacccccactgaccccactacaatttttaataattctgattttgaatatcagctcttctgtgggttgaattccttagtacactttgtttagatatcaaaaggtattcttgcaattcataaactttaaaccacttcccatttgagaccttctccctaaaagttattcactccctaacaagattgaggaatattgttttgattccagcacaaggcagagtggagaaaaattacttctgcaccagaaacattaaatgctatcataactattgtgagacagataaagtttgccctcattgttttttaggtttctttacaaccactctttgtcctcatcatactcttggactttaatatctagtattttagtgatgccccttagctgctcacaatcaccagttatggggtcccatttgaacttgcacccattcgtgcaacagacacatggcagaacaatttattaaaaggaaaaaaaaatctttgagggagttttttcagggtggaaagctgaaactcctagaaggaagtcacttactcttgtggtctattataaaagcctaagctaactgaaaagattggcatatcacaggattagtggacacctggccctgcttcaagatgttaatttttccacaaagatgttgtgacttcagaagggatgactgcacccaaaggagcatggtgtccattagcctcaggaaagagttctctattcttgtgccatggaagcagagagccagggacttgcagggaaggttgcaaggcttgatcaatgatgacttggatgactccaaggcacttggagattagaggccttttcccaattgtccggacatcagcaagcctccctatttctcttgtggctctgggggtgagggatgcagagggagaacagaactaggggtaacatatgatgcttatatttgaattttccatcagcccagtgtaggaccagagttaatctgatttaaagaaaatgaagaaatgtatatttcttgcatgtttgatttctgggatgctaggacacaacaaaattaatgctactctgctattatatcggcattcttgggatcagaagcaccaagctttgtttttctaaggtaatcaacatctcccacattgggcaggccttgaattcacaggttttttttgctccaatacatgtatgagtttgggctctttggtcaacagaaaactgattcataccagcttgggggcacagggggagaagatttatcagaaatacactgacacactattcagaacctagaaagttctctgtctctagctgcacatccttcttttatgctactcacttgtgtcttttttttttttttttttttttttgagacagagtttcactcttgttgcccaggctggagtgcagtggcacaatctcagctcactgcaacctccgcctcccgggttcaaatgattctcctgcctcagactcctgagtaggtgggattacaggcatgtggcaccatgcccagctaattttgtatttttagtagggacggggtttctccatgttggtcaggctggtcatg

SEQ ID NO: 914157 - DNA, 4001 bp, Homo sapiens
gcacccatgggctcagaccccccccacaaccccgtctccctaaatgatcctgctacgctgagatcaagctcagatcaataaacactactgagcacctatgccatgtccagcctgggttctaagaccacaccaagttcatagctggtgagggactttccagacttggaatagtgcctgcaacaatgcctcgcaccccacagaaatctcaaccatgctttgttaactaaactgaggatgacattaggtggcccaagcagtggagttcagagatgtggggatggatatatccagagtctccaactgaagttggggtgcaacacaatgagaaggaaagggaaaatacatctggtggccctgggtttccagggcctgtcactataacgttagggatcggagtgggatcagactgcgcgtggtggctcacacctgtaatccctgtgctttgggaggctgaggtgggaggatcacttgagcccagcaatttgaggctatgatcacaccagcagctaaggggatagaagggcatacagggccattatggtggagtctgggcttcattctgggggtgccagggcccaggaagatccctggaaagacggccgcccccaccaaccactcggctagctgaaatgtggcaaggacataggggtgctccgatggcctgtccccaggtttcccttcacaaatagagaagggtggccggagcactcagcaggcactaactgcttctggacttcaaggtcaaggggcaaggggaaggctacttttgaggatttggcaggccactctctcactagcccaagagcaactccctctcggaagggaggaagatcccctggagagcagaccactgccaagagcacacctgcagaggctccaatacaatgctctgcacagccgcccagcaccgcctgacctcccggatagcagcgccagcacagccaacgagtgtgtgacaccgccgcactcaccaccgctctgcgcccagccccaggccagtacccgggcccacgacttcccccgactccccctagcacggactgtttctcgccggagatcaactttaagtccccaagacaagtgctcctgcggtcccagggccaaagtccctccacacaccctcacacaggcacttcctacccacccgcaccccacccctgggggtggaggagaagcagcagcggcccgggacaagcacagtccgcagccacaaacctcactctaccagaactccggctaggtcaggggtcaggctttgctcccaaacacaaccccacacgactaacgcggagaagctgggtcaccgcctactcaaactccggccgtcccaaacccaagccgggcagagtgggacccacggcggcgtgggagactgagcacaaccacggcggggcaggaggaaggggcggcccgccccggcctacgcccacccccaccccggacccgatctcctgggagccgagggtgggtgactgagccgaaagggtggcccatccccgagctcgctgctggggacgagaagcagagccccgagcagcagcggccgtccaggctcccgtcgccctcaccccgcccggcacgggcgcgcactcgccggggcgcgctgatggggcgagggctaccgaaccaggagtgccggccccgggcccgccgcggctctcgtccgcgcggcgccggagttcggctcagcggggtcccggcggaggcctccaacctctagcgagcaatcctggcagacaaagccagcgccgcccgcggggccgctcctgggcaggcggggagggaggctgaggggccaaacagggacctaaggagcagccctcgcccccggagaacgctcggggaagtcggcctcagacaaagaaaggggcagggcccgacgccccagccaggtctccgcgctctactcacccgcgcgcggcggcggcagcggcggcgcggcccggctcggccgaggaagttagagcaagttccgcggcgcggggcgggagggcgcgactcgggccgtccgagcggcgggggcggggcgcggaggggcgcggaggggcggggccggaggcgcggcgcctgccgtctgccgaggaaggggcgccgcttccctgcgccgcccggtgcggccccgggcgcctgggcccgccctggccccgcccctcccccagccgcctcgcccctcccccaccgcaccccgcctcccggcccgcgcggcaccggggaccgcgaggccgggtcgccggcccgcccctttgtcccgctctgggcggtgccggaggcttggggcggccccggtccgcgccctcccagtgggtgcgcggcgcaggccgggcctggcccggggccgggcacttgtagccgccgggagcgctctgagccgttgcgctgcgcagacgccgctctggccttgtcggagccgaacctgggagaagcacgagctgtgggaggcggcgtctcgagggatacacgggatgaccgtggagagcgggcgaaggattaggaaaatggctgtggtggagataagaggcgttcctgcccggctttggagcctgggggcgggggtagtcttcaatcaaaagaaggatggggaaaaggtttttatttctttgtaaaccaaggagtaaggacacgctccttctggccttggtgctaaaaataccaagctttctttggatcgtggctgagatttcttcctaacctttacgctaaagaggtggctgggacgattcttgtggtgtaggggggtttccagggacagccaggggtggcgcccctctttggatcgtggctgagatttgttcctcacctttacgctaaagagatggctgggacgattcctgtggggtagaggggtttccagggatagccaggggcggctccccagcctcagcctccctacctgtagaatgaagcatgccacacctctgtttcttaaacttattcggtggctgagggccgagtggtcttctctgttgagtaacaccaaacagggatctattaaaactgggctaagactggttgccacatgccagtacaagcaaccaacaggttaattccaatggaaggaggaaatcttgaaatggagactgttcagtccattcccaggtttgtttgggttgttttttgagctaaggtatcgctttgtcacccaggctggagtgcagtggcatgaccatggctcactgcagcctcgacctcccgcctcagcttccccaagtagctgggaccacaggtgcaggccaccacacctagctaatttttttttttttttttttgtagagacgagatcttgctgtgttgccagtgatggtcttaaattcctgggcttaagcaatccttccgcctctgcctcccagagtgctggaattacacgcatgagccacggtgcctggctaattttatttgtttgtttaattaagagggatgcaacctgtctgtgacagcccaggcagctctggaaactccctgggaacctgtccattcattcagcagatagtgagtgtttgtctgagtgcctgataatatgccaggccctgtgtgcatggtgggatacttcagtgaacaagacagctgaggccttttgcccaataaagttaatttttagtggagaagacaaatacataatcacaagttgaagtaaaggctgggacaaaaacaaggggctagaatagagaataaaagctaccttagatgaagcagtcagggaaagtgaggaggcgatgctgaaattgaagtcaaaagagtaaggagttagccttgggaaaagttgggcagagacattcctcgctgagagcagtaggtgccttttcagggtaagttctggatgggtcagggaactgaaagaaaatcagtgtggctgaagttttaagcctaggggaagaggcccaggatggagtgagaaggtgggtgggggccaaagcatgcagggcctgtgggctgtgtcaaagaatggagactttgttgagccttggaagggttttatgcagaagactaacatgttctgatttaag

SEQ ID NO: 914158 - DNA, 4001 bp, Homo sapiens
gctctttcaactctgatttacagagagaagggctcacagaacacacaaggggcaggcacagaaatcctggggacttaggggacctatgagaccatctagggcagcagttttcaatactgactgcacactagaattaccttaattctagtaagtaatttactacaattaagcttatgtaaatttaaataaatacctatgccagggcacaagaatctgatgcaaccgctgatttatagctcaaatcacccccactcccatcccacatatgaccttctgtctccctagagcttccaccaacaggtccttgctccatcctccgccccccaaacatactgttcatctctcctccacattacctagagtcagagaattggattggaaactggcctcagactagtcttctagatggaaaagtcaatgaacagttctgaggcccaaaacaggaaagtgacttgcctaagatatccataagtcagtaacagagctgaatctggatctccgattaccaggcaaggccccacccacaaaggggtcacagggaaagccagtcctgatggcaaatccagcagctcctgctagcagaagagacccagcaaggggctaaggaggacaccaggggagagtgtgtgtatttggtgggaatggggtgtcagtgaccaccctgggtccctgggcaagtctgctcttgtggcatactgcaggcagagagcgattctggagtgacaggggcggagctggcctataggaagatatcctcatctctagaatagggcccagcctaatatgaaacgcccttacagaaacccaatctcttggggcagcttacaccacaggtgtccaaattccctgcccacgatagtaataatgtctcacacttcttgagctcttcactaggcaccatacccggcctatttcacgtaatctccgcgagcatcctacaagttgaatataattactgtgtccatttacagatgaggaaaccatggccgagaggaatgaagtaacttccccaagatcactcagcaagtgctcatttcagaaacgcacaaactgaaattggaacgatacagagattagcaatgttttaaataaaaaataaaatataaaataaaagaccactcggagcgacggaattcaaagcttggttcatgtctaaacactaccatcctgccccctaacaaggcagaggaggaggtaaagcccagcgacagcggaaactgagcacctaggtgtgcaggagacgtcgtctggtggacttctcctcgccacgcaggaggcacgtgcatccaccaaagaggaaaccaagacggagcggggaagcgtctcgctcaggggcatcagcaagtaactagcagggaccagacccggaatccaggtctcccaaccccgactgcaaatcctaactacttaagctccacaggccgatgcagaggcagtcagtcctaccgggtaggcgtggtgggcgcggccagcgcgttcacctcagcctagccagccggccagcggacgcacagcgggcaaaccgcccagccggtgcacacaggtgagccaggtggcactcggtcggtcgacaaccggctctcacactcccgaaagggcggctgaaaattcaggctgagctctggccgcccgaatgtgaggtagaaagacaaggagtccgcgcgcgctcacccgcgcactccctggagcggctaagtgtggacccaaccccgggccagtgagggggcggccggattgtgggtccccacccccatccccgggccctactggggtcactcacccagaacacggtggaatagatgataagtgaaaacttgagccagaggtaggagaagcgcgcgcagtagcgcacctgctccgagtccccgcgcggcatcctgggcgctccccgcgcgggttacgggggctccggggctctccggctcggtccctcagccagcgctcgtggccccacctgcggctgccgggctaccagccccgccaccggcgttctctccgggactgacactggagcgcggcaatcacagccccagccgggaagcctgccagccctggcggccaatgggaggccgcggctgcctagcgtctgggagggggcgggccaggggcggggctgctgccctgggccctagaggggaccaagaagggatgggagggggagacggtcttgcaaatgagctcgcgtgcaactctggaaacgcctgtgctaatgcagggggcgtgggagaggtgaaccagaggtgctctaaggagagagcgagcgtgcctaatcggggtacatagaaatgcaagctttcctcttgtcaagagggaaaactttgggaaaagggcaagaattaatcgcccaggtgttgaaagtgcaaatgagtgtgctaaacgtgaatggaataaggaagtggagttgctcggctcaggaaggctcagggaggcagaccagggtggggctaataggcccccatggagctggagtctgaagtttgctcgtgaaacagatctgctgaaggccttcaccaaacgacctcggaagtccccttcttttgccaggtgataacccagccttgggaagggttcctcccgggaaaccccatcttcaaactaggttgaaggcctggcgcggtgactcacgcctgtaatcccagcactttgggaggctgaggagggcgaatggcttgagccccaggagttcaagaccagcctgggcaacatggcaaaacgccgactctataattaaaaaaaataaaaagccaggcacggtggcgcgcctgttgtcccagctacttgggagacaggcgggagaatcgcttgagtcagggaagtcaaggctgcagtgagccgtgattgtgccagtgcactccagcctgggagacagagtgagaccctctctccaaaacaaaaacaaaaacaaggccgggcacggtggctcacgcctgtaataccaacactttgggaggccaaggcgtgcggatcacttgaggtcaggagttcgagactagcctggacaacgtggtgaaaccctgtctctactaagaaatacaaaaaaaattagccgggcagggtggtgcatgcctgtagtcccagctactggggaggctgaagcaggagaatcgcttgaacccgggaggcggaagttacagtgaaccgagatcccgccactgcactccagcctgggtgacaaagggagactccatctcaaaaaaacaaaaaacaaacaaacagaaactataggtgagggaggcagctccctctcttgcacatagccagccactaacccagcctcctcccacctggccttttctcagcctgggaccagaggtggctgtgagcctgtctctcatgctagatggtcccagctttactcactgttgtttcctgtctcccaagcctagctcagcctgggacttgggagccagacaatccctgctgtggccttcagtaattaaatccatggcagaggtcataagctctagcagtgctgggtggggtccctggtggtgatttcaggaacgacactcttatacaagtccccagtcctgggttcccagggctcctgcatacacaaactcaacagagaaggacagactcagagacttagtccaggctggctttagcccccagagctctgccctaggaggaagaaagcaagattggggggtggggagggaggcagtgccatgcctggaagggtaaaaggaaaccaatttcctggtacaaaacaaacaaaccttgggaggatgtttgtgtggggtagagaaatagaaccagagccaggcacagtggctcatgcctgtaatccctgcactttgggaggccaaggtgagaggtttgcttgagtccaggagtttcagaccagtctgggcaacgtagcaagacctcatctccactgaaaatcaaaaaaattagccaagcatggtgtctcgtgcctgtagtcccagctacttgggagggtgaggtgggggtatcacttctcgagcccaaaagatcaaggctgcagtgagctatga

SEQ ID NO: 914159 - DNA, 4001 bp, Homo sapiens
gtttcatccagaaaccatccccactgccgactccatggaaaaattgtgtcccacaaaactggttcctggtgccaaaaagttgaggaccactggtctacacagaccactagtcagaggaaagtaaggagagggctctggtcggccacacccctgcaatctgacttggactctgttcatgctcaatggcatcaaacctttgtactttgtctctgtgattcacaaggcataacagccctctgcttcatgaccaattcaagttcactaccttagtagggcttccatcttgtttattttctgtgcaactatcagtctctctaatttagaaagcacttcatttaggacaaactaatattccacctctcaagacagcatattctgttataaacaggcttcgaataccccttatcaggcttcagataaccttaatcttattcctctccccttctgtcggacttaaagtgctgcaaatacatcagctgctgtaatctgatcaaaacttggctccttaaatttaagttaacattttaaaaggagagggtgaacgttcattgtttctacatcattaaaacctcttactttgtaaagtttacatgtagatttctctgtcttctccactggctaccacccagtcctgtgttacagtgacgagtaaaattcaggtgtacatgtggtatttgttcataatagtcacagtaaaaataatcactaacattaaaaaaaaaaaagattgttcctcttcacgtggtctgttcaagtgactcagaaagcagagtgatgctgttctttttgaaatcagcacgaatagcctggactaacaagcatccttcgtctttgaaggagcttagcttataacataactctgtccaagggtgtagaagactatctttgccttattcttctcttagcctctccctttttttccaaattctctatgaaaatattagtcacactataaagtagaagactataaaatgtccactgaacgtcaacactgataagtcatagcacattattaaacgctgctataaggattatttgaattactagaaaagcataactctcagttaaactttcaattttgaggtctttgtagattgatatgcagctgtgagaaataacataggaagatcccttgcatccgttacccatttcccgcagtggaaacatcttgcaagaccataatacaaaatcacacccagaatgttgacagtgataagatacagaacatgctattatcacaagtctctctcatgttgaaaggcataatttttaaaagcaaaacaatttaaaattttttaaatgttggacagagagaccaatggggtgagaaatcaaagatcaagaagcagttcgaaatgttgcttccattgaagaattaaaaattcaaagatactgaaaaactggcacagaaaaaaataaagggcaaatggatctgaaaaggtcatcccaaaacagaattattgtaagttattctattcattgtggtgcccaaagaactaaactcaagggagggcaaagaagatgtctgcgcactttaccctgccaggcatttatgaggttagccacggttacctaagtctgaagtcctcagaaactcttaacagcctaacgaaaagtgaagcaatgaatatctacagaaaaatcagcactctgggcctaaaacaaaggtgaaaactaaaggaaggaaaggtttttgcttcagtgcttcaattaatggcagtgagctactgcaaatcaactgagctttaccttgaaagaagcaacattacagaggaatagattacagcctgtccacatctgctcccaactcatctacttggacattgaaagaaacaaatgtttctttacaaatgtcttctcttgcattacaattttattaagaattgtttgctgtgggaaaagggccaaatatgattagtaaaatttcctacaacaatgcataggcgtgtagtcacttaccatgctgatgagaacgtgcccttcctgccctgtagtaatgactgaggagcctcccagctgagctttatcacagggcccggaaatgactccacctgagggctggagctttcttcacttaaagcagtatagcttctttttagtttttttagttatctggtctcagagtagctgtgttgggcctgaacaacccgggataaagtttgtacacagctgcagatgaactactgagagcttatccaaatctgcgtccaacttataactatgttgaaaagaacatgtgtcttttaaaaatcacccttttgggttaagaatttatttagcattggcagagaaaaggaaggagtatgagtaaaattttctgcaacagcaaagtagctttttctattgcatgagtactatgtgaatatcttcttaaataaatttaaacaatccctgaatacatacagcaaaccaagacagtgtcctttttacatctgtgtcctatgcatgcctctcaaccactaccacatccaaacatatgggaattttctgtttttattattattgtcttttgaacttttatattattatacataatatatacttatgttattattttttattaattgcactaagatcagatcacacatcttaactgagttctctccttatatatttgctaaagcttcctttatattctactatatggtcaatttttgaaaatattccatgagtgttgaaaagaatgtgcattctacatttgttggatgcaatattttagatagaccgatcattcaatcaatcaatctattaaatcaaatggatttattgtgtagtccaaattttacgtatcaattatttcaaaagatgtattaaaagttttcattataattgtgaatttacccattatttctttttctgtcaatttttcctttatacattttgaggccatgttatgaagagcacataaattttaaattattatattttcaaaaactttaacaattttttatttttaaattaccctccttatatacattaattatttttaccttaaagtttttttttttttttttttgagatgcagtcttgctctgtcgtccaggttggagtgcaatggtgcgatctcaactcactgcaacctccacctcccaggttcaagcgattcttctgcctcagcctctcaagtagctgggattacaggtgtgtgccactattcctagctaatttttttgtatttttgatagagacagggtttcaccatgttggccaggctggtcttgatctcctgacctcgtgatctgcccgccttggcctaccttaaagtttttatgatcaaatattaatattactactttaatacagttttttggttcacatttgaatgatgtattttcccatcgttttacattcttagaaacttaaaacctttccatattctcatattttggatgtgttctttgtatgcatgatataactgaattttttttctatttttgtatttgaattggagaattcagctcattacatttaatataataactaatatagttgggtttagatatagagtactattttattttgtgctttctgtttgtctccattttctaagttctcttttcttcctgatcttcttttgaattaatgacatgttttgttagcatagtaacaattttattattcagtaatcaaaacaaaatttctgttactcaagaatcttggtttctaccaattcttccttacaactttgagaaaatgaagaaaccatagtgttcttcagcaattttctcctgaacttattataaattatactttctctcattttgatcttcataaagtcaatcctatctgtctctgtcaataactccccaaatgtttagcatcctggtagttccatataatgaaaagaaaaattaagccagttccattttataaaatcagaatgatatttattttgttgctgtatcaaattttctcccactggtcccagatattttcagtttgaaacaagatgagggaaaaatcagataatgtgagtatctcatttctagtccactgatgta

SEQ ID NO: 914160 - DNA, 4001 bp, Homo sapiens
actgctctgagacacgcttgaagagttcctggatggccgtattattcccaatgaaggtggctgacatttttagcccccggggtgggatgtcacagacggctgtttttacgttgttggggagccagtcagcaaagtaactgctgttcttatcttgaatgttgaacatttgttcatccacctccctcatgggcatgcgacccctgaaaatggcagccgccgttaggtagcggccgtgacgggggtcacaggcagccatcatgttcttagcatcaaacatctgctgggtaagctcagccacagtcaaggcccggtactgctggctgccccggctggtcagtggggcaaagccgggcatgaagaaatgcagccggggaaacgggaccatgttcacggccagcttccgcaggtcagcattcagctggcccgggaagcgcaggcacgtggtgaccccactcatggtagcagacaccaggtggttcaggtcaccataggtgggtgtgggcagttttagggtcttggaacatatgtcatacagagcttcgttatctatgcaaaaggtctcatctgcgttttctatgagctggtggactgagagggtggcgttgtagggctccaccacggtgtccgacaccttgggcgagggcaggatgctgaatgtgtttatgatcctgtctgggtactcctcccggatcttactgagcagaagggtacccatcccagacccagtccccccacccagggagtgggtcagctggaaaccctgcaggcagtcacagctctcagcctcctttctgacaacgtccatcactgactccatcagctccgcgccttcggtgtagtgtcccttggcccagttgtttccggccccacactgacctgtaagacagcacagccggtcactcgacggccaggtatacggtcatcagtggtcaccaccataatgcagaaagagccaagcgtcacacgtgaggtgagagcaccgttcgccctgcaggtggagcagatgaaaccccctcccccagagttacaggacagcagcttcccctgttaggaattaagacaggagtcaaacctgagacgggttcacagacctcgctgcaggtggctcctgcccattctcaggaaaggcagtagccacggccccagctcaggttcttgcagggagtttacatcagtaactcctcaccttgaggagacaccagggccttcctcccgaagcccatttaggagaggcagattgagcgactcgactcggaggataggagggtgttcaggggccctagctccacagttcccagaggatgaccttagcacactcctggattttgagctgccctggctaaggagccgcaccccagtcctcgcccgcagctcaccgaagatgaagttgtctggcctgaagacctgcccgaagggccccgagcgcacagagtccatggtgcccggctccagatccacgagcacagcgcggggcacgtacctgccacctgcgtggggcgggagggcatgagcgaggggagggccgcgttcccaggagggcggtgggggaaggacgggggtctcaccgctggcctcgttgtagtacacgttgatgcgctccagctgcaggtggctgtccccgtggtaggtgccagcggagtcgatggcatgttcatcagagatcacctcccagaactgcaagagacgggaggagacagacaggccggggctgagtcagggaggcgccccagccgctctcccacccccaccctcatccgcacccccatccctaggccgccctgtccctggggtccaccccggccgcctcgccagccacccggttccaccgtccccggcagggagcccaggggccgcaatgcatgggcaccgcccccgccactgccaacaccttccccggccacccggcaggcccgggctaggccctcagagccccggctgccaaccttggcgccgatctgattcccgcactgcccgatctgcgtgagcacgatctccctcatggccaaggcgggattaggacggcaggagaaacgtgagaaggaggagcagacgcgcagcgacccagcccgccctccgccaacgtttaaatagccccgcgcccacctccctccgcctcggattcggctcccagaataagcaacagctttacttccacacaggtgcacccacctgtggatcccctggcgctgaacatctgttggaaagctcaggtgtccttgcgtggtcctttccacgttggggaaagctgctcgctggagaacttcctcccgcgtctttagtaagactaaatccctagctgagctgaaactgaattttcctcccatgtgggaggggaagactcttgtttccatatgcacggagtgcctttgcacctgtcctagattgatgacatatttttgtaattgatgagtcttttcatctattaggagatctgtggttaggaaaggccttccacatgtgaactcaacaggactcaattatacgttttactttggagcagttctaacccacaataagctatgggtgttagagacagtcaggcctctgatttagctggagtcttctttagagtagggttagccctttcacctttccagaggactgtggtctccagcagagtgaaggtcatattggattcttaaagctgaggacaggttttgggatacgcctgctgtgaaagatgggccattgtcactttgcaggcttttggattacccaaactgaggagttatttcttctggtaaacatttttcagatggggtggggaatgcctcgatctaaccagtgaaggtgtcagtaagcattagcaaatatttgaatctcctgcagaaaggcttccgggtaaattagagtggccagttctcacctggataggttcctcaattttggacaggtttaactggagaaggagaaaattgctggccatttgagtcatgtcaggcacaaagctcacagggctgagtcacctgttttagtgtcttgaaaagatttacccctataaacaaatgagacattaacagaaacaaagaatcccttctagggtgaaaagaatcatgaaagtgctgagttatactcctgtgattggtacttggcattagtaatttattaccatcattcagcccgaggggccctggactgaaatgcaatccctggcccattttcgttcttcttcagggtattctggcccagttctatgtatgctgaccagcacgcccacaagcttcattggccctttcagtgcaggggccttggctgtggcatctacaagggcatttccttttacatggtcagtctctcttttgatgtcctctgcaattaattatactcactttttggcagcaaagcagcactctaacaagctcaaaatctgaacgatgttgtatggaaaagcccttgggggtcaggagtccccacccattccaaattgcagcataagcatgaagcactaaaaaatcatacttggaatcagtgtaaatgttaacttttaaattctttcccaactgcaggggcctagttagttcaattaactcagctttttgagctgctgaggtcgaagccagcaaggcttgtgccttgattgattctcttgtgctaataatagcatatttagccctcctgttttcctgatgcataaaacaacttgcatctgttaaccactcttccttgggatggtccagggaatcatctctcttatgtctggcctgctagaatcaatttgtttcataacctgtgacatgctttggctgtgtccccagtcaaatcttatcttgaattgtagctcccctaattcccatatattgtgggagggacccagtgggaggtaattgaatcaggggatgggtctttcccatgctgttctcatgacagtgaataagcctcatgagatctgatggtttatttatttatttatttttgagacagagtcttgctctgttgctcaggctggagtgcaacctctgactgctgggttcaagcgattcctgtctcagcctcccgagtgg

SEQ ID NO: 914161 - DNA, 4001 bp, Homo sapiens
cgtctagccatggccgctgacttggccttcttgatgctcctgaattcttactattaatcacacaaactgacaggcccagcaactgtgactgggagggactgacgtcctcctcacagaggctgtgagctaccgcagggacgcgtgctgagggaagcaatgcacgcatgtcacactccaccacggacaagcggggcacacactcctagtgagcacacactccaagtgattaaaacacagagggacgtgaaaaagagtctctgttgagagctcaaagctaactgtacaaattggtttgaaaaatgttattttacaacttgtggaaaatgtcaagagcccaaaggcttttacagagacagaaagtacagtcatgcatcactcaacattctgagaaatgcctggccaacatggtgaaaaccagtctctaccaaaaatacaaaaattggccaagcctggtggcgcacacttgtaatcccagctacttgggaagctgaggcacgagaatcgcttgaacccagcaggcagaggttgcagtgagcccagatcgcgccactgcactccagcctgagcgacagagagagacactatctccaaaagaaaaaaagagaaacgtatggttacatgatttccttctgtgcgatcatcagagtcactcgcagacctggatggtgtacggcctacaatgcacctaaaccacctagaggagcctcttgctcgtgggctacaaacctgcccagcaggtggcggtgctgaacactagacaactgtaacacagagatatttgtgtatctaaacatggaaaaagtacaggggcaggcatggtggctcacgcctgcagttacagctctttggaacgctgaggcagcaggaccacttgagcccaagaatttgaggccgcagcgatctatcagctatgatcgcaccattgcactccagcctgggtgacagacgagaaagctaaagcctctatccgccactgggcccattctctgcagtagatctgaagcgtccactgcttcccgcgtgtgttgtcattcaccattttaattaggtgactctttactctgacgtctgtctctcctacaaggctgccgcgccctcctgtgatgccttcccccacacgccctgagcacctagcacaggtcctgtgtttcacgggagctgcggggactggagaggtcgacaggaccccgacaaaccaggaaagggcctttgaactaaagtaacgggaagtcacccaagggctttaaattaaaaacggttacaataaaactggagtcactttggctccagttcgcgactggtttagagggaacaagatccagggactgcagcgggagacgacaggcggggcaaggcggacgggagagggcgtgcgagagggggacctgcgacccggcttcccagggctgggaggggacacccgggacgacccggaggcccgctccgccccgccccggctgagtgtcgggccgcggggcaagacgctggcctggccggtgcaggcccgaagggcttcggccccagagttcggggaccgctgcacagccagagggagcgcgcgggaagagccgcgtcccgccagccccgtcgcctcgtgggcccccccgggcctggcagtcccccaaccccctcatcacgcccgcgcccgcgttcggccaggactcaccgcagtcccggagccacagcccccgcgcagcccccgacggcggcggaagtgagcgtgacgtcacgtccggctcggctcgcggacggtggccgacaggctgcgcccgcccgcgcccggggtgatgcagttgccccccgcgctgtgcgcccgcctcgctgcggggcccggggcggcggagccgctgcctgtagagcgggatcccgcggctggggccgcgccctttcgcttcgttgcgcgccccgtgcgcttcccgcgggagcaccagttcttcgaggtgcgtgagcaaaagagggaaaaagtagttgtaggatccagtggggcctacggcggcgaggcggggccggagcctggagtgggaggggcctacgactgcggggcggggccggagcctgggacaggcgggacctgaggtggtggggcggggccggaacgtggagtgggcggggcctgaggctgtggggcgggaccggagcgcgggatgactggggccacgggtgtgggcgaggcctgacgcggtgggcgtgccgcgagtcacctggccccgcccacggcgcacttttcctgcaggatggggacgtgcagcgccacctctacctccaggacgtgatcatgcaggtggccgacgtgcctgagaagcccaggtaagcgaatgggcagtgcctagccagtgctactcctgcgccgcctccctgaccggtgcctggtccctggggctgtgctgccgctcttccatgtgcggccgccccaccgaggcgctgtgcctgtccagctttggcgtggccgactcttccaccacctagcctgtttgtgaaacttaattcataaaaagagggtttgggattgcaaaagatgcataggggctttattggacgtctcaaagggaaactgtgcagaaagtccagcttggttcctcgcaccggaggaagggctcctgaagcacgtctccttggcagggtgcccgcgtttgcctgccaggtggccggctgctgccaggtgttcgatgccctggacgactacgagcaccactaccacacgctgcacggaaatgtttgctccttttgcaagcgggccttcccttccggacacctgctggacgcccacatcctggagtggcacgattcgctcttccagatcctgtctgagaggcaggacatggtgggtgacaactgcacagccgccgaggccaccccccattggtgatgggctcagagtgctgcccccagctctcgggtgctcgggcaaggccggggacacctttccgcccttggcagctctgctacgggggcatggcggtgggggagggccaggggtcagagggaggtgacacggtctccatttcagtatcagtgcttggtagaaggctgcacagagaagttcaagaccagcagagaccggaaggatcacatggtgaggatgcacctgtaccccgcggacttccggtttgataagccaaagaaaagcagaaggtagggagccgccaggctcagcacgtgtctgcttttgattttaggaaaaggtttccaactagccggaatgcatagacggtcagacttattaagcacttgtgtgtcacctaatggggtgttcacctgcaggtacctgaagccctggcaacacagctacaggtggttgtgccagcggccaccctgccgaagggaggctggaggggagcccctggctgcccagctctgtgccggtggaggcagcagagggggtgtgggaatgagcgggcgcagcgcctccgcactcacacccctctgggccatgcctgtacctcctgcagcagtcggccgtggtcatccgcactcacacccctcggggccgtgtctgtacctcctgcagccgtcggccgtgctcacacatcatgcagccctggctttccttttgtcctggttggttgtgcgcatatgaacttgatgacaaagctgttgattaacatgttcctgcctagagtgcactctgggaaatacttccaggaacaatctttttttttttttgagacagggtcttgctctgacacccaggctggagtgtagtggtgtgatgtaggttcactgcaacctccacttctcaggctcaagcgattctcccacttcagcctcctaaagtgctaggactaccaacacgcatcgccgcactcggcaaaattttctattttttgtagagacagggtcttgctatgttgcccagtctggtcgtgaactcctgggctcaagccgtccatctgcctcagcctcccaaagtgctgagattgtaggtatgagctaccatgtccagccggaacaatttttaaattgtgttatatttcttctttttttaactgatgaggtgaact

SEQ ID NO: 914162 - DNA, 4001 bp, Homo sapiens
aagtcatggctgtcctataggccacagtggggacacctatggcaaaactgggcagtgttacccacacctggctaagcttggggattcaggaagagatttggaaaagcctgggctgcaaggctgggctgaaccatgtacagctgcgtgggccacccccctaccttctgattacgtagaaactcacgtttcactcagacgggaagctctggctaagcactaaaagatggataaaattaacatacccatctccttaccccaggagagcaccatcctgggcctctgggaccttatcactttcagaggagaagcagcagggttagggaatctctgttcaaagggccagagaaccgaggggtatggcgtgcagggctatcagacagtgaagctgcccagaagaaactcagcctttgaggggagctcaaagatgccctgttccggattcagggtgtcccacagtacccaaatccagagctgcttcgagcttgacaccttgccccagattctccccacaggggttctgggtataaaggatgaggggagggttccaggtctctacccactacacgcccaaagcatccgcgtgacacaagaaaggcctgcacaatactcaagagtattagggctggacccagatctgagacctggaaagggatgaagtggcgtcagccctgcgggcttacttgggggtggtggagcgcaccaggaccctggctgcttcccgaggggacacgtgccgacaggtcactacaaggcggggtgccacagccactccggagccccatacggtgccgcactccaccaacactgccgcggctgcccacaggggcccggagtctcggaggggcagaccccacgggacgcccacctctggcggcagaagggcggccagggcagcggtgctgtgcggcaggcggtgaagcgcgtcgcgggcggcgcggaaaaggggggcggcggcgcagagcagcgtgaagcccacccattcgccggccttccaacagagcggcgccaccaccagcgccaccagcgcccccgcgggccgcgcggtgaacacgccgccgccctcggtgccgggcaggcagcgtgcgtcggtaagcagcagtgggccggccacgttgctgagcaccccgcagctcagcgtgttgagaaagatgtcggggcagaaggcgccgaaaggggagccgcagaccagcaatggcgcacccttgggcacggccccgagaggcgacaccgccatggctggcccgcgctcctcctccacctcctcctggcctagccgcacgcccagcagcgcaaaccagcccagcgctctcagttgatccgcctcctcgtcctccgacacttcgtcatcccgcgccgcgctcgagaagcgccactgttccgctgcctcgtccccgaagaggcgcgcgaagtgggcccagaaggccgggcagctcagcagcagcagcagctcagcaggaagccggggctgcaggggacgcccgcgggacggggcaggtgggccgggctcgaggctcgcgcactggggcgtgcacagccctgggcggccccgctccgcgccgcccccgggacccgcggccgttggggcccactgcacgtgcaggcgcaggtcgtccctgcaactgtcgccaggcaggaagacggcgccggccgcggtcaggacttcgctgccagctcgcaggaaggggacgaagatgcccccgtggcaaagcaccaggcccgggctacggctcaggattaccccgctgcagctccacgggcccgcctcgggctgtccggcccgggaggcgctcaccatgcagcccgcctgctcggccgccctcatggcagacccccactgccttctcatggcctctaggccggacactcgggagcttctccgagaaacagcaagctagcgagcgaggacccctacccggtccggctgaagctgcctagcgccacccacagctggaagcgagaggcgcaagctctgactcacgtcttcctcatcgagcccgattggctaagccccaattgacccgacccgattggctgggcttgtaccgagctctgattggcttcctattctgattttttttttcctttccccgccctcgttagtttgtccaaccggtgggacataatctgccccattcccccggatgagccccggggagagtaagaggagtgcggcgtcacgaggaatcagaggagaggagggtgggtcccttcaagcctagtctcgtttgctggaatgtgggaaagggaatagaaatgagcgctgacgtgcctagatttgcccaggccacgacagtacctgtgagcatctgcccaggtctaggcgaccttcagcctctgacccttgggataatatggaccaaggaaatccttggccaattcagtgttttgaaaatttaaaagtaaaccctatagcaatccactagggggcatggaactctcaagattactcctaggatttttttttgctgccaaagccccaacacaaatctccgagaaactggatttgctgtaaattaaattgccctttaaatcgactatgaacagtagctgaaatcaaaaattttaatcatacaggcctatattttacagtgtgcacatttcacataacataaccaccagccaggatttatctaggccagggtccaaatactttctgtagaaggccagaatggaaacagttccagtttggggggaccatacaacttgtctcaaatagtcaactctgcagctgttgcatacaaaagctaaaggaatggcggtggctgtgtcccaataaaaagatacagacattgaaattttaatttcatacaattttttgtgtccaaaaatagcattctttaaatattttttccaaccatttaaatatgtaaaaacctttctttgctcacaggccatacaaacacaggcagcaggcccgatttgacccacaaggcatagtttaccatctctagtgtacactaacataaactgctctacttttccaaagaagtacgctttaggacagaggaggatgaacgagtatgtcggggagtgggggggcgcggagcttcatgataccctcaatcagtcaccacaagctagacagtttacaaaggtctgctttatcactgaattgataaaatacacattattttttatttatttatttatttttttgagacggagtctcgctctgtcgcccaggctggagtgcaatggtgcgatctccgctcactgcaaactccgcctcctgggttcacgctattctcctgcctcagcctccccagtcgctgggactacaggcgcctgccaccacgcccagctaattttttgtatttttagtagagacggggtttcaccgtgttagccaggatggtctcgatctcctgaccttgtgatccgcccgcctcggcctcccaaagtgctgggattacaggcgtgagccaccgtacccggccatcattaatttttattaaggttactgtattgcttaccatatacaattgctacttaaattctctaatctttctgcctgaattctttaaataaagttaacactgcttggtataaccccagcacaacacaggataatgctcccagtactcccagtgacacaaacctgctagagaaaggaaaacgattatccatgatagtatgaggcaggaataaaattaggccatcttgccatagcaggcggtcttcttttggttctatgacacagaaggtggcttgatcacagcacaatttctttatcccaacttcctagcaatcaaagagtttttctcttggtggagcacaggggctcacacttggaatcccagcacgttgggaggctgaggtaggagaatttcctgagcccaggagtttgagaccagcctgggcaacatgatgagaccttaactctacaaaaattttgaaaactagctgagcacggtggtgcaaccctgtggtcccaagctacttgggaggctgagatgggaggatcacttaagcccaggaggtcaaggctgcagtgacctatg

SEQ ID NO: 914163 - DNA, 4001 bp, Homo sapiens
ttactgtggacaaattatacagcttaagctattgttagttgggtatggtgacttgtgtctgtaatcccagactttctggaggccaggagttcaagatcagcatgggcaatatagtgagatccccatctcttaaaaaaacacaatgaaatttaaaaagctcttgtatgtgcaaaatcatgtgaaaaattctcacaactaggaaagaaggaaatagaatttgaaaacttccttggaagatgtgcattttctgatccaaatgtgaaccaatattacttcgtcattaataagtatgcaaggtatggtaaagatgctaaggcttcaaaattagggtatttatataaaacaatgtgtaattgcgctaccttcaaacaagaaaacattattacttaataaatgctgatgctgattgttaactgtatgttttacaatgagatgacctttaaatggcacaaaaaataacaggtgatccacagatttagaatttgaaaataaaaaactggcaggctctaaaagttgctgtcctctgtacctaaagatgtcaccagtggcgagtcagaatgcaatgcgtacgtcactatcactgctctaacatatactattgctataatggactcctggtcaaaaaagtggataaaaatgtgggcatcaatttcttctgaaacaactacaaaatacactgtccattgttgcttaacttagtgaaaagcactccctatttaacaaacacattctcaatgttgccagtgtgaactgtaactgtaaaacctaaaacttgggtcagtacacagaccaacaagaaataaaaatgaacagaaagaaatgcccgaatctgaattctgaaggatgttcgcatctgaaatggtggcaataaatactgtgaaaaaaagacgattccatacacagggttgagatgggtaaacagttgttggatgaagatatatatttcttcctcattctatacccatgtgtcaaagcatcaaaacaatttatttgcgacagtttatgttgtgtctcgaactttacatctaagtttatcatgagggggaaaaaaacctgtttggcttgactcaccgtgaatcacagccaggaggtcatcttgttgtgtatcagcaactatgttttcgctacagctatgtgacctgaagtggcagcagcagaggcaccaaaatagaaggggcaggagccttctcctgacttcttggccgcaaatgggctttccagcccattcgggcaactgagcaagagccaaccgcagaggagagaaagaaccaacccgacagctccgcggagaaaggctgcaggcccaccccaccttccttgccctcccggggaggccgggtaagcaagaacataaaagaggacaggcttaagaaacagcctggagaaaacacagcatgacaggggtcaaaactagccccatggagggcaaaacccggccgtgaccgtgaagcacagatttcgggacggtctggacgcgcaagaggctctctaccctggggctccgggagcggctccggcgcgaacgcgcgcgggcccccagccttcaagctcctccggccgcctgggacctgaccctgctcccacctcacctgtccgatgcccgctggcccggcccgagccttcagctccctgcccgcaccccggcccacccttccatcccttgctctccccgcatgtctctcgggaccactggccgagtcagcgtgggcagggggccgctgccccgcagccccaggcccggccccggcactcactttctgaatcctcttcagcgccatgggtcagggatggcggtggggacaccggccggcaggggtcggctgcggggctcaggggcgtgggtcgtcgcgggttgggctcgctggcagctaggctggctccgcgcggtgggtccccggttagccgctccctggctcgctccgggcgccggtccctgctccgtgtgcgcccgagcgcgagtgtgcgcgagtgtgcgggcggggacgccggcgagactcttttgtttccgcttttgcttctgggaaggagcctgcgccctccccgccgcgccccgccccgcctggcacactgggaagtgtagttccagccctgtcctcggctgcaggcccccggacgctgccaggtaacttactgctgacctcagccaggcagcttaaggtgagagctgccgggggctggaattagcctctacagtctcatttagagcaaattgctgaacctggggctgcgcatctgtaaaatggggataacaaatgagctcctaacgcacataaaggaatttctaaatcatcagttagtaattccttatccaataggtgccacagctggttttattatttttacctttaaagatttcactgtcttttctcaaatatatggattgtctcactcaccctgcacacatgcacaaactcatatcagaccccctacttacctccttggttcttattgcagaggaaaaaggtgtctcttctgtccaatgtgcaaatcttccttgtctgagtgcattgtctgctcgtaggtatgcccctcccataaattacccacttcgaacaccgagttctgggctctcactcccatcattggttccttcccttccgttgacagtccctgaccaatagtcaactcacgctccccactctccaattcctatgcacttgtgtacccattaaaacttggcttcttggccaagatgagatttgggtggggacacagccaaaccatatcactcagggatataaagatggcaacaaatagacactgtggactactagagaggggaccgagggagcaaaggttgaaaaactgttgggtactattgtcagtacctgggtgataaaatcattcataccacaaatgtcagcatcacacagcatacccaggtagcaaacttgcatatgtggcctctaaatctaaaataaaagttgaaaaacaaaaacaaacaaacaaaaacagaatcttgagccccactccagacatgctacatcacactttgcagtttaataagactcctaggtgattcagatgaacattagggtttgagaagcactatgctggaaggcataagaggagatcctaaaaatgcagatttcctttaaaggatttaatttagcagtaagttttgggtgaagctctggagtctaaactttagaacaaacttcccaggaagttaggatgcaggtatctgaggacacttttgagaatctccaccttgagcaaatcttcaaatccttctaagcctcaatttcctcacccataactaatgcaataaatgttgtatttgtttaaagggaatagagctgaaacttttggtgcccttctaactcaaaggtctatgatttgcacaaaaaatggtgatttttttctcttctttataaatagaaagaaacctaaaaagtaagcttacaagattatttttgtctttcctagggcagtttacctcccaacaaaagagaaattaacacttattaaaaaaatctacgttggtatcttgcaataatagtttacactttaagattgctttaaatgggctgggcacagtggctcacgcgtgtaattccagcacttttggaggccaaggcaggtggatcacctgaggtcagaagttcgagaccagcctggtcaacatggtgaaactccttctctaccaaaaattcaaaaattagccaggcgtgttggcacatgtctgtaatcctagctacttgggaggctgaggcaggaaaatcgctagaacctgggaggcagcagttttactgagccgagatggagccattgcactcccgcctgggtgacagagtgagactccatctcaaaaaaaaaaaattgctttaagcttttcaaaacatttcacacacatttttgcaacatgcaaatacatgtgcaacatatagtagttcagtgtgttatttaatctcctactctttctcccaggatgtagtttcaaaacatagtttgtgatcaactgcataactaattcaaaaatgttacttaatgcttactat

SEQ ID NO: 914164 - DNA, 4001 bp, Homo sapiens
gggcatctagagatggggttctggggttcaagagagaagagctgaagtttaagcataggggtattcccaatggacaaagagttgtgggactgaacaagatttctctgggagagagtgtaatgagagaaaaaacagaatgtcaaacttaagcaccagcgtgcccccaagctagaaggtgatggtggaaaggggtgttcagaaaggaaaaccaagacagtctgatgccaagaaaggaagggggggaatgtctcgtaggagagagttgtcaacagcaaaaaatgctgcaaaatcaattatggggcctgaacacatatttgttgaacaaatgaatgaatgaaagcaagccagcccttggttttgagagtcatctctcctcagccagaagaatggccagagttaccttcagacaagagaatttcaataagttttactgcatccttcccataaaaacacatttctgcctccacaagtcatcctgtccaccatgcagacatccttccctgcttcccctggttcccccatcttccttcccagtttccgcaacccaagcaacacaccttcggtgtcaagggagacaggaaactccaactagagtttccacttcattaacaactctgcctgtggctcctcttacataaggggatatgtggcaatggggtgggagaggaggctgagttctagccccaggtgagctcctaactagctgtgtgactttggacaaggtgttcaacctctcaggatctgggctttgacacagagtaggagatgggtccatctggaatccagacaagtttgagctctcaagtctacgatattattcccagcgggtccttgcaacaccctcaaagaaggaagtgagtgtaagacccagaaaaatgaccgacagacctcttcccggggcgaaatgccagggcaggcggggtgtaccatgaaagtgagaaagcgttgcgcgggcctggaggatcaccagcgagcgatctcactcccaaagctgggaaggatcccaacaatcccaagggtgactctcaccccgcaccccatcttttatagactcccagacggccgagaggctctaaaaacccctgcgggaaaaataaagatttctttcccagagtcctgcgctgctttgcaagtcggattcccgcagacacgatctgcagctcgataatgacacagtctttggaaggagcgactgttctcgcctcgctcgctccgagttctggggacgcctggctgcccgcgccgtgccccgacgggccggcgtccgaccccggccggagctgccaggccagcggcgccctcgcccccggcctcctcccgatccgtcggccccgctgcggtctgcaaacatttcctgcccccacccccaccaggagctacccagttggagagagttggtcgcgcagccggctcagtgctcgcagttgccccaactcagctcccccggccgcccggcgctggggagcggccccctctggctgcggagcagcccatcggggaaacccaagcgccagcaccagtggggagtccatcggtaagcccaggactcgggcgaggagggggacaactggcgggatgcccgaggccctgctcccttccccatcgttacctgctcgcttgcgggggtgtcccggggctgccggcctctcccggcgctgtctccccacgcagttgcccatgctggctcctcagccagtccccatgcaccggaggcggcggggtggtcggctgctcagcggacggcggcgtcccgggtcaatggctccggccgcccggcatcgggcgctccccgatctccccccgggggcgcgctcagccccagcgatggctccgccaaaactttgcgggccaggggagagagggaagtggcagactccccagcacggtcccaggtggccgggccaggggggcccgcgacggtgcccggccggagaccagctccgctggaggggcggagagagggggcgggcaccgccgcagctactcccggctcgctcggggcaccaggcaggggccggccccctggagcctgtcactcacctgcctaaccccgccccaggccggcccctctcccttccgccggctcgcggtgcccgcgccgccgccaccacccgccccaggtgcgcatgtgaccgacagcaccgccccctagggctgggcctgattttctcattggcttcccccgtggtgcgtaccgcccctctccccacccagccaggtgcccgccccgcagcccgtctcccggggagccgggctgggaattattcgccctcaatcgcctccggctgcgtgcccagcagccgccttccctctcggtgccaccgccccatttcaggccccgcccctccctggaactgcctaggcagaagccggcaggcacgtgaccccggcgccccgcccccttgcgcttccccggagattggctcgggaggcgcatgcgcggagagcccgtctcgagccaccgcccatatcccctcccacggtctctagttcgcgttatggccgctgccgcggctgtggaggcggcggcgcctatgggtgccctatggggcctcgtgcacgacttcgtcgtgggtcagcaagagggccccgctgaccaggtggctgcaggtacggcagacggcgccgcgcgccttccgcatgggggccaacaggagggagcggcctcagtacaggcgccgggcgggaagggaggagcggggtgactttgagagattggtctcaaggctggttagtgagcaccgcgaggttcagagccgtaacaagttagagagttgcctgtgtcttccttaaaaccatttacacttctcatctccctgtagccaattatagggaatcattacattttacagatgaggaaactgaggctcagcgagggcaagaggacttgcgcagggctgcagaccaggcaggagggggaggtgggactcggacccaggcgttcaggtccgaaccgggtgctcacgccacgaagccatgctgtttgtgggaggttgacgtgtggaggtgcatcctcgcagcgtccgctcccgtcgcgtggcatcctgggagtggcagatggccccgcgctctgactggctggaattaagaggagttgaggagacgggccaggaggagctggagatgttctgggtgtcctccttaagactttctctccgtttcttgctaaagttcttgattagtttgctccatgacgttttatgtggcgtttgtttttgtcttcttcccagacccccactttcctgcttttgaccagttcagagatctcttagttcagacagcttatctaaaattagaataaaacgatttccaggcttccgtggagttctgagactttgctcttctaggaaaaaaaaaaaactactaaaaagttattgaatgttaggaggccttcagatcttgggtttaagtaacaatataaaattatctaatgagtagtttttttaaaaaaactttggaaatttcgtatgcttggagagaagtaaggacacatttctcttggatattgagcgtattaacctttagaatatgtaagaaaagaatagtgaatctgctagaaatataatactttgttcgttagcagtattccactttaattcaatcatgccactattgttgaatacatattattccccaaacatgatgcaaagcaataggaatataaatacaaattaggttagatctgtgcccaccaggaacttatagtatgctgggagaggcaaccattctgtaagaggtgtgtgcagcgtagtttggaagcatcaaggagcaaatacctggtgctgccaccaaacttaacatcttacaattttatgaaatgtagtgtgttatcagtgtttacaatttacaagtacagtgtcttaccaatgtcattttccctcatattttattatgaaaattttcgaatatccagccaagtataaagaattttataaggagcacatcacttaggatctatcctaccattaacattttaatattacttgctttatcatatagct

SEQ ID NO: 914165 - DNA, 4001 bp, Homo sapiens
gccactgcactccagcctgggcgacagagtgagactccatctcaaaaaaaaaaaaaaaaaaaaaaaagaggacagaagctatttgcctggcctaaaatcatgcctgtttcccctggaagtctgccagaagattgcttctcccattttaatcaaaaacagtccagcccccctcccaacctttcagtgcttcttgacattggccaacttttaaatctccagttgtatgaggcctggaggttttcctagcacggttatacttattcaattttttttaaaaaaagaaatttcatctccaagcatttctatctctgttcttcccatcatttgaaaacagtcctgttatttttaccaagcaagtcaccttgctgagtgccctgaagaatacaaagagttcattcacccacaggcacgaggaggaaagactcaagccagagactcgggagatactgtctgagctcagcatcttggaagaagcaggttcaggagtagaaactcaaatgccctcaggggttggcaggtgaagggcatgaggaccctgaagccggggctccacaggccctacagcaggctgtgcaacagacaggctcaccccaatgtgttgaaaatgaaaacttaaaaaaaaaaaaacctctgctggctgaacacagctctttcagaggcttataaataaggaaattaggaccagagggaggaagtagccaaggccacttagcagcacagctgtccccagacccacatttctcagcacccagtgtcctgtgccttccccatgtgcgatgctgttgctcttatacagaaggtgtgctggaccagtacccgcaaagcacacactgatgtgtgggtcgcctccagaccagaatatagatttccctccctacacctttctgaaatccaatgcatcttatccctgttaggtgtgtttaatgtagcatcatggccaagaagcaggacaagaggacctgtctccaagtcatctttgcagaggtggggcctcctaaccctgacaaagtattcaatccaatatacgacctacagtcaggaaatagggtgtaatttctcattcagagctgcagtccctttgataccctggggtgagcccttcgtgcccagctgcatcctgctgcccggctgactgtgggagaggaggagccggggggtgtgagcagaggtggtgatggacgcgggatggggtccctccagcatccttaccattgacctcatctctggacttgggggaccgcttgccgcgcctcttgaggaaattcgaggcatctgattcctgcatgaaaatcttctgttttgcatctgaaacccgggagaggcctgtcaccagcagtgtgggggtgctggggctgctgcttcgctggctgcacctgccctgccccgtgggtggcccctgcactcaccttcactcgcctcttctcccgccatctgcatggtgcccacagatacactggttccctctctcagcactgcaggacaagggcacagagtgaggctgcagcatcagaggggagcccagaccctgagctgagtccccatctctctttccaggctaagcgtcctgccagggcctggcagggggcccgtggtttctcacgtaccagctgcagagccaatctccccaggaacccaccaagcaagctggcttgggttttttttctattttgtttctttctttactgttttttattattattattatttttctgtattgcattgtgtcctacatgcacacgacacacacatacacacatgttaacaataagcatactcctttctacctgcatcacctgagcagccttacctgtgcatggtaagtctcccttaccatgtaactaacaccctccaccttgaccctcctgtactcactagacaggagcaccacggcggagaagcaagacagcaggacggcctgtctccaagtcatctttgcagaggtaggggctccgtccaggacccacaaggcagaccaggcgtcctgcaccctttgggtccccacttctgaggcaggcagcccaggcgagaggaaggaaggcgggggagggaagagagaggcaggaggctgggataccactgggggagaggaggagggggctgggctgccctttccattggctgctcctagatggagcaacggagatgtttttggcacctggcaaatgtctccagaagcagagcttgtagttagggccctgggtgggacggtcttggagtggcctttccaatgtccgtgtctggggatctgctgctgggaaggctcatcctaacagtcagggttccagtgaccaaggcctgtgtcaaggaggtcctggcacctgctccagggacgttagggccccggtcctcagggttgaagcatgggtgggggcaaggaggaagagaggatcaatgggggagttttgatctaaatgtcagtcaagaagggctcataatgactggaatacccatcagggtgacacacagacgtgtgggtcatgctgacagcgaccagagaacaccttacctgatgcactgcttccagctgatgctcactgccaagccaaacacaaactcctggggccgcgggtcccagagccctttaaagtcaattgccttcccgcggtggctcatgcctggaacccctgcactttgggaggccgaggcaggcagatcacctgaggttaggagttcgagaccagcctggccaacacggtgaaaccctgtctctattaaaaataaaaataaacaaattagccgggcatggtggcgggcgtctgtaatcccagctactcaggaggctgaggcaggagaatcacttgaacccgggaggcagaggttgcagtgagccgagaccgcgccactatactccagctggggtgacagagcaagactcagtcccaaaaaaaaaatacatataaaataaaataaaataaaaatttaaaagttaaaaacagcggccgggcacggtggctcacgcttgtaatcccagcactttgggaggcagaggtgggcggatcatgaggtcaggagatcgagaccacggtgaaatctcgtctctactaaaaatacaaaaaaaattagccgggcgtggtggcgggcacctgtagtcccagctactcagagaggctgaggcaggagaatggcgtgaacccgggaggcagatcttgcagtgagccgagattgcaccactgcactacagcctgggtaacagagcgagactccatctcaaaaaaaaaaaaaaaaaaaaaatttaaaaacagcaaggccaaattcaatcaccttccacagcggagggggagaagggcaggtatctgaaaagctccacagctaatcctgcatctctaggaagacacacatcatactccatgtaggggaggaaatgggttcccagaaatgggaccactaatgaaatcagcaccaacatggccattagagctcagtccccttggagatgtgttcctaatgttgcctttgttaggaaccatcaactctttgctgtcagccttctggcatcgtttaatgtttgtctaatgggaaccatcactagacctagaacccagcccatacctacctgaagctcccctcttacaagacttttatgttagctaggcaaagtggctcaagcctgaaatcccagccctttgggaggccgaggcaggaggctcacttgaggccaggggttggagataagcctgggcaacatagcgagacccccatgtctatttaaaaaaagaaagactttcagtcgggcgcagtggctcatgcctgtaatctcagcactttgggaggctgaggtaggtggatcagttgaggccaggagttctagaccagcttggccaatatggcaaaaccccatctctactaaaaatacaaaaattacccaggcgtggtggcatgaacctgtaatcccagttactcaagaggctgaggcaggagaatcgcttggacccaggaggcagaggttgcagtgagccgagattgcgcaactgcactccggcctgggtgacagagcgagactt

SEQ ID NO: 914166 - DNA, 4001 bp, Homo sapiens
cttcttatttttcaaatcccaagtctaccatcagagaagaatactgtaatcacggctagggtgctgaaggtgtggaaaaatctgtgaaagtgtcagggagcaagtgtcctgcgtggcgctctgttcttggtgcatctgcaggtagcagacctttctctctctgcaaaccctcagctctagcctgcacacggttgtgagggtattgaaaggtgtccccttaccatcagcaatgatgcaaagttacacagcaaaggaacctcccagaactgtgaattggacatgatagggacgcccggtgctgagcttagttttagatcgtttaaaatgtaagggttctttgcaaccctggatggtttcaccatcaaagtgtgtgagtggctgggggctggaaggtagattcagatttctttccaggacttttctttttaggatctgtttagatttgtttagggtttataggataaaagaaaaggaactctccccaaagaagaaaagatactctgtacttcccacataaagtctaattttgcaagtttctccttttacattccttggactcttctgccatattcttggtgaaacagcacaaaagtttaagatttctctgcagtctgccacgaaaataactgggcaccatctagttattaatacatttgaggggcaaagctctacacctgtatttttctctgggtgcctgaaactcaaccattcctttgggctatggtgacagtagcacttgtcgaggatgctgtaaagagacacagttacttctgggagctgtggcagagccaagcactgaaacgtgagggacctgggtcagcctccaattcccagcacctcacagggagaggacaggacatgaagcagcaaaggcaggaggcaaacagtactgatcacacatctctgccaagtgcagagctattcctgtgggctccgtttgtctgcaaacactgataagaagttaaactgaaactagaccacttaaaacgttttaaaaatctcacatttgttatttttggtaggtggctatgcttgggaaagaaattgcgaacaggaattttcagaaaacataaacatcaaacatccatctccccttcacaggtaggagttagccattgtaggtatctgcacacacccccgcaatgttcctagtgtggcaaagggctctgggctttggtggcagaggacctggctggggaaactcccttgcctctgacttttcttgggtgaatcccttaacctgcatttcacttgccgcgtcctaggaaggagacgttacctgcttcacaggtgtgcccgagagtgacgggagatggcacaggtgaaggtttgtggcacaggtaaacagtaagtgcaggtgtcctcgctgctttgcaggcggcgtggagtcatgtcctgtggctcccattagccccggcatccctaccccatccccatttgtaaactgtctccgaggactgactttcctgtgcacagctgtgctctgttcagagaaaacagatttgtgtgaacaccttctgcctctgatctaacacctttggaaagagggtctctctataccaacgtgggaatgtgattgtgcctccctgagaaacttcccctggtccctttggggctgatttctgctgattgggtggggggcgttcagcatcgctcccttgggcttccacccaggggcgctagcagctctcatctctcacacctgtctagtgcatggcacctcctgcttaaattagggcagatacatttacccttcataagtcagtcccagccacaagcttacccgagagtggacttccctccgcagcgaaacgctcagggaggccggcgcagcttcagggccaggagggcggccccgtgcacgtccccatgaacttgtggctgctccggggtctcggctcctgcttctccggtattgttcctaagtgggctgtgatattccctctctatggaaacggtcccctcccctgtgtgtatataaaagtgacagatcacagggtggatcgtaattccagacgtggtgtctacgctgggatgagatttcatttaaaatacaaccagaaccagccgtccacgtcatgcagacgacaggtgctccaacctcgacccctcccacctctgcttcccaccccgcccttctaccccccaactccttttgcatcctagcaacttgcttcattgataaaagcaaagaacaaaaaagaaaaagaagaaataaaaactcaaaacaaaacaaaacaaaaatcctggtaaagtgagaagcagtgtctttgaagaattttattgctgatcttagttctaactaatttcagtttcccccacattccccttgccctaactctccttctgtaaatgtagagcctggacctgctttgaaagcagagaaggggtttaaaatccacctgttgccgtgttgttttgtgggttctgaccgtgcagcgtcatctggccgcacacgtagccccttgtgcttgtcacacactcggtgcctactccccacataaagtctaattatgcaagtttctcctttcacattccttgggctcttctgccgtaccctcagtgaaacaacacgaaagtttaagatttctctgcagcctgccgcgaaaatgactgagcaccatctatttgttaatacgtttgaggggaaagctctacacctgcatttttctctggatacctgaaactcaaccattcctttgggctatgacagcaggtcatcatacaccagaggtctggaggttttagtgggaaatggcttggattttactcgtttatgcatcctatatttattgaggacttactgtgtaccaggtattgccaagacacccacgagttcagagataagtaagttgtggcccctaaccatacagggcctcatggtttagaaaggtagggaaggctgggtgcggtggcttatgccagtaatcccagcactgtgggaggccgaggcgggcagatcacgaggtcaggagttcaagactagcctggccaacatggtgaaaccccggctctactaagaatacaaaaaaaattagccgggcatggtggcgagtgcctgtaattccaactactcaggaggccaaggcaagagaatcacttgaacctgggaggtgggggttgcagtgagctgagatggcgccattgcactccagcctgggcaacagagtgagactccatctcaaaagaaagaaagaaagaaaggtaggtaaaaaatgctacagaagagagcagtcctgtctactcaagacaggagaggagagcaggaggggtttcagacagaaaggatggatcagcatggactgagccagggctgagaggaacgggagagaaggaggacgatgggagggaggtgttggtgggtgcagaggctgctctgcactaaggtgctccaaaggcctgcggagttgggagtttattccatatgtaatggggagatgtgggagactacggtctgttgaccccttattcacagatgaggaagctgaggctgtaaaaagtgacctgctgggaccccacaggcccagggtgacagagtcaggtgagaaccaggcctgacgctgggctcagtgctcctttcactgggctgagctgatgacaaggggccctgcaagaccggctggctgtccctagccctcctcccagacggctgctccactctcgtgaattcctgcaggtgaagaggtaagaggtcttctgaaattaccaaaactctttaaagcccatgagcatttggaggaacaaatggaaagctgttgtggggaaggacttcaagactctgtactccccattttaagtctctttatggagataggaaattggacctccctctcttccttctttcagagctgcctgggctaggatcctcttgagattggaggcaacatgaaactgaatctgtgtttcaattcaaattcattacttcattcattcattcattagttcattcattcattcattcattagttcattccttcattagttccttcattcattcattt

SEQ ID NO: 914167 - DNA, 4001 bp, Homo sapiens
tcccacgtctaactgcaccctttaaaacaaggttggacattcagcagcctgccttccccatccccatcattaccttccaacttcaaaacactgctttaaataccagagtctgcccaaatcataattaacttggatcaaatggttgagtgttgtaactctactgcacaggacttgcaccagaaaaaaaaaaaaaagtggggaatgtgctaaagccaagccctcactcctggccgtgggaatcactaattccagaatgaggaatctttggctatggaggggggaagggcggatgtcaacttcgcagcaggaggtaggaggtggggagggctgcgtcatctcgtccactttctgctccagttttcctgctccattctcagcctcaactcagagaggactccgtgcaggaggccccgtccccacctggctccggagccgagccgcccggcagccgtggccagcccacttgcttgggttcgggtaccagagagaggctggctccattcagtccacagcctccccgagaagacgcagcccagccagcgacgccgggtccagctacaggacgagcgagaaacgtattcatccacggcgagagaggagggttagggactttatttcggagcccaccagttcgctgaagtcatcttggtgggtccagagcgggcgctgtaccaaggagagcgcacctagtctgttccccggacagcgagaatgtcagtgaccaatttaaaaggaaactccgcaggatcgctaagaacccctacccgcatccaacacacacacacacacacacacacacacacacactctccaacactcagaaaattaataataataataataataataataataataattcttccagacctgcgggcccagcgatctcggggaaagctatgtgtgcaagacttagccctccccgcttcaggagccctgcaagccggcctgccgaggctaccgaagcgcttcctgtgttcagcaggtcttttcgctctctccctctagtctgcagattgctgtccctatagcgcgtaagagcctaggcgagccgggaccagactagtaagttaccggcgtacggcagcgagcgcacaccttgcttatgtagccaatgttctttttcggggcggatgccaggcgcgcggagagccgggcgtccccaggaggcggatcctcccggagactcagaccctgactcctacaccccttccagggagaagaagggatccctttcaggagcgagcagggacctttcagcttactgtgaagccccttccctgctccccgctcccgcgatgtggatgcgccattgcccactttgggaggcagtaaaatctacattctaacttgggcgcccttgccgcttttcctgcgcgcatcgatgcgacgaaagaccacctcaacttcaggacagagtgaggcgcaagggtcccctagccccgcgcccccagacccgatcgcttcctacctgcttggctcagcctcgggtcccagcagagcagcagtgccagcagcagcgcgccccgagctccgctccgggcccccatgctcccgcggcctggttcgggcgcctctcccccagggctgtctccctggccccagtctcgccgccgccgtctccgccgccgccgcctcctcctcgccgtcctccccggcgcccggcagcgccagcccgtgccttccgtgggggcagcggaagccacgctgcgcggagggccgcctggcactcggagcgcggtgggtgcctggcgccggctctcgaacgaggctccggcgcgcccctctggctccgggtctctgagcgctcgcctggctccggcgctgtgcctccgaagttgcgcgaccgctcagtggcgctcgcagcggcggcgccgcgcagtcccagccccagtgcgcgcctctcggagccccgcggctgcgtgcggctccggcgccctagccggccccagccgcctgccacaatgccgagcgccgccgctcgctcgccggagtgagttcgccaaccgaggggaccgcgcgcggccggggcggggcctgggcgaccgagggcggagccgacagggggaccttgaggggggatccgacggccatctgggcgcggccgcggcagagctgggggacccggggggagggtcctcgcgagacgctgggcgcagcgttttgaaaaacccggccgctggagaatggctggacgtggaggcggcccaattttcgctcccccaaattaaggaaatctggctttgcgccttcatttggcttggccatgtcagctttctcctctgattaaacataggactctcacttttggctcccctgtctgtagtatgcgctctgccttccacatgtgggggtctttccaaaaaaaaggctcccaaaatgagaacacccaagtcctggttacgcgggggcttacagcgatatgaagctgggtatagattaggatcatcctggctggctctgcttgtctgtatgatctccggcagaactgttaaccagacccctggaaacccctccagcactctgatcctgcgttgttgtaaactagcctcctacctgacagtgggacagccatttttggctcagtgtaaacttggactctgccccttatttactgtgtgaccttgaacaagttacttaacaattctattgctcccttcatcatcatctgtaaaatggaggaaaaggataactatttcataagggggtatagaattaaattttaaaacttgtgtggaaattgcagtgcaagtgtcaataatctctttccaagattctcccctcccagccagtctgattccagggggaaagtcctgaccacccaaaggtggtccaaggagcacgtggggacaggtgaggtttgaaggatgggcagtgtcttgggattgaaacccagagagatcagaacgagcggatcagctaacataggcaaagaccttccctgtgccaggcacagggctaagcactctgtatgcatcatgtcagttaattctcacaaccctctgaagtaagcaccatttacatcccattttacagatgaaggacctgaggcacagaggtgtaaagccacctgccggagatcacactgcttggagtgactgagtgactgagcaaaggggatgggggagatgggattggaaagaaaccctctaaacgggggagcctcacttgaacaccttccctggggctggattgggctgtgcgaaggggactgtcctagctgtttccccagaggtgaggtgaaggcaggactagtaccctctccacacacactcccctcacaagccggggtcttggagtatctaggggaggtcgtgcatgccatcagcacatctccctaaccctctctgactgggcacccagcatcaggagggtggcaacaggtggactgggactccctgggggaagaacttccatcaattgagaaaggctgctgtgggcaaaggtaggttgcttagcttggcctctgacagccctagcaagggcagtggatgagacagtcaacagctcagcacacccaaaccaactccaccttgcaaatacacatgcacacacacaactacccacccatacacacctgcaaaggtacacacacgaaaacatacaacaaagacaacaggtgcaatgtttcacctcccataaacatcacacctacaaataggcacccgactccagagacacccacataccaaagatgtatgcctaaaaaaagcaaacacacaggcgcacacaactaaaaacacaaataggcagatgactcccaagacaaatagatatttggatacttaactactgccaggaaacacatacaggcacgcctgtgccaagacccacatctgacggtcatcccctggatgcaggcacatggtcaaggttgtgcctgtgctggagagctcagcagggacctcagcagagacgggcagcatgcagagaccacagcatgttctctctctctccccaacctctttctctctctccttcaggccagtggggtattggag

SEQ ID NO: 914168 - DNA, 4001 bp, Homo sapiens
attaataaatgttctgtcacaaagaacactgagaagttcagcatacaatgaaagatttgtaaagtcagataaagactattagattttatctacttctatcctcaatttttacattccaaggatagcagcagagtcacctacccaagattatatatacagctagtttccgtggctggaccaacactcactacccagtgctttttcactacctacactaaaacgaataaaatatacaaacaccgtgattcacctcaatacacgtttgttttatgtcgacttaaaaaactgagcactaagtgatatttaataaaatgctaaaattcttatttcaataacttcaagctttaacagccaaacttttcatctaaagtgtttccaaaagtttttcaagtccaaatacaattttaaataggtcctttctcaagatagtgaggagaaaaagtcgtgatcttttcactggaatccgattagctgttacaaattagtttgctgaatacaattatattcagactacccttaaaaggaaaccatgctttaaaaccaccttcctagctcccaaaatagtgtcctgtcacttgaactgtatattttatttggtattctaaatacattctgaacttccaaaagaaagtaaaactaatttactagaagtaccaatggagtgtattggggggaagagggcacaaaagggggtgtttcccttttaaagacattcccttgcaaagtaccatatggattatgtatgaaatcccaatcagagtgctccgaaaacactccagtatgagagaatgcggttttacctttcaattctcttattcaaaatgctgtcaggacagaacagcacaggaacactatctcccagtttctgactttattttttaaagaacatccttagtataaaggacgtattaagaactgttagaaattgtaccagctcacaaatgaggagactgacgatgttaaggaacacctaagaactatggaaatgagataaagcgtcagcgagggtttcactttgatctgatgcatcgtttcgtgtcgtgtaagtcctctaagatgagcaagagagctgaaggtccgatcaccccagcgtggacccagctggctctgctctgccaacctggggaccaaatatcctgtgatcacttccttagtccaacagtcctagcaagaagagagtgcttggcgccttgaagaggtgaaggtaaagtgaagaatcaaccagcctatgtgattaaaaggaagtcaaccaaacagcccatgcccaccatccccagatacaccccaagccccttcccctacacatacctctcctacaaacccctgctctggtggtgtaggaacctctaaacccaccacacttccccgacacaactccccttcccacaggtatccacggtcaccttcgcggaccatcgctgccccaaccccaacttctcgccccacactccctcgccacagaagccttcccggccggtctccccactccgcagcctcccacacacgcgccctccccactttctcgccctcgcttccctcccggctctcgaggagcttcccccgacctcccctcgctctcctccacgcccccgaacactttcgcccctccaccgcgggctccccgcctccagtctcgaggcccggcccaggcatgtggggcaggcacctcctccaccgccccccaagcatggcccggcccgggggctcccgcgttgatgggagcctcggagacagggggtctgaggagaacgacgccggacccgcggtccctccactgctcgccgaccccggagagctggagtgtggagtcgcctctggggtcccccagggagtaggagtctaggccggtgccccccagccccatttcctcccgatcgttggagcggaggggaaggaggatccccgggactcacctcgagcctgttgtcaacattagccccgggtttcccagcaccaactccagcgctcgggctctcccctcccctccccccacctatctcgcagccgagggcccgccttccctcagctccccctcctccctccgcccgccagccctcccgcccgccactcaccagcgcggccgggctgagagtgggggcggggcggaaggaggcgagagggaaaaggccatccgcgcgactgcccgattaaaaacagtcctgatcgtcttccctgcggcatgccgatgccctcagcttgactctggggtggcgggtccggggcaaaggctcatatgagtgccattcacttaacagctctttcaaattccccagtcgatgagaagagcgaatttttcagactggcaatacgtaaggtagccactaccagcacctcaaaccagggccccagcggaggggtggagtgttccgaggacccgaggcaggaagtggattggtcgccaggaaagggaaagcgcctgaattggagctgcgcaggcgcaggcgcttcgcgggggatgggggtgggaagcgcgaatggggcggggcggagctcacgggaggcgaggaagtgtggtggaatagtgggagggttacggagcgccattaaggacaagcccggccacgtgattctcctgggcgtttcctggtgcgaacctaaggaagaggtctaagaagagaaagtttgattggactaattcgaggggagacgttgaagatttagaaaattggaaactggagaaactaaaccatatggctggtttgggaggtgggagtcgcttaggaatgggtctagtcttaagaatgccctaaaagacatcgaaagtcctgcggggggatttccagaagcacttctaggtgttcgacgtaaaaaccacccagggcgaagaagaatcaaggctttttccatacacttcttagaaagtacctggttctagcaagcaaacttttaaaaattacagtggcaagacttccctgagttatcaaatcacccattttaaaaaaaaaatggctagcgtcgacatttcttctgaatgcgaacccaggccgactttcaaaaatgggtatcagtttatccacactgcttatttcctcctgaattgctgaaatggtgcatctggcctcgaaacagtactgggttctgccaacatgatccgagtaggtggctctggctggtccggagctagaggaacaagggtgcgaaactggtcttgacgtttgcttgacttgagggggccccacctggtgcccaagcccacgtaatgaactactaccaaccacaaatacttgaggcaagtccaggttccctatgactcaacctttgcccatttgcctctatttactgtttgcttccccatttactcttagcacgcaaattatcctctcatactgagtgttgctgcttcctgtatttaaaaatatatattttttatacactacacataggtcagtcatttaaaggatagtgaaagagaaagatgaaggccgggcacggtggctcacgcctgtaatcccagcactttgggaagccgaggcgggcggatcacaaggtcaggagttcgagaccatcctgcctaacacggtgaaaccccgtctctactaaaaatacaaaaaaaattagccggccgtggtggcacgtgcctgtagttccagctactccggaggctgaagcaggagaatggcgtgaaccgggaaggcagagcttgcagtgagccgagtttgcgccactgcactccagcctgggcgacagagggagactccgtctcaaaaaaaaaaaagagaaagatgaatactgctattctgcagcattgataaacaattatgagaactgccccaaataccatattggtgatagccacccacgcttctcttcaaggtttccttttcccatttcatgggattaccttaagaagctttacttctggctggtgcggtgcctcatgcccgtaatctcagtactttgggaggccgaggctggtggatcacctgaggtcaggagttccagaccagcctggccccaatatggtgaaacccagtctccactaaaaatacaaaattagccaa

SEQ ID NO: 914169 - DNA, 4001 bp, Homo sapiens
caataacttcaagctttaacagccaaacttttcatctaaagtgtttccaaaagtttttcaagtccaaatacaattttaaataggtcctttctcaagatagtgaggagaaaaagtcgtgatcttttcactggaatccgattagctgttacaaattagtttgctgaatacaattatattcagactacccttaaaaggaaaccatgctttaaaaccaccttcctagctcccaaaatagtgtcctgtcacttgaactgtatattttatttggtattctaaatacattctgaacttccaaaagaaagtaaaactaatttactagaagtaccaatggagtgtattggggggaagagggcacaaaagggggtgtttcccttttaaagacattcccttgcaaagtaccatatggattatgtatgaaatcccaatcagagtgctccgaaaacactccagtatgagagaatgcggttttacctttcaattctcttattcaaaatgctgtcaggacagaacagcacaggaacactatctcccagtttctgactttattttttaaagaacatccttagtataaaggacgtattaagaactgttagaaattgtaccagctcacaaatgaggagactgacgatgttaaggaacacctaagaactatggaaatgagataaagcgtcagcgagggtttcactttgatctgatgcatcgtttcgtgtcgtgtaagtcctctaagatgagcaagagagctgaaggtccgatcaccccagcgtggacccagctggctctgctctgccaacctggggaccaaatatcctgtgatcacttccttagtccaacagtcctagcaagaagagagtgcttggcgccttgaagaggtgaaggtaaagtgaagaatcaaccagcctatgtgattaaaaggaagtcaaccaaacagcccatgcccaccatccccagatacaccccaagccccttcccctacacatacctctcctacaaacccctgctctggtggtgtaggaacctctaaacccaccacacttccccgacacaactccccttcccacaggtatccacggtcaccttcgcggaccatcgctgccccaaccccaacttctcgccccacactccctcgccacagaagccttcccggccggtctccccactccgcagcctcccacacacgcgccctccccactttctcgccctcgcttccctcccggctctcgaggagcttcccccgacctcccctcgctctcctccacgcccccgaacactttcgcccctccaccgcgggctccccgcctccagtctcgaggcccggcccaggcatgtggggcaggcacctcctccaccgccccccaagcatggcccggcccgggggctcccgcgttgatgggagcctcggagacagggggtctgaggagaacgacgccggacccgcggtccctccactgctcgccgaccccggagagctggagtgtggagtcgcctctggggtcccccagggagtaggagtctaggccggtgccccccagccccatttcctcccgatcgttggagcggaggggaaggaggatccccgggactcacctcgagcctgttgtcaacattagccccgggtttcccagcaccaactccagcgctcgggctctcccctcccctccccccacctatctcgcagccgagggcccgccttccctcagctccccctcctccctccgcccgccagccctcccgcccgccactcaccagcgcggccgggctgagagtgggggcggggcggaaggaggcgagagggaaaaggccatccgcgcgactgcccgattaaaaacagtcctgatcgtcttccctgcggcatgccgatgccctcagcttgactctggggtggcgggtccggggcaaaggctcatatgagtgccattcacttaacagctctttcaaattccccagtcgatgagaagagcgaatttttcagactggcaatacgtaaggtagccactaccagcacctcaaaccagggccccagcggaggggtggagtgttccgaggacccgaggcaggaagtggattggtcgccaggaaagggaaagcgcctgaattggagctgcgcaggcgcaggcgcttcgcgggggatgggggtgggaagcgcgaatggggcggggcggagctcacgggaggcgaggaagtgtggtggaatagtgggagggttacggagcgccattaaggacaagcccggccacgtgattctcctgggcgtttcctggtgcgaacctaaggaagaggtctaagaagagaaagtttgattggactaattcgaggggagacgttgaagatttagaaaattggaaactggagaaactaaaccatatggctggtttgggaggtgggagtcgcttaggaatgggtctagtcttaagaatgccctaaaagacatcgaaagtcctgcggggggatttccagaagcacttctaggtgttcgacgtaaaaaccacccagggcgaagaagaatcaaggctttttccatacacttcttagaaagtacctggttctagcaagcaaacttttaaaaattacagtggcaagacttccctgagttatcaaatcacccattttaaaaaaaaaatggctagcgtcgacatttcttctgaatgcgaacccaggccgactttcaaaaatgggtatcagtttatccacactgcttatttcctcctgaattgctgaaatggtgcatctggcctcgaaacagtactgggttctgccaacatgatccgagtaggtggctctggctggtccggagctagaggaacaagggtgcgaaactggtcttgacgtttgcttgacttgagggggccccacctggtgcccaagcccacgtaatgaactactaccaaccacaaatacttgaggcaagtccaggttccctatgactcaacctttgcccatttgcctctatttactgtttgcttccccatttactcttagcacgcaaattatcctctcatactgagtgttgctgcttcctgtatttaaaaatatatattttttatacactacacataggtcagtcatttaaaggatagtgaaagagaaagatgaaggccgggcacggtggctcacgcctgtaatcccagcactttgggaagccgaggcgggcggatcacaaggtcaggagttcgagaccatcctgcctaacacggtgaaaccccgtctctactaaaaatacaaaaaaaattagccggccgtggtggcacgtgcctgtagttccagctactccggaggctgaagcaggagaatggcgtgaaccgggaaggcagagcttgcagtgagccgagtttgcgccactgcactccagcctgggcgacagagggagactccgtctcaaaaaaaaaaaagagaaagatgaatactgctattctgcagcattgataaacaattatgagaactgccccaaataccatattggtgatagccacccacgcttctcttcaaggtttccttttcccatttcatgggattaccttaagaagctttacttctggctggtgcggtgcctcatgcccgtaatctcagtactttgggaggccgaggctggtggatcacctgaggtcaggagttccagaccagcctggccccaatatggtgaaacccagtctccactaaaaatacaaaattagccaaatgtggtggcgagcgcctgtaatcccagctactcgggaggctgaggcagaagaatcacttagaacccgggaagcagaggttgcagtgagccgagatagcgccactgcactctggactgggcaacagagtgagactctgcctcaaaaaaaaaaaaaaaaagaaagaaaagaaagaaagaaaaaagctttacctctttgttaataaatataataaatccttctcatcctaaatcaagtcaacctttgtctttaatcaggtgttaaaaggaaatcacctaaaatcaaaaaacaggagggcctttttgttgagaatttgctatttcacatttg

SEQ ID NO: 914170 - DNA, 4001 bp, Homo sapiens
atgtggtctatacatgcaatggagtattattcagccttaacaaggaaggaaatcctaatgcatgctacagcatgggataaactttgaagacatcatgctgaatgaaatagtcacaaaaggaagaatattgtgttactccacttacatgaggtttctagaatagtcaaattaataaagatggaaagtagaaaggtcatggagggaaaataagggagttgtttaactacagtttcaattttgctagatgaaaagagttctgccaatggatagtggtggtgatggttgcacaatgtgaatgcacttcatgccactgaactgtatctttaaaaatagttaagatggtaaaatgtatgttatgtatcttttaccaccataaaaaaagtataaagaaacaggaaaaaaaattggctatggtatctcagtgcaactctgttgatatgttcacatggtctttctgagtcttttttctaatcttagccttttgatgggtcttttttgacagcttcctctcttctccattacaggaacatgtttttgcagttgtgcgacccaaagaggccatttcaagctgccccatcagatgtggagcgctgatgtgtaagtattactttaatatccatgacatggctgggtagacaagagactcccaggaaagaccgaaatcacagaacacgattatgggcaatctgggctcctggggacctttagggcacgccatctcgtactgatgaaggatcactgatttatcagatgttaccctgcttaaacagaagcagcctattagcgcagctcacaccattcctagaatcaaacatatccaacccacccccctcattttacagagaaaaatcaattgagaaccgcagatcttattcctagaaagctgatgaaccctgtttctctcgcaatgggaagacctggctgccccaggctgcatccccacctgccacaggggctggcgctcgctctgcagttggccgcagtcccctccactcttctctccaaataggctcgggtctttaacctagactaccccactggccccgaagcatttttttttttttttagatagggtctacctctgtcgcccaggctggagtgtggagtgcggtggcgcgatctcggctcactgcaacctccgtctcctgggggcatgcgattctcctgccttagcctcctgagtagctgggactacaggcgcgcaccaccacacctggctagtttttgtatttttagtagagatgggatttcgccatgttgggcaggctggtctcgaactcctgacctcaagtgatccacccatctcggcctcccaaagtgctgggattacaggtgtccgccaccacgcccggctaatttttgtacttttagcagagatgaggttttgccatgttggccaggctggtctcgaactcctgacctctggtgatccacccgctttgacctccctaagtgctgggattacaggcgcgagacaccgggcccggccccccgccgaagcatttttaactgcggtgccggctttaaaaaaacttttaggtcaagaaatgcgctccagaagctcggcgagggtaggctgggcaggcgccttccgtcaccggcgcagcggtagcggcagcggacatccccgcctgggcaggcccaggtccgcggaagcctcggggccctggccccactgtgtcacacaccgcccggggccgggcccctgcacgcccgcgggcttcggcgtccgtaccggtacagcgggcggcgacacctacctcgcgggaccgtgcccagcacccggcctggcacacagcgggcacccggtcggggggcggtgtcgcgcagtcccagcgaaaaggctgcaggagcaatgacaacaggggcggaagccccctccccacgcagcccgaggggccgcggcggccacccgcgccgggccccaggaccccgcacctcagactggggtcgcgtgggtggctgcgcgcagctaggcgctcgcgcatgcgcaccgccatccaggccacggaatgaggccagaggttagatgggttgaaccactacgggaaggggaggggaagctttgggaggagtgatggagggtggaaagcggaagaaaaaagcaagatgggaccgcaagctggacgtgactgtaaggggtcatggctgcggaatccagcaggggcattggggttgacgtgcactcagcgccgagcttcttcgtagttcctcacccccttggctactatgggctggtccggaaggtcaggcaaggggaagctgcgcaggcgcagtgtgagcggcaacatggcgtccaggtctaagcggcgtgccgtggaaagtggggttccgcagccgccggatcccccagtccagcgcgacgaggaagaggaaaaagaagtcgaaaatgaggatgaagacgatgatgacagtgacaaggaaaaggatgaagaggacgaggtcattgacgaggtgagaaggacacgctcccctagttggtttatacctgagaaaaactttttggcaagcccaggctgtgtaaaaatagtgtagggtcttccctgaccctgagggtctgtgaggagaaactggagataagttctttctcaggtttctcctcggtctttaacacactgcagccatagtagttattttttaaaggtctagtccggtccagttaatctcccaacccgcgtcctccccgaaaaagcccgccacaacaggtgtgttcttctcgtcctctttagttctcaggctgaagcctcagatcctgaatcggccaccccgggctcgcagagggggccctctcccctcggggcagcagctgtcctcctcttcactctgcgggcggcactcacttgggccctcagtttcttgaaggctcttgccgcgttctaccgtagaagccttttcaaatgctcttctttatcctgcagttttcccttccttcttcagatctcagctaggctgtattttctggctcctggggcagctgaccaagtcgtgggtaaatctttggtttcatagtctcatagaactgtgttcctttcttcagactaggtcctaccgtagtgcctggcaatataggtacttattatttgtttagtaaacaattaggactgaatgatccttcagcctactgaatgtttaaatagatacctcagccttaacttgtccaaagcagaatttgtataataattcatgcccctctcttaatcgtcaccatttctataaatggcccctaaagtcaccagctgctctaacccaaaacctggggcttaactttaattcctccctttcctcatcctatatccagcccatcagtaaatcctgttatccagacatttctcagcactaattctgagaccatcgtagtccacacctctatcatctcttgcctggactactatttaatgtaacagcttttaaccggcgttcttttctccatttttgttcccctacaatcagtctatactccacttacagtcagagagatcttataggtctgatctcaggcctctgcttagattgctgcattggctttctagttcatttacaagaaaatcaagagtcttcacaattgagggacggaaaggcagcctagatggctggatcagaataaggaagagagagtgataggaaataaaatcagagaggtaatcatgagtcatgatgagcatggaggggagcatggagagaagcatggatgcaggattagaggtgacaccatggtgtgggtatgtgatcaatcttccttcccttacaaattttactttggctctatgccttgaatgccatctcaccatttttcacttagaactttgactggctcttttattacttttgggttatagaaatcaatgctgcttgtgttaacatgggaaatctatcacaccaccacagtcttaattctaaatcacctgggaatgagggacagggctcttttctacaaacgtgactgttcctgctgaagccatgtggagatgagcccatacccaggaaaagggtgctggacagat

SEQ ID NO: 914171 - DNA, 4001 bp, Homo sapiens
gaaaaatgaccttaattttcaagtttcaagaaggttcttggagcaatgaaggaaatccaaacttccttaggcctcttcagagaccttggccagtctagcccaagtaggaaaatctccattaaaaataactttatacacttgatcttagccaacagaagcgataaaagcaactttataatgtagctatcaactgttccactttactaaacttactaaagacatacttccccccgccccccgcccccccaccagctccattcatttcatgatacatttttggattcacttcttagggtttgaagtaggtttttaggagaaacgctacagaaaataagggcttcactttgaccattaacgaaaacctccactacattacatctaactaaactttttaggaggatatgcccaacaatactacagcgctttaaatttccctttaatttacacacaatatgggaggaaggctgatgttttgtgatatcccacagaagactaattctgattgcagggaagtgcatggttcaagaactgaaatcaatcactcaagttagtctgggtcttaaaggaggaggactcttgagaggctcaaatggagggccaaatggggaacgggattgttgctggtgagataatggagtaaggtcgaaaaatttggttctgcactcttcagcacggtgcaggttactttagggcaaagataaaggaacccttgtgtttacagtgccctttgtaagactcctagttgtgatttaatgttgttaaacggtggtatgttttaattaagttgctaactgcccttcttgagacaaggtctcgctctgtcgtccaggctggagtgcagtggcgcgatctcagctcactgcaatctccgcttcccggggtcaagcggttctcctgcctcagcctcccgagtagctggaactacaggcgcgcgccaccacgcccggctaatttttgtattgttggtagggacggggtttcaccatactactcaggctggtctcgaactctggacctcaggtgatctacccgcctcggcctcccaaagtgctgggattacaggcgtgagccaccgcgcccggccactaactgctcttaaatgtaactaatccttccgtgcctctctccacctgtgagatgggcactttattaaaggtccaaagtgaccagtagctcttgttactttctctgttcctcgatattgctattttcctttctaacttaacacctacctggaatggtgagatcacgaggtaaggaaggcaaagatgagtgagaaccactcaggtaacagaagcagcctcttgcattcacggagtttacagctctctgttctggttacctcctaggaaaggccttcccactgatcgtctatagactgaaatctaacccttttacagcgggcctggcgaactgtaggggccgggccacattcactcgctttgaaaaaggctgcagcgcacctaaaggaggcccggctggccagcttcctaaagcacagctcggtgggaacaaacagctatggacatacagaagaaaagaggttaattcggccggtgatggggatcagaagccctagtcctcgtccaatattacgtcactgggtgacctcgagggacgcttcgcggagggcctcatttttctccactggcgaatgcaatctaagggtcttcggaaactgtgggagcccttgggcgcacctatccgcctcacctcgaggcttctcacccgctggccgcccccttgcgcccctcgttttttctagctcctttcccattccccaccgtttctctcctccaaagctaagaactcgagttgctcctcggccagaaacggcgggcggtcctgcaacgtgcaggcgccaggtccaagcccggactcccctcttcacccacctgccaaagccgcaaattccgcagctggtgtccttcaacgaatgtaaccacctctcggcccggccggaagaagccacctcccccgcacgcgtttagccggcccccgcgattcggcctaatgcgacgattggctatggctccaaatcccgcccttccgattcctgtctctaggtcacctccgcaacacagcaacggaagtagggtgttgagcccgcccacacttccggaagaattgcactggactgtgggtatcctggtctccgcgtgtgtgagtaccgcggcgcgaggttagtggtagctgggtgcagacgccgtggcgctggtgagtaaaggcagaggcgaaaaaggaggaaacctcatggctgtcaggtctgtcccaggcctggttccctgccaggcacacgctagatgagtgtggttcggccaccttagccccgcttcgaagccggctctgttgtagcagcccctgtaaccccaggctttgtgttcggaaagtagcctaagtatcttctgtgcccctggatcgccttacttttcagagcctcagtttccccttgcttgaaaggaaattaagggtgaaattatcagcaaactagaccccccaaactttcctgtttctatgaatcatatacccatccctgattccatatccttggccccacccggtcatcacttctttagtctaaagcccttgtagagtcttattaccaagtgtctgtcagaactaacctctcctgtcttctgttttcacttatacccagttctggttctcatggtttctctgctgtactgcatttgaatcctttttttttttttttttttctgtcactgagataacaggaaacagtgcatttgaatccttctaccgaatttacttgccttcaatactgtctctcttcatgtccaatctatagcctgcagtatatttttcttgcttactgttctctcgctttccctgcttaagtctctgacttgccaaagcaaactacccatatctaattcaaggtcttccacaaaaaagcccaacttctcctttaatttttttgagacagagtctcactttgtctcccaggttggagtgcggcggcatgatctcagctcactgcaacctccgcctcccggcctcaagcaattctcacgcttcagcctgcctagtagctgggactaggcgcaggccaccacgcccggctaatttttgcgtttttggtagagacggggtttcgccatgttgactatgctggtctcgaactcctgacctcagatgatccacgcgcctcgggctcccgaagtgctggcattacaggtgtgagccatggtgcccggccttctttaaaatttaacttcaatttttatgctttaatctcccagtggtctagttgaataattcctcagagacaacagcaagcctttgagcagttgtttgatagggaaattgctggtgtttattgaaataataggcttttcccatccatgtcttttctcacattccctttctacctgtcaagcttctgttcatcttttacccttaagctaaaaaagatcttctttatgaagcttgcctcctttacttatcccttcctacattgccttatcccttcctacatctttgtgatcatttataatctgatttgcattttaagttacttgcataattgttttatcttccaaaaagtgtgcatgttctttgaaggcagaggattatatattcatctgtagagctacagtgtatctctgacttaactgtagcttcttagtgagtatgtgctacattgaatctataacttctttttctggaagaaggtgggtggacttgtggttttgaagcagagacctttggaaagatgaagtatggattattccgggcctgacatctaaaccatctatgttgtagtcctgaatgttgtctagcatattgctggaacgttctgtctcttgcccgttgataacacctttctgaaatctgctaccaagacaacatgtcaccattatcctttgcattgtttttaggagacccaaacatggcaaacctggaagaaagcttcccccgaggaggtacaagaaagatccacaaaccagagaaagctttccagcagtcagttgaacaag

SEQ ID NO: 914172 - DNA, 4001 bp, Homo sapiens
aatcgcttgaacccaagaggcggaggtggcagtgagctgagatcccaccactgcactccagcctgggcgacagagtgagactctgtctgaaaaataaataaataaaaactgagaaagagcatgaaacttttattacctagataagcttggcaacattcttgtattatgaatgaggaaactcagacactattacctgtacaaagtcacaagactagtctacagaatggctaaaactacaacccaggtctcctcctaatgcccaggaccattgttctttatactaaatatcttgtcttctctcatagcaacccattttctcataacatctgaggagtgaagctaatattttacccaagtataattatcttgggtggcaaatttcatttacttttacactgaagagcagaaaagaagagaaagtaattacttgaaagttaggccaagggggatgaacttaacatgctatgggcgtgactgggcagagcagacagacagaaagctttgggattctaagatcactcaagtggcaagcaacagtgaaagggaaaatgtagggtagataatcaacttaagggaattcactttcccctagctctgttcaagtgtatctgactagacaccagttatgagccaaaacaggagagctcaaagagaggagataagttggacaaagactagactccattcaatatgtgggccaaaagcctgaatattaagagacgagattaacatacctgaaagtctttgacttgtggaaagaattttgcttctatactagagaaaagcaactaggataacacaccttactcccgaaaggagaaacagaaaacaggccagacacctgtaatcccagcaccttgggaggctgaggcaggcggatcacttgaggctaggagttcaagaccagcctgcccaacatagtaaaaccctgtctccactaaaaatacaaaaattagccgggtgtggtgatgcacacctataattccacctacttgggtggctgaggcatgagaattgcttgaacccaagaggcagaggttgcagtgagccgagatcgctcatggtcccagctactcaggagactgaggcagtaggatcacctgagccctggaggtcaaggctgcaggagctgtgattgggccactatactccagcctgggcaatagagtgagactgtccaaaaaaaaaaaaaagaaagaaaagaaaagaaaagaaaaataggaacctgtagagactgttcaggaaaaaaagttgataaatagaaagataggccaggcacggtggttcatgcctgtaatcccagcactttgggaggccaaggcaggtggatcacaaggtcaggagttcgagaccagcctggccaatatggtgaaaccccgtctctactaaaaacacacaaattagctgggcatggtggtgggcgcctgtagtcccagctactcgggaggctgaggcaagagaatcacttgaacctgggaggcggaggttgcagtgagccgagattgcgccactgcactccagcctgggcgacagagcaagactctgtctgaaagatcacctggtccatttacctccctttaggcatgtaaataatagtagttacagttattattatttctcttatcattattaatccctcttttttacaaatgaggtaattgagattcaaagagataaagtgacttgccaaagatcacacagataaatgtaaaaattatctcaggttactaacctcaaacagagactatcaaacattttatttaaaaagagttatcagaaatacagcatcagcaattaaaagtcaaagttcaccaaaaataaagaaatgacccttacctgcagggcactgttgaggaagcagctgttttgccctggctcattgctgaggcctttgctgggggctatggaggttgagcttcgaggtgcaaacatcccttgtacactaccacgaccccctgaaaaataatttctcttccaagacattattgttcacatttagcctgaaaaaaaaatggagaaggatttgtgcctttttggcaggaatttctgtctgctaaagttctaaaaggaaagggaatccagaatttagtgaatttattttggaagattttgactttaccaccttccaaatatcatctgtgtagtcaagggactcaggtatcctcctagatcaagatgacagagccctccctcacttgttccaaacaatctccaaaatgtaacatggcacaggactaatgcaaacagagaaatccttaagtattgcttccttctatttttcttgaacagcctccataaagtcctggtgaagtggatgtaattctcaactccaacagcatccaggatcagggtaagatgtgttcttcaggcttgttgataatgcttcttatggactgaagatttttccaactggaaggagaggcagacagagaagcaagaatccaacatgatcctcctcaccctctattgccttgtctcatcatcctctgaagcaaaaactcaaattctgagcaactgcaaaaggttccacaaagccaagaagaagcctgtttgaatcatctgaggtttttgttgatgttcttgctgcttctttttaatgtgccccaaacttctattgtcccatccagatcttcagcaagtctctcctctttcttctgggactagaatagccagctgtgtcagagagctttaacagaaataaaaaaaatcaaaagcttgcgtcacttaatgactctactggctttggactgttctgccaagatcaacgttgcctcacttctcactataaacttgaaaccttggcaaacaatgccaaaaaaaaagaaaaaaagaaaaaaaaaaaaaagagagagacacccaaactaaagagaaggaaaaaaaggtatgaacagctttactttcaggggaaaattctctgaaattttcttgaagcagaagaaagttgatctggatagaaataaaaacaaaatacaaactttccagtatcaggctaacacaaaacaaatcaccaagtaagcacacacaaactaggaactgaaagttccttttggacattgtgaataaagcactttttaaaaggtgttttccatgaatatgcttatgaaaacgtgcttaaaggtgggaaggccatgttagcagtctaagatctgttctgagtaaagatgttccatccagagaaacactgatggcgagtaaaccacatgtccttaacatgcagtccaagagaactaaatcttctcctgccctgtttgtttgtttgtttcatttttgccagaggatcagagagataatttgggttacaaatcatttaatctccagattatatccaagggctcacaatcagaggcaatccattgaccaactttagttttcaactaattaaaatgccagtgaggcaacagagagtaataccaaagcaagtatgttccctggaaggaaatcaccacatctccagctttaagttttcctataaggctgccatgtccatctacataaggaaaaatttttaaatgttaagtgttaaatttgccaacatcaacaattcctcattctcccttccttctcaccatcatatgcaccatctaaaaacacaaaaatgctttaacatcttaatcattctctgggagatcacctagcattgtctacagcatgtccaatggaaaaactgaggtacaggaatattaaatggttgcataagactgttctttcccttctgtaaattcccagactatttataatctacatgtcccaattaaagtatttgattatacagcctactgtcacattattctctatttttattactctctgttttatatcgtatccgtcataatatgactacatgaaatgaaatagtagctacagtcaggtatgtgctaaacacgatacttatgtcctttatttaatattcacaacagtcctatcagatagctattaatagttccattttacagaaaagtaaagagaggcttaaagacattaacttgcccaattcaacactg

SEQ ID NO: 914173 - DNA, 4001 bp, Homo sapiens
agtcctaggcatcacaagtatacttccaacataacaatggaaagtttaaaagtgtaaaggcaaggactggggttgagaggtgaagacgcaacatatcccaagaaaatgtcattgtggcaaactataaaatataaagctttacatagatcactgtcggtctatagagacttccagaaatactggacttcttattggaattggatgaaattgcatcctgattttttgggagaagtatgatgtactttaaagtgatcagaacagttaactctaaatcaaataaataaattctcaatctttaaactcccttagaaatgtcttatccctgagttaccccatggggagaaaattttatagtattaatgtatgtattctaaaagcagagtgaatttaaagctaaatgcattttagaaaatatagccaaatctgtttctctgaggaaactaaatgaaaatgttaatctttgccaatattcagtttagagacattattttaaaatctgcattgcaaggcaaacagtaagaagcaggagccttatgtagggtttgctatagttaaattatggctcatactatctggtctgaagtttattaagaattacactagaatacttcctttggtttcattctgattacttatttagaaattctgttgaaagaaccaaccgtgtgccccaaaacagtgactgcaaacgattatcaacagctgtcttgtgtctgtgtgcacatgtgaacaaagttccaggcacctataaacaacggcagctgtgttggttggtacttatgtcacatcattatcaaataaaaatttaatcaggacattatcccaaaaattcacaccgcatgtttatgctctcgttgcatgacaaatccataaataaaagtttatttggaaaaatgtggtttgaaatacaataccacttgttgccaaaatattacagtaattaaagagtaatcagtgttaaaataattgtagctgaagaaaaagttcctattattaaaaataaaaccatgtgcagaaatatgtagatcaactactttattttttttctttttttctttttgagaccgagtctcactctgttgcccaggctggagtgcagtggtatgatctcagctcactgcaacctccacctcccaggttcaagcaactctcctgcctcagcctccggagtagctgggactacaggtgtgagccacccgcctaatttttgtatttttagtagagatgaggtttcaccatgttggccaggctggtctcaagctcttgacctcaggtgatccacccacctcagcctcccaaagtgctgagattacaggagtgagccaccgcacccgcttagattaactactttaaatatcagtcctctcatttcaccaggatgtttgtttaaaaaaaaaaaaaaaactacattatccaagccaaattaaatcaaattatttttatgattttttttatctaatgtaacaaagtttcaaagtaaaagaggcatattttaagcaataaggatcagaagatatttggatactcaagtgtgtaggaaatactcaagtatacaggaaaatatctcagcacaatttatagaagaaaatgacaactccacatttttaagaagcattttaaaaattgacaactatacaattctaagatgacctgtttttccatttaatctgccaagaacttctaagaatccagtaccctcctgaattatatgctttaaaagcaggtattgtatcttaatgtcactaaattagcaccaaactgcaatgaaaaattcatacaaagttactaaggttcatttccaataaaataaaatttacagcagaccatttttcctagagtacattttgacagatgaacgttaaaaatataaacaacatcaattttaaaagtactttaccctttgtgagataatcagtctggccttgggaattaacaacagcttcagtcctcatagagtaacttatctattccaagatttcattattattttatagttctcgaacacaccaagagtgctgcccggcggtacctcacacattctgcaactaactaaaacaaagaaaggcagaggcagctctactttaaactatctgtgaaacaagcacaagaagaaaaagtttgagatgcactctgtcttcttctaagggagaaaaaaaccttgctgtggttacacagactatatattttcaaacaaagctgatcattgttgagggtgaaaacacggctttcaggctacatcccaactatgaggcacaccagcctacaccagcattccatccgctaacaaacagcggcttgaaagaagcagcttcataatgtgccttcatcttgtgtctcgatattagccactttcttatttcttattaaaaataaaacttgtcacagagcaacaaaaaaatttttatttaaaacattaaagctaaccagaaatgctcctctcctcaaatacattttatatcttaatgtaatttttaataataattcttaatgtgaaaattgtagcctctgtttcagcccgtttcagacaggaagcaaaatacatgctaaagtagtggttttggacgtttttaacaaaccacacacacatacaagtaaaacaaatgtctcatgaaacaatatgtactacaagtactgtaagatggcactacaaatttttccattctgttttatttactccttccttcttcccttcattgtttctccctttctcttaaatgggtaaaatctacaatttgcaaccattttgcaaaagtaacatccctgttagaggcatgcctatggacattaattacacttaactggacactaataaattaagtttacgctcagcttaagccaggtgtaacattcaactaaagcaaaagatctcagaagttgagagggggaaaatttctcaagccatataccaaggaataagaattagactggtgccaaagttctaatcagctagaagataatgaaacactatttccaaagttaagagcaaaaaattatcatgaacttggaattctataccaacctgaggaaaaataaaaagatttttagatattacaaggtgtggtaagctgaagactgaccttctgccctgccagggatgtccacatcctaacccctggaatctgtaaatgttgcctcataattgcaaaagtgattacagatgtaattcagctaaggatcttgagttcagagattgccctgcatcatgcaagtgggtccagtgtggtcacaagaatccttctgaacaggaagcaagaagattaaaggaaggaggaggcagtgtgatggtggaagcaagacatcaccagctaaggaaagcaggcagcctttagagcaagaaaaggcaaggaaatggattttcccctagtggctccagaaggaaccagccctgctgactctggcccagagaaacttgatttcagacttctgacctccagaacccattaaatgatacatctgtgttgtttaagccaccaagtttgtggtaagtcatgtgctgttacagcagcatgaaaacacaggattcaaagtttactgcctatgaaatgtctctttgaaaaaagaatttgagagtatactacagaaaaacaaaacagcaacaggaagaactgacaaagacgctccttgaccaaactttgggcaggctcctttaagccctcttcttgactacctcagcctctacctcagccttgtcctatcttcagcctgcctagcccagttgtagcaagaatcctgctaactcaatttagcaagaatccccccactctccatgaaatctgatcatcctacatatctgaacagattcctcatcccccacccttgatatctgatcaccctggcctgtcttcagcaagaatcctgttatgttggtttagccagaatccccctacacttgatgtctctcctcttagtgattttccatcactgaccttcttgctctgcccattggctatccatctccagttgtccttgctgcgtgcagagttgagcctgacctctccact

SEQ ID NO: 914174 - DNA, 4001 bp, Homo sapiens
ccctataacgccagaggatgatcaatcacctaacagtgccaaatctgacactttcacttactggcttgtttaaccaaagtcagtccccagtaggagctatttgcatgtcaaaacattattaaaactggtaatggactagtcttaccagaaacaagtacaacaaagagtctggctgcatagctaaaaactaagtaggcaccaaaactgaggctcagggcccaaattcttaatatttggcaaaggatgtttctttgagtgcctttgtaacaactcattaattctctatatatatataatcagcaaaggaatttctgttaactaaggatacctgtacttgcaattaggatttcttcctttaaaagttaacttatacttttattagtataattttttttctatttggacattttaattgtctacgtagaatacaacatggcatcaacatccattttaagtaatgaactacactatgtttacaaatgttgttataaaagaatggcaaaccaggaaatatttttgttaattttagggtctgactgaaccagaaataaaagcaaataaaccactgttcacttgctgctggctaatttattcttattcagatgacttcaggaaagaaaaaagaacactgacttccccctgaaggaacttgccagagactcaatataggagggagttggccagggtgatctctaaagttctgtgtaacttttctaagctatgaaatattaaatatctatcccaaaggtgtaattatttttataaaaggattaatacaggattgaaaccattttctttcaacaagcaacatacttaagacggcgtcctcactttttttttttttttccattcgtctcgcactatttccaatcactgggtacggccctaattcaacaagccttcccagtccaaagaaggcatgctgaagtctacggtctaaaaagcatctatctgcggattaaatgttgggaaagaaagggataagggttgggggtggggagagacaacattttcaaattacagaaacgtgcacccatggattcctacgcgtcccgcattttctagcagtaaaacacctgcgaggaaccgttttcacgcattacaaatgccgcaccagcctagggttgtgagcgccaaactattttgcaaactttgcaaaggcgcacggatttccaagacttgcagatctctcattcgccccatcctcccctcgcctggtccaaacaaagttccgcggcatcaaggcagtcatttaaaggcacgaagtttgcccgggtcctgcccactggggctcgggagacgcgaccgaaacttgcgagggagacgcgcctggccgggatcgcggctcactcggggaggcagtcgccgggttccacccccgggcctccccgcaccccgcgcggcgcccccagcccgcccatcgccccgcggaccccacgctccgggcgcggggacacacaggcagcccccgcactgtgcccgagccgccccccagggccgagccgcgaaccgcagccgcgtcccctcctccaggggccgggaatggcggcgtccggctccccggggccaactccgagtcccggcccggggaggacgcccgcggagcccgccgccgccggcccctcacggcgggagctgaggaatggaagttacctcagtacggtcccgactgctaggctgtgggcagcggacagagctggcggtcccgggcggccgagcagatccggcgcggcgcggcgcggcggcggcggcggctaccgcagtgccctccgccccattgtttcccttccaagaggatcccggcgaagccgagcccgggaaccaggaagttccccggcgcgacacctcctgccgccgctatggaaacggcccccgcctcccagggcggctcgcccgggaccccgcctccgcgcctccggccccgcccgcctcaccggccgccgccaaccgtcaccgcagcggccgcagccgccgccatattggcgcggccccttcccggcggcacgtgcgctccgctcccgcactcccgccgtgcgcgctcccgcccgcctcggggacgcgcgcccagggctgcaggtgcccggagcccctcggcgggaagcgggcgctggaagcccaggacccaaagcggggcttcggggcacgcaaacgagcgacattggcgtgtccagccggcaggtcagaggatagcagagacgtagggaggtcagctgagtagggggcgagaggatggtctccggagccagcctggcttttttttttttttcatttctgcctcaactacttaccaggtgtcagcccttggacacttttccctgtgcctcagtttcttcatctgtaaagtggaatgataataggacctgcctcatggggctgtcctggaacaagcgagtgcttggtagtaagtgcaaagctcaataaaatgccattgctactgacataggtgacactgctgtcatttttcaggaacttaggctaagcgttcacatcagcactactttaagtaggctactgtgtagatcccattgctgcttcaagcttctcaaatgttcatcactgtcccatctttctgtaggtcaactttccttttttacatcgtggaaattgtcaagagttttaatctccaaagcctcccattaaggggtgccataaaaagatgaatgatgtaaacttcccaaagccgtaattagctgacagttaaatgattgattcaatcgaagctagaaaagttagggtgtacaagtaaccaaaaggcttcctgtccttgattccaggaactagaattactgaacctggcaaccctgcactgtgccttttatctctcttttccagctggtgaaaactgacacgaagaaactgaatgctgcgcccaatatctcacagaaggggtggaaggaggaggcagggtcacaggctctttgctagcacccaaactttgagaactgtgactcagattaggtttggtctctaaggctccttctagctctcaagtgtggtaatcttaacgacagggatacccagcaatacagtctgagaaattcatccttaggcaatttcgtgattgtgcgaacatcatagagtatatttacacaaacctagatagtagagcctcctacacacctaggctataaggtgtgacttattgctcctaggctacaaacctgttctgcatgtgactatactgaacactgtaggcaagtgcaatacaatgggaagaatttgtgtatttcaacatagacaaggtaacacattgggctataatgttaccatggctatgacatcgctagtccataggaatttttcagctccattataaccttatgggaccaccatcgtatgtgcagtccatcgttgaccaaaacgatgttatgtggcacatgactgtgtatacgctgtttaagaaaatacaaatctatacttccttttggggcttctttcattcatttaaaccaggtttctgaagactagtatttatttttaggatcctgataccaaaatggcataactcatttaatacatgaattgaggggctaaaagcagaccagagttattttcaacaaccaaatacttctccgaaagttacaggattcccaggttagcaatcacccagactgggctattctcaattcctgacaggaaagagccctcactcgtatctctttgtagcccctgctggacccagcagattgctttgcacataaaaagtcctcagtaaatgcttactgaattaaattgctatgattgtggtctcccatcactaaaggagaccttggaaccacagagatgctcaagagacatcagtcttgggaggccaaggtgggcggatcacttgaggtcaggagttgaagaccagtctggccaacatgatgaaacgccgtctctaccaagaaataaaaaaattagctgggcttggtgatgtgtccctgtagtcccagctactcaggaggctgagatgggagaatcacttgaacccgggaggcggaggctgcagtgagctgaga

SEQ ID NO: 914175 - DNA, 4001 bp, Homo sapiens
tggggccctctattgctacttggaaaatgcttcctgggcaggtttgcttcggttttctcaaaattgcaaggaccctgccctcagcctctgcccaaggatcacaccccagacgctcagcgcctccctaggcccacccagaccagagccacctccctggagacaaaaccagcatcctccctggagctctgtggcttctcttccccttttgtttcccaggacctgggagagttcagccgggtggtccaaggctgcccgaggccatgggaggaccttcggaaccccccatgctactcctgggtcaaagggggttctctgctgggcagtgtggaggcgaccactctaacccctacccctgcattgagtgaagaggtggggtcagcctcaggttctctccggacccccagcggagcccacccgttcacttcgttttactcagtggggctccccgggaggggcagggagagtctggtgtggccttgagaaccgagtgtgtgaccaggacccggcagcaggcaccacgcccaccaccctcgagcctggcctcctcggcctacatttgggtgcgccccacggagctctgtctacaccttaggagcgagtgggagcccctctctgtgatgagagcgtcgcaaccctgccctgacctttgcagccccagcactgcagggcgccactccctccccgtctccagacccgcactcctacacagcccggactctaggaaaacaatccttttattgaacatacccaagaacgggggtgggaaggcagcaggaggggtcagggcggaggggcctcggcctggagaggggagactggccgcagccgggactcactggcacgggtccctgaggacccctcgctcggcggccgcgctgcccagaatgaagcccacggccagggacactgtctggtcgaaggcgccgcgcagctgctccacgtgctggttcaaggtcagcagctggtcgcgcagcgggcccaggatgttcgcgatgtcgcccaggtgccccagggtctgcagcagggcggtgttcagcgacgggggcgcggccggagggggcgcgcagtcctcggggcggccgggcggcgagtcggggtcttcgcgggccgggggtggcggcggggacccggggccgcggacgggcgcgcggtcctcggggatgcaggtggcgagggcggtcggggcgggagctggcggggagccgggggcgggggaggcgtccgcagacttcggtggggacgggctgaagcggagcgtccaggtggggtccgcgtcgcggtcgcgggcggtgggcagcggggtggcgtctgggaacgcggagcaggcggtcgggcggattttcgcggggcgcgcccgcccctcccccgcagccctcggcagcccccggttcctccgcagtcctcggccccacctggccccccagtcccccgcctacctggttcgctgggagccggcgcgtgcgcgttggggaccgggcggcgggcgcgctgggggcgcccggaccccggggagcggcggcgaggccgtttgcgcccgttgtcgcccagcagccccatgagcttccggatctgctcgtcgaagggcccgggcggctggccgtgcgcctcgcgaaacttgtctttaaggaacttgtagcggcggcggcactgcgcgggggtgcggcgcacctgctgctgggccagcgcggccgacacgcggcggtaggtgggcagggcctggcggcggtccaggagcagcgcgcgccacacggccggttgcagcagcgtccccagcagcagctccgtctcccgggcgctccagggcgtgcgctgcgccgagcccggggacaccggcaacccgagttcccccagcgcgctgggcgaggcgggcctccggggcggggtccccggggcgtctccgggtgtccgcggctcggggtcggggctggcgggcgagggcggcgcggggggcgcgagcgggggcggcctgcggggccggagcagcatcccggggctggggcgcggcgcgcgaggatggggagagggccagacgccgcccgggccgcccacacgcgttctgagcatcccgcgccgccgtccctccgtcccagccgggtctacgcgaccctcccaccatccccgccccgccccgcgcgccccgccccgcccgccgggtcctaaggggtcggtcctggcgctgcggccgggaagacgcagagcaaagactggcttcggttggaaacggagggtcctcaggagttctgttcttagacccgttcaacggaggtgccgcgatgcctaagccccggcggctccgctcgtttttagcctgtgccgagcctacccccgcccccgtcgaggtgtgtgcggagcccctcccgctccggaaggcgctggcgcccccttgtccggcccccagtgctgcccccgcccccgccgcccccgcccgggctcagcacctgcacgcgaggggtccggaggaccgacccgggtcccagggggagtcgccaggccaggggatgggtccgaggagaagccacgccagccgcgggaatgggtgtcggaattcacgcgctcgcagaagtagcttttaaaatctgaacttcttccatctgcagcgcgtctgcagccagcatccctgggaggaggaaattctcttcctattaaatgctcttcctccttgccgcacggcgccgagtccttctgtctcctgggtctcctctgggccgtggcagcttctcgcgtcctcgacacggttgaggacgggccaggtgttttgttgaatgttcctcgacttgggtttgcctggtgtcttcctgtgatccgactagggtggtgggttttaggaaggaaggcgcaggggtggagtctcgcccctcctgtcttgtggctcagcaccggtgaggtctgctccgtgctggggtgcggactgtctgccactcttgcagtcttcaggtatcgcctttccatccctgctctggtcactggaatccggcccctcagcccatccccaactcatggggagagtaattaggccccacctcctggaggggtgtctgtattttctgggattcttctgtaaggtttgtctctctgcctgttgatttatttactcagtcatttatttctacagtgtgggctcgtgtatatttattttatcctttaggtcataacccgatgctgttattatttatttgttttaaaagttctgtttgtttttattattttttacaaatggggtctctttctgtcactcaggctggagtgcagtggcctgatcacagctcactgtagccttgaactcttgggcccaagtgatcctccagcctcagcttccttggtagctgggactacatgtgtgcaccaccacacgcacctagttttttttttttttttttactttttgtagggacagggtcttgctatgttgcctaggctcgtcttgaactcctgggctcaagtgatcctcctgcctgggcctcccaatgtgctgagattacaggagtgagcccctgtgccgggcttttatttgtatttttgcgcatatcgttcctgctttggccattgaaagtcttctcacctcctcctctcttccttgtccttttgaaaccccctcccagctccctggcaatacaggatgctcctgcctcatctggtcctttgccgaccctggtcctagaatcagcttttcagacacttctcaagaaatctgtggttcctggccaggcactcatacacggggctcacacctgtattcctagcactttgggaggctgaggtgggcagatctcctgaggccaggagtttgagactgacctgggcaatatagtgagacccccatctctgcaaaaaaataaaaaatagccgagtgtagtagcaggtgcctgtagttccagctacttgggaggctgaggcgggaggatgtccttttgctcaggaggttaagcctgcagtgtaccgtgatgacctgactgcactcctgcctgggtgacagggcaagactctgtcttaaaaagaaaagg

SEQ ID NO: 914176 - DNA, 4001 bp, Homo sapiens
tattatctaggggaaggaatccttaggcctgtcttacccatccttcccatctcctccacctcccaagggtagttctgtccagagcaggttaggaggtgaagagcaggctaggtaggggtggtggggaggaaggctggtgcagaactgtgtgcggcctggtcgccgggtacctgggtctcggagaggttaagctgccgggcgagctcggtcctctcgcggcccaccacgtactggcagcgctggaactccatctccagccgatagagctgctccgcggtgaaggacgtgcgcgtcctcttaggccggtccaagtccaggcccttgggcaggatgatctctcggatggaccccttggcatctggggaaggggagatgtcagccgccagaaccctcccgtccccctccacctccttggcccgagctggatttggggacacagtccccagaagcgtgcagttttggggatggggggcggggtgcggagcgcgaccacaaccaggtagcaaagacactgtgtggagggcaaggggcctaactccataccgctgaccgaaggagggaccacactttgtctttttgtagagtcctccagacaggggagagaaaaaaatccaatcaattccacataggcggacgtttcttccggcctgggggggcctcggctgagccttccgggtcccctgtagcctgagggtacccttgtcgccccgcccgggtcctgcgggccccagctctgggcttgccgaccagaccgtgatccagacgtccccacccccaccctcgagtctccttccctccggagtccgcgcggcggaaggaggagggactgagtcggggccggccgggcccggagatctgctgctggctggggcggcgccgggccggggcccggcctcgcagcctccgccgccggggctaagtgcacgccgcgccatccgagagcggcagagcagagcaccaaagcggcaaccgcggctccgtaaccaagcccagctgcctctcccggcggcagcggtcgggcaccgatcgcggccgtggggtcctcggcccagtgcactaactggcagggccgtagcccgcgatcggcagctgttctccggggctcgcgttcccccttgggtgcgctcagccctccagagcgcgggagtcccctggccggctcccggcaggtcgtccggcccttggagcgcgcacacctcctcccggagttttctgctcctttcccgggtcggaggccgcagcccgatgcccggccgcacccgcgcagcccctcatctccccccgcagcccggtcagcggggcccctccgggcgtggagggccgaggcccctggagagcgcaccggagagtcccaggcgcttgtccccagccggactcggggcggggagggccaacaactttctcccaagtcccagccggcactccttcccaccggcctgtgtcggcggcagcgcgcagctccggccccggagtcgaccccaaagaacgcgcctggcagccctgcccatccctacctcggaccaggatccggcggcagtaatccgggtccgctgcggaattggatttacttttgttacaatcctcagcagcgcccgacgctgagaaggcgccctgcggctccttgaggaaggcggctgggaggttcccctccgcgcccttgctctcccgactctccttgtgcgcgttcttcgagacccgggcagcctcggcgtccgagtggcatcgaacgtccattttgtctggtttcccgaacataggcaagaacaacaacaaaaacagaaaggaaaaaaaaagcaaaaaaaaaaaaaaggggggggggcggagaaggaaaaaaaaaagaggaaaaaggggacaaaacccccgacaacgcggcccgtacgcccggcccggcgacaggcaaggggcaagaatgaatgtccccgcggggaggcttcggcggccgcgcgcgggtcagcggcgacgggagagtggcgcgctcgccgagaggcggccagtctggtccaggatcctggtggagctgcggcgaggccgcctcgtcagcacccgcgtcctctgagcacgtccagtgtccccagcctggcgatcaggtagcgaacagcgcaactccgaaatgctgcggctcccgcctgtttctgagacggcgagttgtagttgtccgacacccggggggacgcacactcgctgttgcaattgattacgggtaatttcgcagcccccacgtttcggttacctcatgaatacactaaattgtttggataatatatcagatcgtaatggatggtttctgtccttgtccccaatcaagtaggggtttagccagtgaataaacggaaatgattggtcttgctttcaggaaacacacaatcaaagacccacacttccagaaaaacttttgacaagattcatcctgaattgttagtaccattagcaggcattattaactttccttttgcctttgaccctcctgctcacatactggctagaggggttttctccacactcgccagatagagctgaatgagggttgggcggcgggggggtgtggggggagaaaaaaaaaaccctgcgcaccctgcggcagaagaaagcagttgtctgggagtgggggatgggggacagagcggggggagaaagttttcccaaaaagtatctcccttgcactctaaaaaagccaagattttcccctaaacaactccttcttaacacacctcgacgcagacagccatcttaaactgccacctctcttcatttagttccagttggattttttcatgcctgcacctccagcagccctgaggcagcccattcaaagggcagctttgtactcagagtccagcaggagagagagggggagagggagagacggccgagaaatctcaactgtgagatctgcttcaaaaaaaaaaaaaaaaagttttcccctagctatttcattgtctctgctacaatatctttgagaaaagcaacagccagtaatccaataagagcattgattaggctacaatgattcaattcaagcgcatggccttgtgcaaggagcatgctccagcccttctcgtcaccttgccggggcagaagccctctccacgccgctctccccattcattcctttatgggaaatgcggagcaaaaggagtgaaagatggcaattatctaattggactattaacaaacagtcctctgagtgcggcggtctggcgtggctcctgggcgggggaagggccgtgttccctgccctcattcacaaagagtgcaggggccggggaggaaaggggttttttaaagggggtgggtggggggagaggagaggtgggaggtttggctgagaatttttccacacaattccaagaatggggcggaggcggggggaggggagggggttggggagggggtcgcggcgagcgggtgggaggaaggccgggagggggaggggtgcgagtgtgtgtggcgggcccctaggggctccagctcgcagcgacgcgcgcaccgtccgcacctcccgccccgccgccacctcccctgcctccgccgccaccccgcgggacccctctaccgtcccaagccaggagggggccccctgagcggggtctttcgcgctgtccacccagccacccctccagccacttaggggcacccaggtttggcccagctccggagggcatctctggccctgcaggccgacatcaggcttccactttagttgactgggcggagcggtggaactgtcccgagctactctccgcagggcggcgggtttccagggtccccagcgggctgatcgcccctcagcccggcttcgctgcgcacgctgccctcgaagtccgacgccgactgggcgcccggggaaagtgcctttgattacgagctctgctccggcgggttggtgaggcgggtgggagcagagacgggtaagaggggtaagggactttgcggccaccctgttctgaagatgtagagtgggattgtgttaaaatccggcgaactctcctgttacctcccgc

SEQ ID NO: 914177 - DNA, 4001 bp, Homo sapiens
ttcatggcatggaagcccataaataacttttctctaaatagcctaaccagatatcaacccctagactacactagctctgttccaagtgcaacatgtggttttaagatttcatttcctgaagtactacatggagagacactattaccttgtctctttacattgtttcctatttgttgaaaaatggaggcctggaatgcagccatgttagacaacactacataagaatgtactctggagtgttctgttcaaattagttataaaaagaagaacaatgtacaagtagacattgtgaatgaatacagcattcttactgaatgaatagattcttactaaagctatagagaagaaagatcaggaatttggtcggtggtgtcaccctgtcttcctagctaccagtctcctaaattgcttgagacagtccagggacccctgaagactgaggaagactttcagctgctaaagagcctctaagtgcactaaagtgctcaaatcagaaaagtaacccaagccccacccagacagacccacagttgccgcccaactgccctgacacacactatttacacagctcagtgggggagcagtatgaactttttccaaaattgttcctcacaagcaggaccagtctgagtcacccacccagggtgggaaagaaaagtgtgacattagccaggggagtcttgggagactggtctcagcacctcttttttcccatttcagacgtgggctccacctcctccaggaatcacctcggttatgagtcacagctgtgggttacaggggtctgcagagccaccaggaaagttgtggatggggagcggatgccccagccttctctccggcaggggcggcagatcccagattccacaggcctctcccaacagctccatcttgcttcctgccaggaggaggggccaaggagggcccccgagtctagaaaggccccagtgggaggaggccgtttgacagcaggtaacgccaggtgaaaatgtccacaggagggaatgaaaggaagggcagcagggctgagcggaaggaaaaaccgggcttgtggtcacgaatgactgcataaaggtgtgagagtgccagaggagtgagcataagtaaaatgcccaggagggaggaggaggcgacagagagtgaggcaagtgaataaaagggcggaatacagggagctctggggagcgggggtgggcgaggcgggtctcagggtgaggggcagaagtattagaaaggaggacaacgtggctcaaataaggatccctagaagagaaggcaagggatccgtgggaaggcccgctctccctcccccgcacagccagatcgaggaggcctaaaaggcgctgagagcgaggaagtcaacgtgggggcgaagcctgcgcggggcagggaccctcggacatcccagcaactctcatttattgggtgtctgctgtgggccacacgccgcgcgaggcactccacgaataatacctcgccatatcttcacgacaagcccgcaaggcagcctttttcatgactgctcccattttatagatgaggacactgaggcccggagaggctcaggactcgctcaaggtcacagggcggagaagaggccattcgaaccctcggcgcctggctccggaacccacgcggaaagccacggccagcgagccggccacaggcagccgcgacgcgggccggggccccggggatacctcccgcgcccgctcccgcgccaggccctgcgcgctcacccggacgaggttgctgacggccgcctgcacggcggccacgggcgcggtgaggtcaggaatggctttgccgtccacctcgccctcctcgtgcattatcaccaggtgggagatctgctgtgccaccggctccaggatgctctcgatcgtgcgcgtatgaaacactggcatcgcggcggcgagcggggcggcgaaccgcgggcgacagagaagtaggatccacggggccgggaaccggcgaagagacagactgtgcagcgactacggagtcggggcttccctcggcgtaaccagcctcacgggctccccgccccctctcgtcgccgcgcccaatggcagcgcagctcagacctgggccgccactcctactggtcccttttcgagatgctccgccccagccaccgcgccgccaaaccccgcccctcccccattcctaagggaggggcctgggattggggctgagccgccgggattgctaccggattcccgagccctaacgccgggcgctccttataagggcatggtgggagcggagcgggccgctggagccggctggtcccgcccccgggccgcctcccgcctcggatctggggggctccgcccctctgcagaatcacctcagcggggcggggtctcctcacctcaagcggcgctagagtttgatgagaccaaggggtctcccacgtcccctcctcaacttttcccttcacacgaaaccctcaaaatactccttccattccctcccagcaatgcatgggaaggtttttagtaaaagattcaaacagcagaggtgcactgagaaacagcagcgtcccattcacgtaaacgcagactccgccccctgccctcctcaaagacattctgtttaacagctgggtgtgtagccttctagacttgtctatagattcacttctacatatatattttctaactaaatgagattaataaacattttcctggaactaggtatgattgcccttgattaaaatgcccttatctttcactgctggtagaggtctacctcattcttcttaatgactgcatgatattccattgcatgaaataaaactatttacagaaccaatttcctactcatggacttgggttgggtcctggttttcactattaaaaaacaattctgcatgaattgtacttacccctgtgctgtgcatctgtgtatttatctagcgcaaatgcctaccaggaaagagaaaaacgcaaaagtatatgcattttatattttgataggtaagaccaaattatccagttccctcacgctttgtataagacatcttccaggccgggcgcgatggctcacgcctgtaatcccagcactttgggaggctgaggcgggcggatcacgaggtcaggagatctaggccatcctgtctaacacggtgaaaccccgtatctactaaaaatacaaaaaaaatagccaggcgtggtggcgggcgcctgtagtcccagttactcatgaggctgaggcaggacaatggcgtgaacccgggaggcggagcttgcagtgagcggagatcgcgccactacactccatcctgggcgacagagcaagactctgtctcaaaaaaaaaaaaaaaaaaaaaaagacatcttccaaacgtcttacttacttcaaattcgcttttgcccaagctttcccattctgaggtaaacactttcagtaatgcctccaagcaaaagattctcacatcaaatgaaaatttttgtctagtcctaccacaaccaccacagctgttttctctgcccattactttgtgttaatagtataaatatttgggtgatggggccaggcacggtggctcacgcctgtaatcccagcattttgggaggctgaggcaggcagatcacctgaggtcaggggttcaagaccagcctggccaacctggtgaaaccccgtctcaactaaaaatacaaaaattagccaggtgtggtggcaggtgcctgtaatcccagctaatcgggaggctgagacaggagacttgcttgaacctgggaggtggaggttgcagtgagctgataccgtgccattgcactctagcctgagcaacagagtgagactccctgtccaaaaaaaaaaaagttgagtgatggaacgatatgatttttttattttaaaaattattttattttatttatttttatttatgtttttattttttgagatagggtctcactccgattgtccaggctggagtgcagtggtgtgatttcggctcactgcagccttgacctccccaggctcaggtg

SEQ ID NO: 914178 - DNA, 4001 bp, Homo sapiens
ggacgtgggaggctgaggaaagatgatcgcttgagcccaggaggtccaggctgcagtgaggtataatcatgccactgcatccagcctgggcaacagagggagaccctgtctcaaaaaaataagtaactctaaatttaaagcagcaagatatttacaatttgcaatgattgatctgatttcgctaagcaacccaaacatacattttcactctttatctaaaacgttttaaaaataaggttcttaccaaatcctttgttgaaaatatctctggcagctttgccaaggtcagcatatgatggaggaatacacattgctggtagaaaaaaaacattccagtgttaatgtctctattctcccaccttctatccaagaacaagagcatgacccactgctgatattaaaattcaagcaatcccatttgttggaatgttttttatgcggtcaggagctacaatagaactataacgacccataaaggagataccaccaacgaattatttctaaaacagataaccatgattatacaaacttggggaattcgtttcaaaacggaaaaacagtctattacctacagcctcacttcctaggactggacaagtacaaagaatcaaacaagtatttgtgtgtatggatatttatgtatctgccaaaattcactgagatgagctgatttaactaaattagataaaaccgaaacctaagactaggccctttaccctgatacgtcctttaatatcttcgctgaggggaaaaccaacaccctggagtgggaagagaatttaatactgggaatttaaatattgaaacttggaaaaaatactgccatgtgtgtttcactcaaatgtctacatcaactaaatatcaaatagcgcttcaaacttactaatgtgactctcaagtcctcggccaatgctgtgctgcttaagggcaggcaatctgagctcattacaccagctcattcattccacaaagcacgtccacgcccttaggagcacaagtaatgaccttgcgctctcacaagagggactgctacttcctctagaaaagtgattgatccgatcctccaaaggcagaatccccaattaacaactttttacttctatacgtcaaagacatgtacaaaggctgaaaagtccatgcggccacagaccaactccccgggccttgttccccatttgaaatccagcagcccagcccctcctccgcagaggaggtggtcagacggtggggcgaccaccaaaagcagccgaatttccaagttcttggaaagatagggggaaacaaactgggtttctggtcgacaggcttcgactctccgccgccccatcccgcagagatcccagctttacttacgacgcgcgcaagtctgtccgtgggtcgccatggcgaggccgcgggaagaggggaatctgcgggagggacaagaagtgcggtaagctggggtcaaagggccaaagggagatcccgggcagagaggggcgaggggccgcggggcagcgcggccatcttaggaagccagggccgactccgagtccggcgcgggcctccggcttggccgccgcggcctaggcccctgggtcggcgtgaggcgggcgcggcggtacctggtggtgtcctgaggggggccgccgccaccgctccgctagctgctgaagccgcttggcacgctcgcggtcgggctgcagctccagcagctggagggcgaagtgaaggagacaccgttccgcccgccgcaaccctgtcctctcccagacaggaccccgccgctgcccccggggctgtccgccgcgcctgtccctgcagcgcagcccgctgccaactccaacctgctccagagcggccacgtggaccgacagcgccccggtcctgcaggtgggctgcctccgtccgtcggtggggatccggaaggcagaagctgctgggccttggatcaggcagctatccgggcagcctcagaggcgagggggcggggaacggcggaggcagcgcgctggggaccgcctgggagggggatggggcggaggccccgcgcgaacgcgtcacggacggggcggggcgtcggcgcgtggccggggcgatagggcgcggctgcgcaccagggtcacgtagatctctcctactccccttacgcgctggtgcgggttcccccccgaaacaaagccctgcatagggtgcctgcggggagtcagctgagcgttacccacgtccatcctaagctagcgcagcctgcgcttctgagggaccgcttctctttcccagcccagggagaacgagtgggacacaggggcgccacctccagcccctcgcgctcttctgccctcttttcccaccttggtgtgactgccttgctgtgctgggttgtgtgcctgagaggctttttgggactgcctctccctgaacaaatgtgagcgggtcctagcgtgccccacccatttccacgccgccttacgctttctcttccgcggctcctccccactcaggcatggcactgcttcacacacgcacggagccggagcttggcgaggcaagcctgctccgggcccaacctcctctggattatgggcctggagaaaatgtggaatcatgctgagcaggcgttagaatgccgcacccgagttccccgggtgtgcaggaagggtgacagagctattagataaaatgtatatgggagaccgttagtttagactgacctcctgcattaggcccatcagaccaaaccaaaatggggttactcatgctgaagtttcacactaccacgccaaagctaggatctttatctgaccttccaagaaatcaggagagaaacagatgctagccagatccccaaacaggctgggcgcggtggctcacacctgtaataccagcacttttggatgccgaggtgggcggatcgcctgagctcaggagttccggaccagcctaggcatagtaataccctgcctctaccaaaaaaaaaaaaaaaaaaaaaaaaaatagccgggcgtggtggctggcgcctgtagtcccagctaattgggaggctgaggagggaggatcgcttgagcctgggaggttgaggctgtagtaagcttagatggtgccactactgcactccagcctgcccgctggagtaagaccctgtctcaaaacaaaaatccccaaacaggtcagttttagctggcatgaagaagtcccgtgttctttaacctttacaagaaaagtaactttctaccaactaatccactttttgtttctgctttcctcggtccttttctgtctgtaataccaacttcctcttctcattggaacattcattccattttacagaatgaagcgttgcccaattgtagaattggaactaaaagccagttaagatgtttaaactaaattctttgtaattttttcttttaacagagccaaaggaaaaagaaaaaatgagcagtctaatgaaatagaaatgggttcaactggaactcccaaagcagtcatctatccaataatgtcgccggtagacctcagtggtttttttgggttttcttcttttttttttgagacggagtctcgctctgtcgcccagactggagtgcagtggcgcgatctcggctcactgcaatctccaccttccgggttcacgccattctcctgcctcagcctcccgagtagctgagaccacaggtgcctgccaccacgcccggctaattttttgtatttttagtagagtcggggtttcaccatgttagccaggatggtctcgatctcctgacctcgtgatctgccagtctcggcctcccaaagtgctgggattacaggtgtgagccaccgcgctcggcctacctcatttttttaatctataaaatgacaaatgaaacgaagtgatctttaatagccatcagccatagtctctgagcaaagccttttcccccttgactttctctggctctgaaagccatgtctgctcaaatgctctcaacgttctaccctcctcctaaaccagaaaaggataggcttccacagttcaaaac

SEQ ID NO: 914179 - DNA, 4001 bp, Homo sapiens
ctgctgatattaaaattcaagcaatcccatttgttggaatgttttttatgcggtcaggagctacaatagaactataacgacccataaaggagataccaccaacgaattatttctaaaacagataaccatgattatacaaacttggggaattcgtttcaaaacggaaaaacagtctattacctacagcctcacttcctaggactggacaagtacaaagaatcaaacaagtatttgtgtgtatggatatttatgtatctgccaaaattcactgagatgagctgatttaactaaattagataaaaccgaaacctaagactaggccctttaccctgatacgtcctttaatatcttcgctgaggggaaaaccaacaccctggagtgggaagagaatttaatactgggaatttaaatattgaaacttggaaaaaatactgccatgtgtgtttcactcaaatgtctacatcaactaaatatcaaatagcgcttcaaacttactaatgtgactctcaagtcctcggccaatgctgtgctgcttaagggcaggcaatctgagctcattacaccagctcattcattccacaaagcacgtccacgcccttaggagcacaagtaatgaccttgcgctctcacaagagggactgctacttcctctagaaaagtgattgatccgatcctccaaaggcagaatccccaattaacaactttttacttctatacgtcaaagacatgtacaaaggctgaaaagtccatgcggccacagaccaactccccgggccttgttccccatttgaaatccagcagcccagcccctcctccgcagaggaggtggtcagacggtggggcgaccaccaaaagcagccgaatttccaagttcttggaaagatagggggaaacaaactgggtttctggtcgacaggcttcgactctccgccgccccatcccgcagagatcccagctttacttacgacgcgcgcaagtctgtccgtgggtcgccatggcgaggccgcgggaagaggggaatctgcgggagggacaagaagtgcggtaagctggggtcaaagggccaaagggagatcccgggcagagaggggcgaggggccgcggggcagcgcggccatcttaggaagccagggccgactccgagtccggcgcgggcctccggcttggccgccgcggcctaggcccctgggtcggcgtgaggcgggcgcggcggtacctggtggtgtcctgaggggggccgccgccaccgctccgctagctgctgaagccgcttggcacgctcgcggtcgggctgcagctccagcagctggagggcgaagtgaaggagacaccgttccgcccgccgcaaccctgtcctctcccagacaggaccccgccgctgcccccggggctgtccgccgcgcctgtccctgcagcgcagcccgctgccaactccaacctgctccagagcggccacgtggaccgacagcgccccggtcctgcaggtgggctgcctccgtccgtcggtggggatccggaaggcagaagctgctgggccttggatcaggcagctatccgggcagcctcagaggcgagggggcggggaacggcggaggcagcgcgctggggaccgcctgggagggggatggggcggaggccccgcgcgaacgcgtcacggacggggcggggcgtcggcgcgtggccggggcgatagggcgcggctgcgcaccagggtcacgtagatctctcctactccccttacgcgctggtgcgggttcccccccgaaacaaagccctgcatagggtgcctgcggggagtcagctgagcgttacccacgtccatcctaagctagcgcagcctgcgcttctgagggaccgcttctctttcccagcccagggagaacgagtgggacacaggggcgccacctccagcccctcgcgctcttctgccctcttttcccaccttggtgtgactgccttgctgtgctgggttgtgtgcctgagaggctttttgggactgcctctccctgaacaaatgtgagcgggtcctagcgtgccccacccatttccacgccgccttacgctttctcttccgcggctcctccccactcaggcatggcactgcttcacacacgcacggagccggagcttggcgaggcaagcctgctccgggcccaacctcctctggattatgggcctggagaaaatgtggaatcatgctgagcaggcgttagaatgccgcacccgagttccccgggtgtgcaggaagggtgacagagctattagataaaatgtatatgggagaccgttagtttagactgacctcctgcattaggcccatcagaccaaaccaaaatggggttactcatgctgaagtttcacactaccacgccaaagctaggatctttatctgaccttccaagaaatcaggagagaaacagatgctagccagatccccaaacaggctgggcgcggtggctcacacctgtaataccagcacttttggatgccgaggtgggcggatcgcctgagctcaggagttccggaccagcctaggcatagtaataccctgcctctaccaaaaaaaaaaaaaaaaaaaaaaaaaatagccgggcgtggtggctggcgcctgtagtcccagctaattgggaggctgaggagggaggatcgcttgagcctgggaggttgaggctgtagtaagcttagatggtgccactactgcactccagcctgcccgctggagtaagaccctgtctcaaaacaaaaatccccaaacaggtcagttttagctggcatgaagaagtcccgtgttctttaacctttacaagaaaagtaactttctaccaactaatccactttttgtttctgctttcctcggtccttttctgtctgtaataccaacttcctcttctcattggaacattcattccattttacagaatgaagcgttgcccaattgtagaattggaactaaaagccagttaagatgtttaaactaaattctttgtaattttttcttttaacagagccaaaggaaaaagaaaaaatgagcagtctaatgaaatagaaatgggttcaactggaactcccaaagcagtcatctatccaataatgtcgccggtagacctcagtggtttttttgggttttcttcttttttttttgagacggagtctcgctctgtcgcccagactggagtgcagtggcgcgatctcggctcactgcaatctccaccttccgggttcacgccattctcctgcctcagcctcccgagtagctgagaccacaggtgcctgccaccacgcccggctaattttttgtatttttagtagagtcggggtttcaccatgttagccaggatggtctcgatctcctgacctcgtgatctgccagtctcggcctcccaaagtgctgggattacaggtgtgagccaccgcgctcggcctacctcatttttttaatctataaaatgacaaatgaaacgaagtgatctttaatagccatcagccatagtctctgagcaaagccttttcccccttgactttctctggctctgaaagccatgtctgctcaaatgctctcaacgttctaccctcctcctaaaccagaaaaggataggcttccacagttcaaaacccagatgaaagctgcagcctggaagatttccctcccatgagcaagcccagccagctgtcttgcctggtcatgactgggcttactcatgttgcaaaaggttagcagaatttacttctaagacatcaggcaccagaagccctcattcattccttcattcgagctcagacaggtcggtttgcagtcatcctggctcttctgggaaatagtctggtatgtttgatgttattgtgaggctaacaacaaagaccggcatttccatcccaactgcaccacagcaccctacctccccgaaacacccagtctgataaatgagtcacctccactacctgcagcagggcttattcacaatgtgaattttctgtagcaatttgtagccccctgcacttca

SEQ ID NO: 914180 - DNA, 4001 bp, Homo sapiens
ggtgagactaggccaccagcccacccttgcccacccctgcccaccccagcctgcccggcccacctcacctggacctctgagagctgcatctccctggccagcctcttccgctccagagggctcaggtactggtggtgctggaagacgccctccaaggtgcggacctgctccatggtgaaggctgtgcggacacggggggcccgcaaggtatttggctccttactcaaccctgacatagagggtaagggcatttggctcaacatgccaccccatggggcaagctcgtgcccacgggtaacaggtgaagacagccatgctgggggctgggcagggcagatcttctcacctgacagtgaccagcagcacccccgccgcctcccaggtcacatgcggaaagggggctcagagagggggctcaagaggggagggaatgttaacagcagcttgggcctgccctccgctcagtccactcagttccgccccatcccacacttcccttccagaagccggttcccaggatgcccttcccacagccttccaggccggtaaggtaagaatccattatatgcaaaggcctggcgacccacccaggggcacccatccctgtcccgggctccgtctcctcagccagcggaggccaactcagttaatccccaggcccactgtggtcaagtctgtttcctaatttctaagttaaggaatgggggctggcaccaaacggccccacgaggtggtctgtggagctgggtctgggtcccaggaaaggccaacgtggccaatcgagctcgacattaaatgcaagtctgaccaaaatgctcgctggagtttctgcggaaggaagcgtattttacaaaatctgtcttaacgttagcctgaaagcacatggtagacccaaaaagcaaatgccttctggcagggagggctgtaggactggcatcagaaagggggttgcgggacagggatggctggcttttttggggtggggcaggatagctagctggggagaatacatttaaattttcatttcccttaagtacaaagtcactccataaggatcagtcaaatttttaaaaatgaaaacttgtagatgatgtcaaccccacttttgaccaagtactaccttaaacctaaaagtggtgatgatgtcacaaagactaaaacacaaacgcagagaacctttgttctcagcagacaacagagcatctgggcggccacagagggaacttcagagtttctgcaggcatcggggtcaccgccacccctgcagcgaacctgcaggctctttaaagacagctgtgctccaggtgacccggaatgggcttgagcctagacgctgagcaggcaccggctgtgctggggggcgggggcggggggcttggcaaatcatcgagactttcagtgagcgcccggaatcagggcagggaggtgcggacggggaccccttggacggtccctcggcaccaggccggggtgggggacgaagacacagctgaggaacggggtgacaaaaggaggcagaggagcccaccgggggctcaaggagaggaaatccccgtcaaggctttggttccgagggaagctgcgctccagtgagggcgccggcaaggcctccgccggccctcatggaaacgcccccggccctgacctagtgggcagggcaccgcggggagtgcagccgccgggctcctggcctctcccccactcccatctccacctgggaaggaagggaccccccccacccggacctaccggccatggtcctctccggcgcaggcagatttgaggacccggcggcctccttgatgctgacggcctgagggggctcccgggcgccggatgtctggcctgggccagggaggctccccagggagaagtcggcaggcctgggggtgtgggtcggccctgagcagctgctctgggagagccagtccacggagccaaagctggagagctgctgcgggccacgaggtggggaggaggagaggcgcatggcggccaggtgggccggagggaaggccaggcggggctggccaggcgcaggatccacctcgggcctcgccaggcggcggcgtttataagcccaggaggagggggcgggagcccggtttgcatacacggctaatgcccagataagcagcgcctaattgccttcgattcagaggcacaaaggaggccgttcacacctccccggctcctcgatgtctgggggaggggcggggctgcgggccctggttaatggagaggcgatggttcgggatcggtcacctcctttcatctctcccaaccccccaccccgcgggccgaggctgcaggaaggtaggagggtcccactcccacttgggcctgtcctgggaggtgccgggcgacctctcctctccagggggacgctggcgcctgtgcccagcccggacacccgagggcgagcaggcttcaggctgggagagtcagggcggacttaggttgggagcaggcttcggggtgggagagtcaggccggtgcccgcgtgcgctgcgtccaggctgtgcggccgcgcaggaaccgagggaggctttcccgggaaagagacgcggaggacccggggagcggcgcgcgggggcgggaatgtcgggaggggcctctcgggggactcggccgcctccagccctaatccggctcctctgggggactcactccggggccatcgcaggagcctctgcattcgggcgcgggcggctccctgactccatcccgagctggaagggccggagccactgcctcgcacggcggggtaggaactccgcgtcggcggcgggactggtgcgtccccgccaagccaggctgtccccactgtggccagggcgcgggcagagccgccggtgactgtggcgcccaaacctcacggggacgccctgagcacgggcccccgggacggtcatagccacgcgcggccgctgctcccacgaacctgagtcccgagctgtctgcgtctccgcgtccccgggtcgcctgcgcgtcggcgtggggcgcggggaccgacgtgaccgggtgggaggcagccatgccgagggtaggacggtgtcttccgcgcactggcttggggtccgcacggcgtctccggcggccggagttaggcggaggcgcaggtccggcccccgaagccatgcggggtttcggcgcagacgcggggtccacggagcagccccgactcccggccaggtcctgaccgcggctgcctcagcgcccacgccgcccgcggaaatcagaaagaccggcgggcctcgccccacggttacgcccgccccagccagccgagcctcccgggctgagcaaagaggttggagcccgggaggcgggcgctggggcgggacctcagccgggaaccgatcggcggcctacctggggtcacaggagaggggtcgcggaacggaccgtgccgccgctgaccctggtcttcctcggaccctgccggcccagttaggtcactgggccctcaagggggaggctggcgggggtggggcgctgggggctttggacgtggcctcgggggtaaagccaggaggggtggggggccaggaagccggcctagacccccgctgcacttcatctccggagagaccgggtcacccccggtagaggggctttgagccactgcacaggaccggcagtgtgtcccggccaggggcagcgagggcccagatgcctgtggccacagggctggccccgaggatgccccatggggcaggtccccagcactcccgcagtgggggcggtgcctcaaagtggagcaagacagcacacctcacacatcccgcaaaaacatacagaacgttcgacaggcagggaaaaggcccagaagcttcccttacataaagaggaacaccacgagcatgcatttccgaaacgccagcacccagccttccatttctccatttctaatttccggggcccagggccccggtgtctcagcccccttctgtacgtggttcagcacccccacccccagctctacatagagcccctcc

SEQ ID NO: 914181 - DNA, 4001 bp, Homo sapiens
acacaaagtggtagttttaagaaatctgtaacttgaaacggagcgtccttgggcaatgtgtggggacagaggaggaaatgcgaactgcaaggtctgggttctgggcggggctgcgccaccacagccacagccccgctctccgctgtctccctggcaggcctccccccggccacatccccaagggcgtggcagctctcgcgggggccgggggggcgttcccctctccctccagccccctcccgaggcccagctacttgcatgggcgcagccttacttctcccggaggcgcatgatgtcctcggccaggttgtcgcgctccacctcgacgcgggctttgtcgttggttagctggtccacctgccggcgcagctcccgcatctcctcctcgtagaggtcccccaggcgcgacttgccttggcccttgagctgctcgagctcggccagcaggatcttattctgctgctccaggaagcgcaccttgtcgatgtagttggcgaagcggtcattcagctcctgcagctccaccttctcgttggtgcgggtgttcttgaactcggtgttgatggcgtcggccagcgagaagtccaccgagtcctgcaggagccgcaccccgggcacgctgctccgcaggcgcacggcagaggagcgcgtggcatacacgccgcccggggacgaggcgtagaggctgcggctggtgctggggcgcagcgcgctgcccaggctgtaggtgcgggtggacgtagtcacgtagctccggctggagctcggccggctcgcggtgcccgggccgccgaacatcctgcggtaggaggacgaggacacggacctggtggacatggctgcggagggtggcgatggcctgggcggcggcggtggcgcggactggctcccggagaagaggcgaacgagggcgcggtgggtgtgggtggtgggagcgcggctgcgtctctggcgcggggacctcggagcgagagtggcagaggactggaccccgccgagggcgctgtttttataaccccgttaggaaagagggtcccctcccactgccatcccagccgcggagcgcgccagccaatagggacctagcgagaagcggggagggtgggcgggtggggtgggggcgccctcgagccttcctgctccggggcctgggactgggcatggtcccgttacttcagcgctgggctgggacttttgggggctttccggatgatagtctgagctgggctcaccctggggtgctgaaaaaggcggggtcgcgcggtgaggggggggtccgcctgggactgaaccagaggggtccggtggcaccacgccaaaggggcgtgggaggaggtgcgcggcggtctcggggctgcggtcaggcggggagacccgcgggcaaaggagcgggaagaggaaagagtaaggaatccctcagatctgaagtcgcggagaaagaaacaaagagcgcctgagattggaacgcggggtgggggcgcgcacagcgcaggaacgcagggctcaggcctcgccgcagcctcgcgcgccgcccgcttggaaaggggggctgctccggcccgcgcctctgtccatcgacttgccttggcggagagatgttggggggaggggaggttctgtcgagggacctaacgggctcagtccagcttcggacggcgggagttgcgagacggcggtggcagaggaaagcccgagggagaggggtggggtcgcttagtcaccggcggtgactcaccgcgccctgctgtcccgccgattgagggctcctagcggtttaggggaaaccgttagaccagattgattcaagtctcagcgggctccgcgcgcgctgctagttctcagtgctaccaacttacagctgggccatcgccttgctgtgtgcggtcgggccctgtgggggacaagagcgcccctaagtttttaataactcgctaaagcctgtctttgctcgaatgtgcggactttttgttagcaagaaacttctgcagcctttggagaggcgccatacgtgggcctcccagatcacgattgcaccgggaaggtttttcttgcagagtccccgcccccgtccctctggtctcctctcgctcttccccctccccccatgaaaccacacccaactttttaaacaagatctgaaaattctgggtgaaagaggaaactcgacgtccgtagtttcaaaatagaactcagtgatcagtggtttttaccctggtggaagtcattaaaggtataatatgagccagttaaagaattaattaggtgttgcttaaaaaccccaatttgattaatgagttcaaatgaaaggcaattatgtaacacaaatgacagaatctttggcggcaatagatttatgtgttaattttaggacagcaatgcacagtacagggttcacggtgatttgtctgggaaatgccataggtcctgttttccaaaagaattcgtgcaattgaccttggggtgagggggataaaactgtctacgcagcaaaaaacttcgtgtccaagacatggagggagtgttcagattcggtcaccttaacctttctagggaaatcactcaattcaagggctgttgtttcaatattagtaacgagcagagctgagtacttacccgccaagggagataaaaggagactatgtaaatcagtcttctcgtgatttagtagcaattgaaaaggcacaggtttttttgagtatttagatttatggtgtactgaaaggattaactgcagaaccactgtaaaattgattctgcagtggataggagaaaaaaaagtatttctctctttttttttggtggcggcagggggtactgcaggttacttggtatttaagaaacataatttagaggtaaatgaagagcgtattctgacttctttggacaagcctcttttaggcaatattttgtttaccttatcccagttcgttcttgcaaatggtgcttgccaaggtggaattacaggactctctactgcccagctcgcctgctggggctttcttttattctctctttcactgggaggctgcaggtcattccccaagagcattcctggggctgggtgccctggaggacaagcctatgctctgagttacatcttgctttctgagagccctttattcaagccactgctcagcaaatgccaccattgtgagtgtgcctggaacccttagaatgagaaaagtgatctccctatgggaggaagagagtgtggaactcacttctacgtgcagtgccgatcccagggcaatgcgacgcttgctgactgactcactatggaaaaggaggacaaggcattggcgaggtgtggcactgtgccctgctggtgcccatagccgattcctcagggctgcggtgatgtctcctggaatgggcactggtcctcttcatcatctcagggataggtagctcctccttccaacctgtccccattctgaagtctctgggctgtgataggctgctctcttgtcacagacatatgtttgtttgatgcatatagaatgtataaaagtgtaggtgttctgtagtcccagcactttgggaggccaaagcaggaggattgcttgagatcaggagtttgagaccagcttaggcaacatatatatatgaaaccaaaaaaagccaggcgtgatggtgcacacctgtggtcccagctacttgggagactaaggcagggggattgcttgagcctgggaaattgaggctgcagtaggctgtgcacaccactgcactccaccctgtgcaacagagtgagaacctgtctcaaaataaagtatatgtatgtactacacacacatatacatacgcacatatacagcgttcaatgtgtttttcctattagaaaatgccattgtttttggtgggctgcaagagaagtgaaagttgcagaaacactttcattcattcatgtagaattcatgagacttaagaattcatttcattctgagataagatatacagtgcctcaatcaatgggtgatagttttcagtcagggagatca

SEQ ID NO: 914182 - DNA, 4001 bp, Homo sapiens
tcacttcttttggtaaagatatcttcaagggcgcatttggaatattgcgattttcaggattaactattaatatgcaagttaaaactcttgagcttttaaataactggactgcaatatatatgactataaaaacatgctagcaattgtttttatagttttctaatcttggcctaaacctcctatcactgactttaggttaatttaggatttttcatataatttctgaacccaatattgagcattaccaattagcaaaaatacatggtagatacataaaaaggcaactttttagtccccactgaaggaatttcactaagtccagtggatgtaaagaaatgcaactcattgcatttctgaggtggaaggctgactctcaaaattcattcacttagcccatacacaagcaatgaaacagcaaattttcatacatatattacatctgtgaccatttcagtgttttaaagttttacaatttagtttctgtttgggtaacttgaaaatataaactgctcttgaacataattcaaaaaagcgtattaaaagtaataattacaaatgtaagcaaaaaataggaggaccttttaagttttcttttcaaatgatattcaattaaagaagcctgccctaacactgactaggcaaggtcccccaatacttccttcttagtatctgtcacaattctaatttccacgttaaacaaataatttacacaaataaatgtttatctctccctacattgtaagctacgagagcaggtaggcgctgtttccattttactggggtcccctaggcacacctgagcaattatttgttgaatgaaagaaaaaaagctctaagaatgaacatgaatgtctggattttgttttgttttgttttgaaagcaacatcattactgaaattaaaagttatttattcaaagtagctttttaaaaatatacctggctcggccttttaagccaaaagtctcaagcagtctattgaatcagtgagctttgggaagagcaggtagtattaggagagcatacagtaggcgctaaatgaagagaactgacgactactaccagaaaatgggtaaaatgagatctaacctagagactgccgacacccagctaaataccacaatgcccaggctagtgcttccgcggactgtggtgagagcactgattcccctccctcctctgcctcataggccgtttcaacaacccagagcgttaagttcagcgaaatagcttgcggacggaaatgagagccaatgcttaaaacggcgggcaccaaacgggtgtctctggagttaaagatatcccccattccaacgtccttttatttttctctcccattttacaagtgtcaacagaaagcctgaactggggtcatgaaatcaaagaatgtcaccatagtcaggttttaaaatatcagagtttatcaagttcgtgacacactgagtgcccaagtcccccgaagagtccggaggtggggggctcccgggtcgccccacctggatggaagagaggctgcccgggaggagaacagggactggctacctaggaaggggaggcggcgaccagcccccgcagaggcggggtccgagtccccagccagagccccaacaagcagtcgaagaacgcgggcagaggctccgacatggccaggagagcacgccgccgcccgtaggtgctcgggcctcgccgagaccgggaagaggtggcgccgccagcttttcccagacccaggggtggcccgacaggcctaaccccgctccccgccctgctcccccgtcccctcctccggcgacgcccggcccgcggttggccggcccgccgcgcgctccgggacgagggcgggaggcgagcgcgctggccgccgcgcactcaccattgtcaacgccgccgccgcgtcccccctactccactcctcttccctcaggagaactcccagccccggctccctccgctccggcgctccgtcacgtgacctcgggccgcccctcacacgtgaccgctcccttcctctcccccacccccgcacccgtccctctcccagcctcctgccccgccctgctggccgccaggcactccggggagaggccgcttggaggcggggcctcaggctccacccttcggagggtggagaggggcgggcaaattacgtcgagtgggcggggcctgaacagaggcgggttcgcgggctcctcctcgccgtctcttcggtcaccggacgagcggttccgtgtccggcctctttaccgcacccagttcctctttgtgaaagtttgagcggctgggaaggaaggaggagaggaaggattcatctggaggctctctccttggctgggtccttgggttgccgaggcgagtgggagccctacttccttaggcctcgcaagaagagatgtgctctcttcgtccacggcgaggcgttctgccaccttgcctgaacgcagtcccgctccacctccttctgagtctgggttttcttaacttggctttctcgcctctgaagagaagaccagtagaaaaaaatcctagggtacaactttcattgcttcccaaagtccccagatggcccctgagcgacccaccctgagcctggagggctcacaaacccaccgttccgcccagccgttctgagagggcaaaggcgctcccccgaaagtcccacggcgcagctgaagactacgctggcctgaactggatcctcctccctagtgtaagcctataggacctccagatgaggaaaatactgtgtgggatttcagagtatagtgttgaagggccacagtgcactctatgcataaccaaagcagaagaaaaatccatccctgaacgcactataattaccccaccttaaaacagaagtttgtgaggcgagtccatgaaacaggtatcaaaaaaaatttttttatacttaatcctcagtgtgagcctcaaatttaagaggattgaaatcagagtatcatctctaaccgcaatagaattaaaattagaaatcaacccaaacaagccagaaaattccggaaatattggaaattaagcaacataattccaaatctctaggtcaaagaagagatcaatggaaatttaaaaataagttgaggccgggcacggaggctcacacttgtaatcccaacactttgggaggccaaggcaggtggatcacctgaggtcagacacgagtatctcttgaatccgggaagcggaggttgcagtgcccgagatggagccactgcactccagcctgggcgacagagcaagactctgtctcaaaaataaaaaataataaaaataaaataatttgaaataaaagataataatacaacatatcaaatttgtggaatgcagtgacactgtgtaaaaggaaaatttgtagctttaaatgcacatatttgggccaggcatggtggctcacagtctataattccagcactttgagaggccgaggcggacggatcacttgaggtcagaagtttgagaccagcctggccaacatggcgaaaccccgtctctactaaaaatacaaaaatcagcggggcatggtggtgcacgtctgtaatcctagctactcggtaggctgaggcaggaggatcacttaaacctaggaggcagagattgcagtgagccaagattgcgccactgcactccagcctggtgacagagcgagactccatctcaaaaaaaataaataactatagtaacactgatattgttgtctgtttgaactgtgaaaagaaagcagcaaaaacaatgcaaatctttaattaataaaagtgaaaaatggtttttttcacttagaagatttgcctgtcaccttgagagctactctggttcctacccactcttttctgggacttaaatatcaacataacaaagagaatagatgaaaatgccacacaggcaaagaaatactagcgaagccaggtataaataagaggtggcaaagaaagtcacactagaaaccaatttgtactaattatttattctactgatcaaaacccaatcaataat

SEQ ID NO: 914183 - DNA, 4001 bp, Homo sapiens
caagctcacatagtaagtggcagagctggaattcgaacctaggccatcttgcttcaaagacagctcagccacctctcaagcctacagatttgctatcgtaaatatattgtctgtcagttttctttcctgtaaaatgagacatgggaccaggtgaccactagggtcctggtcagtcccaaaatggagaggcagaaaagtacagcagttaagaagctgtacttatgtataaaatgggtctgccagcccctcccagcaggatcgtggtgaggagtcatgaatgaggcacttagaaaagtgggtggcacacagtgagtgtcccacaagcaggagctcttatcatcctccagggctgaccatgggcacagccagggcagactctaaaggctcctgaattccagctctcaaggctcccgagggctctggaaatgtgagaatgcccttgatccccagcaaaagacaatctctgggacacccactctgacagctcctgcaattagaaggtggtcatggagcctgggagaggaaggaccactggctgctggctactccacagagaccacgagaactggccctgcccaccagtccaaggcaaacttctcatcatttttccagccgagacagtgacaactgggaaaaggtacatttcccgcagcaaggatttcaggttcactgggaacctggctgcactcatagctgggggacagtagatggatttcttcccactgttatccaagtgcctcctcctcagactgggatctatggattaatgctggctcaaatgccagctctacacttggtagccagatcactcttggaaaatgacttctgagcatcagtttcctaattttcaaaacaatggcaacacagtttagtggttattgacagagcccagagccaggctaactgggttcaaatcccagctccaccacttacaagcctactgaattaaggcaagtccgttcatgggcctgagcctcagtttcctcatctataaaatagggataataatagcacctccttcagaggttattggtgagattaaccaagttcatgttttttttttttaatacttggatatataaacgtgttgtagtcattattacttggaagtgttgtaattaaatgagataggcccagataggcacccagggaaagtgaccatcgatacctgtattattactattattccagccagtacggcccctgctgccctgaggcagccagacagagttctggggaataaagagggaaaattcttaagacacttacaagtgggagcagtaaaacccgaatgaaagccattagtgtggaccaagaagttgtcctcaaagcagggtgctggtggagaggcgtcgctgcatccagccgtggatgcccctctcaccaggcctggtcacctcaaaaggcccacgatcaagtccccgttccccacctcctggccaaggcagatccagccgctcctgacttgtcttcggagtaactctccgaagagagtgaaagggaagttgctgctccgaggaatctgccaagagctgtgtgtcctgactgccgtggaaaaaaggaaagcgaaccaccaacttgggctgcgctcctgctgcatctcccctcggggcctgccgctgggaagatctcggctgctgcgagagtacccagccccaggcgaggtcgggacggggaccgcgctcacgggaggcgtcctctgaaccttggggaggcgccgctgcgcccgccagaccctcggcgagcccaccggagcgcgctggcgacagtgacagcgccgccccccgcccgcgcccggaggtggcagggcctccccaccaggcccggagccccggcctccccggcgcggccgcccggcccccacccttcccgctcccgcctggccccgccgcgcttacccggagccggagcccgcgccagcagcgcggccgccgccagtgccagcagccgcatctccccgccgccgcccggcgctgtgacgcgggagagcgccgccgcctggcccggccgccgccagcccgccccgggcccgcgctcgcgcccgcccccggcccgccccttgggccgcctgccacgcggggccggggctgctgggtcccgaggcccgcaccgggcgcgggagccgccgcgcgatcggttcgctccaggatctgtggcgtctcctttcaacagccccatttcccagatgagaaaactgagtttctgcaaggtgatcgctggtgactcacagaacacacagctgcagtgcgaccggcggtcctctgcccacagatgcacttattcctaagggaaggcgggatctgggagccagggggtgggggcgcgtccagggaacctctggcctgagactcacctgctggtcgtgggcctcctgcgctcactccacaggaccctcgggagccaacaagcagctgaggggggagaagccccttctgctgccctgaaatggagggcggggtccgaggtgctaacccttggaaaactgagagggtccacacagaccagcccagaatatgtggaaactattaacaaaagtgcccatttacagtgcctcagccaggcctgggctaaagtgattttccagatgctactgaaccccgccgcggtcaggcctgggacagttctgtaatctccatgtgcctcagtttcctgcacctgtaaaatggggaaatgggcccaccccttctggggtgtttaggaagaccaagttacaccattcccattaacgcattgccccagcacccgattcacgggtgtcagtgaacactactattattactatacataaggaagcagaagcagccacatgaaagagacccatgtcacacaaccacagagccctgtcactctgagccaatgcctggtctctttgccactgttctaaacttagggtctgagcctaacccatctccaagcaagaaaagcacatgttaggtctattctgtgtgtgtctatcaggagaggtctttgtggagttccagtgaggggtagcagcagctagcaggtgggccctggttgggagtgggtccctgtaggaggaggaggagacagggccctcatctccttccctctaagggagtgaggaggtgtgggtggcatggaaagagggtgcagcccactagtgtgagccccagggcattccccagagggaccatcctcttcaggcaccccaggccagtgggtgcaaaggctctgtgacatctctgaaccccaggcacttccagaggtctctggaccccatgggatcctccagctaggagactcatctgtggaccagggccctgcagggactggactgaccatcaaggcagccaggctggagaaagcagccccatctataatttgggttggtggaagggcctgaggacccgatagtgagttggcaacaaaggtacttggctatgatgccaaggacaagaagtgaggactagaactggggtcagatggactcctgcagcccaggaatgcaaactagaaccaagtgaggcttccagaccagagtttggaaaccaattttatacatgagcaaacgagcctcacgtcccatccacataatgtcctaggcctcattttacaaattagtaaattcaggctcaaagaagaccagggacccgtacaaggttctgtggggcaccaaatgtctgaactgggaacttggactctgactgcagactgttgactcagccctggagcctggggcagtgtttggcagactgagggaggatgtctgaagaggagcactggttctgaaagtggatctgtgacccgctctggctgggcaacaaccttgggtcctggagcagcacaacctctctgaatttcatttgtcaagtgaaggtgacacatgtaaaatggcgtcttgacatggctgtactaagagcagctagagatgtggcagggccatttggtatccttggtaacctcccacctcaacctgctggtctcaatttactctcccagttggtgaaaagcagaagggaccccttagatgtgtcagccac

SEQ ID NO: 914184 - DNA, 4001 bp, Homo sapiens
ccttacttggactcataaacctctttaagacatcatccatctcctccagaactaactggggacttcaggagatgagtggggtataagttcagagatcctggcttcaagcaaatatccctattaacagaaaataggtgaggggaagaaaaacaaagaaataagggaagaaaattacttataaacacataagttttgggggaagtagggaaagggaaagaggaatgacaacttaggtccgggagaaattattgctagtaccaggacaagtgggcaagtgaagtgcccaccaatccgcagattaatgagcacatccacctttctacactttatatcctggagctagggtagggacaagtctagcagccagatgatggttcaatttccctaacaaaactaaacaaaaatgtaaaacccttttctgtaactaactactctaatctgtagagaaagatagtccccgaatcaacattgtacaaaccatagttacaaaagatcatatttatattcacctgctcattcacttattttcctgagcccctaataagtaaacgccaaggaaatcagacacagctcccaccttcacatagttgacagtctagcatagaaaataagatgtgctaaaacacaaaaggaaacacaaaaacaaaaacatttccagatgggagatgtgaaatttttaagtgtgaaaaattatcttgtaccaagttttacatgaaactgggttatacaataaatccccaagaaggatgagaaacaagaaatgggggtggggggtatgaaaaatactaatgctaatacagcaactaacaacaccaaaagtgactttaaatatgttatataaatttaatctacctaacaaccccatgagagaagtacaattttcccccatttactaagaaggaaagttgaaagagactaagaagtctgtttaagaggcacaacttttattttatttatttatttgagacggagtttcactcttgttgcctaggctggagtgcaatggcgagatcttggctcactgcaacctccgcctcccgggttaagaggcacaacttctaagtgacagaggtaggatttgaatctaggcaccctgattcttacctctattttgccgcatataattataacaatattattactaacacaacaacgccgctgtagattgtagatccataggctacatactttcattcattttctttgaatactcacatgtctataatttacaaatgaaaacattaagactcttaagacgttaagaaacgtttccaggttatgcaagttacaagaaggtagagccgggattcgaactcagatggctcagattccgaaggctcttttcacggcaccccacacccgaacttgactccttaccctcaaccaagccaagccgtatccctcctgggaacagccggcaccacccactccagcctcgcgcctcatagacacacttactcgggcggcgttccaccgcccgcaccctcccagctctccccagcaccctcgtccagccgggcaaggctctcaccaggcgggagtcgtgggaccctcgcaatcttgctggtgatctctgcagtgagcaccgcgaagtcctgctcgtaaccttcgaagtcggacgacatggcggctccggaacgagtagcccaggccaaagcctaggtcagggaaagggcctcgaggggcagcgaggggccccgcggcttaggaaccccggaaggtgcccccgagagcagaacggagaaccggggacagctctcaacccagccgcttcctggttgttcgtcgcaatctcggttctccggaaattgggttgcgtgcgtgctttattttccgctccgactttaagataagtaagttcgcaaaggaaaagcgccccaattagtgcctccccccagaaaagcgtatgaaaatatgcaagttctgagggatcattagaagcgttttttccccccttcgtgttctgggaatcggctccggatccacacgctacaaggcacagcagcttgcttccggagggaggtttgaggcggcgaacctccggaagtgacagtaacagagactgcgcagggggcctgagcgggagagtcctggcgagggcgctggccgagaggtgctcggcttgtagcaggtcccgcactccagcctctcgctgccagggtttgctctctgcttgtcctgggctgaggtgtccatgacggagtcatccaaggaggaaaaaatctgttccgggtgagcccaggccgccccggatatgcgatggctgaggagcagacaccagggaccacactgaggtgggagtcaaggcagggaatataagcacgattttggtggtctttgtcccaccagagtgggagcaggctctcctgaatgttgagaccaacctggcttaccaggatatttcttccttgggtgaggatttatttctaagccctctgctccatgactcgggcgggaaactgaggcacaagtcaacagcgtctgctgcgtggtagtctgtattatccatgtagctcagatcctcttccagatcttcagatccagtccaggcagagatgcccttccacaaatctctccggagctcgccgccctgccttccatttccctcgctcctggaggcacttcctcttctttcttccctcgaatcttctaattcaggttcttctcatatactcttctggtcataatttcacacacaccacacacactctcgctctatctcctcccttcctttccttgcatgctctctttgctttcactgtcgctcctttacttttgggccaaattgactgttctcttgatgtttgggtggcggggtggaggagactgcaggcaaatggcatagaccatgtctgactcatacttggcttaattcaagacttcataagaggcagcttagaatttcataaagggaggtcgttgacttgccttctattctggttcacctgttacttgtgaccttggtctaatcactcagcctctctaagacaatttctgttctatgaagaaggaaactgaattagatcaactctaaggtcctaaaattctttgtcttctcaaactattcactaagcgttggatggtgacagtcccctgacaagcggagaaggaataaaaaaaactattttggaatcgtgtatccagtttgcatgccattcaaacttgtaccatattttggataagtcaaaagtagttctttttgacatttgacaagatatgcatcccaaagtgtagtgcacttgtgagatgctgttgtgtaggtgtttattgtagttaacaagtatggtatgcaataaaggttttgttttgttttgttttaactgaactttcccattttgttttctttaggttgggtttcagaccaagacactggattctcctagttaagataaagagctttgggtgcctgacagtgaaaatggtgtaatctgcgttaacagttcacagcttgaaggcatgacaattaaagaacacacatggacttgtggcacatggaaatgtgcgcacagaaaaaggaaatctataattcttttaaagtaggaaggcattcttccttgccaaaatgggtacattctgttcggttatcaagtttgaaaatctacaagaattaaagagactgtgtcactggggtcccatcatagcccttggtgttatagcaatatgttctaccatggccatgattgactctgtgttgtggtattggcccttacatacaactggaggaagtgtgaatttcatcatgttgataaattggactgtcatgattctttataattacttcaatgccatgtttgtcggtccgggctttgtccctctggggtggaaaccggtaagaaagattctgtaagacaatgaactttaatgataatcgtatatttggtttttgccttatctactaaccaataataccaaacacagcctactgtttgtcctcacagagactaagtatattactctaatcactgatcatttaggctcggagactttatttcatatctgtt

SEQ ID NO: 914185 - DNA, 4001 bp, Homo sapiens
cccagggcaaactgtgaactttgggtcataatgatgtgccagtgtcggttcatcagttggaacaaatgtaccactgcagtgggggatgctgacaatgggggagtctgtgcataggcggggacaggaggtatatgggaaacctgtaccttctgctcaattttgctttgaacctaacactctaaaactgggtctcagtttcctcatctgtaaaaacatgggcttctgactatgattcggatatcccaggggcttgtgcctattgaagagaggggaaatactggctgtaatctctgtacggtagaccaaaaaccagatttaatgaaaatacactgatggttttcagccagagatgatgaggaaagcaatcctcttctccaacctgggatttgcctggggacctagtctgagaaattcttacactactaggagatggctctgggctggattttacaaaagaagagtaaggcctgaggagctctgaacccccatcagtcacaagagaggatggcttcagcctgctgaaagccagcagcatttacaaattcatgcctgtggcttttgccaactctagtggtacctttctgacctcttcacttctctgactcttcaataaatcgacatttcttaatatagtgtcaccttaacagcaaaagagaccttgaatttttgggactgaatttataaaacacttagaggttctggggttttacttaaagcagcttgtaatttgaaaaatgtacacgttctaattattccaatctccaagacatcaaacacatggcatgaggtccccattgctaagtcccctttcagcttcagctggagcccttgattccacaatcacaagcagcaaggtgccctcctcccttctcttctgtctggtgcccccagcaagttttcaaggttcaattctgagactctcccattcaccgtcccagcaggtggccaagggcccaaggcgggagggaaaggtcggcttagctagggaaagttttgttagccttattggaagggaaggagacatgcaggaagcagggctgagccaggtgggggaagtcaccagaacgacaaacccctggacttcccactgcccaagcgcgaggactctcggggcagccggcccctctcaggttctgcttgcagacacttcgctgggggcactcgttctgcctgggaaaactgccccaagtccccttaacacctgtgtatgtcctgtagtggggtgtggggtggaagcgagcatgtcaccaaagcctttattcaaagggcgagtccctttccgcggccgccagggaagggggccccgctactgtgccaggagggcagcttgggtttaatacatgccctcctccacccctgtacccggagcccctacccacttacctgctgaccgcacccctcccaaaaccccgccagctcgcccgggacggaccgcgagtggccacgagggaggcgcgcgccaggtgcgctcttcccccgacgccgccgtgccaggaaggccgcgctcaggtgcgcgcagacaatgcgaacaaagcccgcaccctcggcggggccgcgcagcccgggtgctctgggtaggggtggctgggcagagggggccccagtaccgggagcgtgaatcggtcatcggcagccggcactggcgggtacccgggcgccagagccaactcggggctgggactcaccggaaggagagcggcgaccagcgctcggtgcccgggcggctctactcacagacccgggcgcggctcgggccagggggcgctacgggatcacaggaggggcgcccggggcgcggctgccacgtgggacacctgtttgtctctcctgggagagggcggcacgacccgacccggctgaggtcggaggaactaccgccagggaggtgcatagagcccctcgcgttttttaaagcggcatcggcccaggtctgcaaataaaaaagtacttcacttctacgcgggtcacccagcctccgagcggtgcagccgcgaacactgtgccgtcagctgactcctccacgggctttatagctccttgaaaaaatgttgactttggcatcttttctatttgtcatggcaattgccttttaattacctgtccctcctattgttgcagttgggtaataagccgaccttttggccatcatccttgcttaagattggagggcgtttgatttttaaaaaatcaaatgccacaaagcacaatgctgagcatgatgctttatataaagtaagctctcaatgaacgttgactatgactgcacaatccataatttccatacttcatttaaaaactgccagagcatgcctgttcattgcaaaaaaaaaaaaaagaaaagaaataacagtaaaaaagttgataaatcaatcattttccaacacccagagataatcagttaacattgtggtgtatgttcttccaatgtcattctacctatgcaaaaatttatatatttttagttcattccatacaagctgtacattactcaggttttccatttcctttttttgaatgtccgttttaagccacttcataatgtcctaatgtacttaacctatctgctattgttgaatattaaactttccattttaataatacaattagatgtctttgtgcttttgtccaattaattccttagaataaactacgaaaaggtaaatttctaggatacaggttttatacaacttaagacttttgatgcctattatctaattgtcctcaaggaaggttgacctgcttcctcttttccatgctccttcccattattcttgtaaatgtcaatctgataggaaaataatttgctttacacctttcctgtctgtagttctcagttaatttccaaacctccgacactgacagcttccagtgaaagtggcccgtggtgactttaatgttgcaaacctcattgaaggaggctaggaaaggactcatttttcctgtaattcatttctcccagtaacatttactgagcacccaaaaataaaaacagggccacaccagagcagcagacataatgtaccaccacatcatccccacaggggacagcagttagtcttgaggtctaactgctggggagggatggtctctgcctctagatcagcattgccccagagaaatactgaccaagccacgtgtgtaattttaaatgttctagtggtcacatttaataaaaagtgaaaagaaacagcaagctggatttcagtattaacctaaacatccggaacattatctcaacatgtaatcaataaagatgttttatgctgtcttcaaagtcctgtttttttgttttttttttttttttttttgtttgagacagagtctcactctgttgcccaggctggagtgcaatggcatgatcttggctcactgcaacctctgcctcccaggttcaaatggttctcctgcctcagcctcccgagtagctgggatcacaggtgcacaccaccatgcccggctaatttttgtatttttagtaaagacagggttttgccatgttggccaggctggtctcaaactcctgacctcaggtaatccacccgcctcagcctcccaaaatgctgggatcataggcgtgagccaccacgcctggccaatcctgttgtattctatactcacaagcacatctcaatttggactcgccacatttttaagtgctgtatagtcaaatggggtgagtggcctgtgctgctccagagatgtccaacaagggcagaccccaggtcctcaagaaagtggaaattctacctttgacaaccctctccctgtaccccttatgctgtttaacaggtaccagcatactttgaccttatcaggcttaccttggagaagccaaatttcaatcctggttgttcctgaagtatttggcatgtctttaattgggggcgggggggggggaggtatttcacattttcattctgtgattatgaagaactgaaagcataaatacagtgaagatacctgttgcttcagacttcttcacatcaatgtataatcagtct

SEQ ID NO: 914186 - DNA, 4001 bp, Homo sapiens
aactttggtgtattatcattaaattttatgaacttacaaaattaaaatttccactttcaattctgctttactctttaaagtttctcagacaaaaaacctaatgcttaagcgttacaataagactcctgataacaaatcacactaaacacaaaaaaaacccactccattatcttataaaccaccttgcacactgattctgcaaaaaataaaaaaatttggctgagaatatttagaatcattttttgatagtcaaaagaaaactagaaattcagtactactataatcaatttctgctctacagctgatatacacaaacacatgtataaataagcacatgcatatttttgcaaacctaccaaaaaaaaaaaaaaaaacccacacaccagtttctccaattctttgattcaaataaagcatttcagacctaacttccttactctcccaggtgtgggaaacaattttaaggtataaaaatactaaccaaaataaactaatgtgagtactatttctaactaagcataatgcgctcaaaataatcgtttagctttattctaacacatatcttaagacaatcatgatgtactaatctgttgcaatgtgtaatcagctatgctttggaggacagattcagtaaagtttaatttttgacatatccaatgttttacatatcagaagacagtgttttcaaattcagctgtataacacaaccatcaggttagaaacctgctctctagtcctttaagatgtagaaagtgttttctgcagtcatctgatggttaacaatcattatgaggtttccctcctgaaaattggggccactttcatcataatccttagaacttcacacacaatgactgcagtaacaaaaaggaacccacctacctagaaccacctacatcagaatgattatccaagtacccaaagacctcaattcttacagaaacaaaagcacacatatcttttacttgtaaggcaattaagtataccaaaaatattaaaaggggaaagggtagtactttataaccgacttgaaagttgtaagtcatttagctatttacccaagttcttcacttaattttaatacctttacattaacttttcagttcccccaacacaataaataaataaataagcctcgtaagtcacctatcatctcatcccatcgattccttcactcgcaaataatcaaataatcgagtcaggtctttctggctgcaaatgattcttttttcctaaatcagcgaactccctccagtcacctgtcaaaataagtcactaaaccttgctggagagcgctaaaggaaccaaacctggaattttaaggggatccgcggtgctagtttcagatgtgttgcaccgaagggcctgtatcgacttctgaggcctgcgctcgagtagcagtccctcccttccccctccggccccttccaatccctccaccccggcctcggctggtacctggtaaggctgcgagtcccccctccggtcgtgacagctgaaaaacaggaagagaaggcagcgacataagacacggcgcgggtggggggccggggaggaagaaaacggggcccccgccgcccctccccgcgggagacctaccgagcgccccagcgccgagccccgcacgcacacggcacaaacccggagcctccggaagggccggagagggcgaaatgccgcgaagccgggcccccgctccccgccacactgcgttcccgcccgcccgcccgcgcggccgctcctcctccccaacccgatccggatcagggttaacaacaaaaatggcggcccggccagctccagataaggaggaacagcccccccgccgccgccccccgccgccgcccggcccgaaacgaaaagacaatttacccatcactgagtctctgctgtttcctcgcatacattaccatcaatgcccggcctgtgagtgtgtgtcggggaggggggagagcggccgcgaaaggcgggcgggcgcgcaggcggcggcggcggcgggcggcgggcagccccggcacctgggcccggcgcgccctcggcgactctcatcagctcccagttactggcgccggcgctcccgggccatctccctccgtcgacaccacgctcactctcagccggggcagcggcgccaactacacggcggcaccgcgaaccggggggaggggggcaagacgacgcgtccggctcagccccgcggagagcgactgcctcctccgccttctcctcctcctgctccgccgcctcctcccctcctccccccgccgccgccgctgctgccgccgcctggtccttcttctcctcctcctcctcccgccgccgccgccgccgctggtgccgccgctgccgctccaccaactacatccgggcaactcggacgctgccgccttcgggaaacctcggcagtttccgccgggcccctcctctcccaccctcggccttcctccccgcaccgcgcgggtccggaacaccgccctcggcaaacctcggctggctccggcctttctcctcctctgaggcctggatcttctcttcgcgaccagtctgccctttccttcttttcctcactcgcgagtcggccaccgccgttcccgtttagggatagtctcgctcgggcgcctgctcgaggctgatctcaggggctccgggctgcgcagggagggagccgccttccggaagaggacggtggggcgcgagggaagccatcgcggactaaataagggaggctgcagcggctgcgcgtgcgcccagaggcgcagcgggagggggtgctctcgggcgagctctccggccgcggcccccgcccctgcgctgtcgggcggggaggtcggaaaccccctggcgagaccacgggcggacgcttcccgaagagctgcctgggctgcagccgcggaagctgcgttctggggagcggggagcgtgctccggcgccttcgggccgctgctggaagccggaaccgagcccgggccgctgcccctcaccggacgccgcgcgccaccggccctccgcggggcaggggctgctgcgagctcgccgggcgccctttagacgtaagtctcaccctgcgccccgaggcaggaaggagcgcgtgcagtcccggccagaaacggctaataggaagggctgaggggttctgtgttcaaggcagaaggccgtgcgtcagggcggccctcagcggagatgcgtgcacggagcggggagcgccgctcggggcagggaatgaaagcggcgcttgagactggaaatttagggagatgagttccttgggaacaacgctgaaccatctcactgccccaccctaccccttgttatttttttttgagacaggtctcgcgctgtcgtccagtctgagtgcagtgacgcgatcacggctcactgcagcctcgacctccggggcttacgggtcatcccacctcagccctctaagtagctggcaccacgggcatgcaccaccacacccggctaattttttaaaaaaagtttttccggagatagggtctcgctgtgttacccaggctggtctcgaacccctggcctgaagcgatcctcccgcctcggcctcccaaagtgctgggattacaggcgtgagccactgcgctcggcttttcacccctttctaacgttttccatccctttctaacgttttccatacccagcggtgccctgcccaccctctctttatctctcacttttccctcctctgtttcttcctcgctgaagtccattggtgaaagaaaattcatgtgaaagttctcaggtgtgttaagtgaaattgctacaaatttgattttatgtactgctgcaggtacattgagagaagaaacgtgaagtataccaaacaaccgttagttgagagtggtggtattcgggtgattggttgacttttttttttttttttgcactatttgtaaggcaacatagtttaatgaaaagaattgtggtaaacataattaggtgattaacacagaagaggcaaatagtaaacaagtcagaagaaaca

SEQ ID NO: 914187 - DNA, 4001 bp, Homo sapiens
gattatccaagtacccaaagacctcaattcttacagaaacaaaagcacacatatcttttacttgtaaggcaattaagtataccaaaaatattaaaaggggaaagggtagtactttataaccgacttgaaagttgtaagtcatttagctatttacccaagttcttcacttaattttaatacctttacattaacttttcagttcccccaacacaataaataaataaataagcctcgtaagtcacctatcatctcatcccatcgattccttcactcgcaaataatcaaataatcgagtcaggtctttctggctgcaaatgattcttttttcctaaatcagcgaactccctccagtcacctgtcaaaataagtcactaaaccttgctggagagcgctaaaggaaccaaacctggaattttaaggggatccgcggtgctagtttcagatgtgttgcaccgaagggcctgtatcgacttctgaggcctgcgctcgagtagcagtccctcccttccccctccggccccttccaatccctccaccccggcctcggctggtacctggtaaggctgcgagtcccccctccggtcgtgacagctgaaaaacaggaagagaaggcagcgacataagacacggcgcgggtggggggccggggaggaagaaaacggggcccccgccgcccctccccgcgggagacctaccgagcgccccagcgccgagccccgcacgcacacggcacaaacccggagcctccggaagggccggagagggcgaaatgccgcgaagccgggcccccgctccccgccacactgcgttcccgcccgcccgcccgcgcggccgctcctcctccccaacccgatccggatcagggttaacaacaaaaatggcggcccggccagctccagataaggaggaacagcccccccgccgccgccccccgccgccgcccggcccgaaacgaaaagacaatttacccatcactgagtctctgctgtttcctcgcatacattaccatcaatgcccggcctgtgagtgtgtgtcggggaggggggagagcggccgcgaaaggcgggcgggcgcgcaggcggcggcggcggcgggcggcgggcagccccggcacctgggcccggcgcgccctcggcgactctcatcagctcccagttactggcgccggcgctcccgggccatctccctccgtcgacaccacgctcactctcagccggggcagcggcgccaactacacggcggcaccgcgaaccggggggaggggggcaagacgacgcgtccggctcagccccgcggagagcgactgcctcctccgccttctcctcctcctgctccgccgcctcctcccctcctccccccgccgccgccgctgctgccgccgcctggtccttcttctcctcctcctcctcccgccgccgccgccgccgctggtgccgccgctgccgctccaccaactacatccgggcaactcggacgctgccgccttcgggaaacctcggcagtttccgccgggcccctcctctcccaccctcggccttcctccccgcaccgcgcgggtccggaacaccgccctcggcaaacctcggctggctccggcctttctcctcctctgaggcctggatcttctcttcgcgaccagtctgccctttccttcttttcctcactcgcgagtcggccaccgccgttcccgtttagggatagtctcgctcgggcgcctgctcgaggctgatctcaggggctccgggctgcgcagggagggagccgccttccggaagaggacggtggggcgcgagggaagccatcgcggactaaataagggaggctgcagcggctgcgcgtgcgcccagaggcgcagcgggagggggtgctctcgggcgagctctccggccgcggcccccgcccctgcgctgtcgggcggggaggtcggaaaccccctggcgagaccacgggcggacgcttcccgaagagctgcctgggctgcagccgcggaagctgcgttctggggagcggggagcgtgctccggcgccttcgggccgctgctggaagccggaaccgagcccgggccgctgcccctcaccggacgccgcgcgccaccggccctccgcggggcaggggctgctgcgagctcgccgggcgccctttagacgtaagtctcaccctgcgccccgaggcaggaaggagcgcgtgcagtcccggccagaaacggctaataggaagggctgaggggttctgtgttcaaggcagaaggccgtgcgtcagggcggccctcagcggagatgcgtgcacggagcggggagcgccgctcggggcagggaatgaaagcggcgcttgagactggaaatttagggagatgagttccttgggaacaacgctgaaccatctcactgccccaccctaccccttgttatttttttttgagacaggtctcgcgctgtcgtccagtctgagtgcagtgacgcgatcacggctcactgcagcctcgacctccggggcttacgggtcatcccacctcagccctctaagtagctggcaccacgggcatgcaccaccacacccggctaattttttaaaaaaagtttttccggagatagggtctcgctgtgttacccaggctggtctcgaacccctggcctgaagcgatcctcccgcctcggcctcccaaagtgctgggattacaggcgtgagccactgcgctcggcttttcacccctttctaacgttttccatccctttctaacgttttccatacccagcggtgccctgcccaccctctctttatctctcacttttccctcctctgtttcttcctcgctgaagtccattggtgaaagaaaattcatgtgaaagttctcaggtgtgttaagtgaaattgctacaaatttgattttatgtactgctgcaggtacattgagagaagaaacgtgaagtataccaaacaaccgttagttgagagtggtggtattcgggtgattggttgacttttttttttttttttgcactatttgtaaggcaacatagtttaatgaaaagaattgtggtaaacataattaggtgattaacacagaagaggcaaatagtaaacaagtcagaagaaacaaccccctccaaaaaataaaaagtaactgatttacttggtatccaagaagttacgttattgctagacctaatagaatggagagatggaatgatgtagggagaaaggctctgaaatcacaactggttggaaaaaaaattttaattacataatcttatttgtcacatccatctgccagatgtagagcttattgctgtttgtggagatgtgcagaccaataaaaagcctatttaatgctctcttaaactaccagtaactaaaaaaaaaaattgacagtgactgaaattatgaaaacaaaaaaattcggtagcatcttaacatgtaatttctgacatatttgtagtgaatccattgaagacaaacatcagaggagtacaacaaataacatttcatagaaactttgaaaactggcagcaaaattactactaatttgtttgataactagatgtctgctgaaattggtataaaccatttgctcaaaagtagccaggcatggtgatgcatgcctgtattcctagctactcccagaggctgaagctgaacaatcactttagtccaggagttcgagactgcagtgagtcatgatcacaccagtgcactccagcctggacgacagagggagaccctgtctcaaaaagtaaataggccggatgcagtgggtcatgcctgtaatcccagcaccttgggaggccaagtcaggtggatcattttgaggtctggagtttgagactagcctggccaacattttgaaaccccatctgtactaaaaatataaaagttagccaggtgtggtggtgtgcgcctgtaatcccagttattcgggagactgaggcaggagaatcacttgggcctgggaggcggaggttgtggtgagccaagatcttgccactgcactccagtctgggtg

SEQ ID NO: 914188 - DNA, 4001 bp, Homo sapiens
ccaacaaagatggaatgttttggattcacttatgtgctaatcatctaaaaatactaaccaaaggccaaaccaaaaatctagacttgagttcctttatgccaacatcagaaaaactgttaaaatggttctataaccacaaagcattcactgttgaaagtttgaagtcttcagatgaatacctgacactaaggacttaattattttatgtgataaaaaataattttgtgctggctgggggcggcaggtcacgcctgtaattccagcactctgggaagccaagacgggcagatcacctgaggccaggagttcgagaccagcctgaccaacatggagaaaccacgtttctactaaaaatagaaaattagccgggcgtggtggcgcatgcctgtaatcccagctactccggaggctggggcaggagaatcaattgaacctgggaggcggaggttgcggtgagctgagatcgcgccactgcactccagcctgggcaacaagggcgaaactccgtctcaaaataataataataatgataataataattttgtgccaaaagaccacgtcttttacaaatacatagtgaaatactgatgaaataacgtcagcgattttccaacattaaggaatgagaagtgtatagatgaaataaatttgtttaatagtcactgctaaatccaagcgatgggtacagagaagttcattatataatatctcctcctgattgcctttatcgtttcccacaataaaatgtctttgcaatggcattatctaagcgtaaagcactacagattccaaaataagtgtgcagacgtccttgaagttaaattttaagtgtttcaagtacacaatcttgctcaacctttaaactccaaagactgtcctaactaaaaaggaaagaatgattgacgactaagtcttttcggtcgttcggcttttgccctagcccaaaatcaggtcgaattttgagagaagtgcgctgtgatttaaaaaaaaaaaaaaaaaaaaaaaagcaaaaagcctttatacttcactcccaccctaatctagcgtcttcccgatccccaaaggctttaagggcttccattaaagatggaaagcggacgggacgaacctgactaaccagaaatcctcacctggggacagccggggcgccacgggcagtgggcgcgatggacccctcggactagacactcaatgcaacttttctcctcccaacccgcgccgcccaggaaagggaggtcactttcgacgccccggaagcctctgccaccgaatccttaaggcagtgcaaggccccagtggcggccagaggcggatgaaaccacgggaaaggactcggggctgaaatcaacacacttgactgggtttggggagctaagtcaatcagcagtcgcccgaaaaagaactccgaaaaaggaaaataaaaggggaaaaaaagagttcctcaggtcattcccctgcccaacttcctcagcggcccggtgggcgaggcagtgagacttccaccgcccgctcccagcctctgcctcccccaccctcccggctccctcccggcctaggcggccgcccgacacctcacttaccctcggagcctggcgggtgctttggccacgggccgcctccgcctctcccgctccctacggcccgcgggcgggcgcggaaccctcgcgcgggagagcagggccggcaggtgagagccgagagaggcgagggactctgctttcggtaaataggaagcccggttgggggggcaggagcggcggccccgcaacttccctccccgcctcgagcgccgccggccgggcccaggcctagctctcgctggccgccactgctggagctggtaacagagcctgctgtgtgcccccgctgggccgccgccgcctcctgcgccgccgcttccgccggtgaatggtcagtgctggagtttgaacagggccctgaaccatctcaacgccatttgcgctcccggcccccacctccttcctccaacagccgctcgctccgtcactccgcttcccacagtccccgcgcggccgcccgaccccgcagccaatcgcgcagccgcttactcaaaccgccgcgcaggcgctgcgccccgcatgctccggcgcccgccattggcccggccgcggagcccgacgggagttgtagtccaggtccgcgaggtcgcgggccgaggaccaggcgcgggagcgggagcgggcgactggccgggccctcccggtctcggcagccacttctagctcccggcccagccgggagacgcaggtgccacggagatgggcagccgggcgggtggcgcagtgcaggcagctgtatcaatcgcttcccctccagggacccgccggtgcctggggaccgcgggctgtgcagctgtgccgggcctgcggaggccgccgcccgggagctgggaggcagggggcgcgtggtcaagagccgccctcgacctggcctggtcggtcctggcccggcgtaggtgacgatggcggggaccgcgaggcgccggacacccgaggccacgagcagcgtcgcccctcgctttttcgcgcccctccagccctgcagtccttcctctaagtccgtctgcccctcaccgattgaaagtggccccgagaatattggatggtattgagcaattatcattaactttgttgggtgtggtaacggtaatgtggttatggttttttgtttttttttttttaagacctactgatgtgttgacagagtgatctggtgtcaggactgtaaaatacgcctatgaaaactgggggagaggaataaaacaagctggcagaacgtttttcatcgttgaagctgcgtgatgcgagcatatgtgctcatcatacagtctctttacttgtgtatctgaaattttccataataaaaagtttaaagaagtgaaccagcgattgcctctagggaggacagtgaggtggcggatgacgggaggaaggagtcttaatttttcgctgtacgcctttttgtgctatcttaggtttttcccattcaatgtgttacctaattcagaaaattggtaagttttttttaaggctaccatgggaaaacagcgttctaaagagtagcgcaaccagttccccctaagagaggtgcatgattcgtcggactccgacagccttggtgtttgttaggcggttaatggagacccacctgggaaattagaaaactactaattgctttcagtgagaagcccgcccttctcccacaaatggataatttgcttttaatgcacccagaagttatccagctccctccggtataatcggggaaactccaaataaaggaaaaatagttcagagaccctgcagctcttcccaagaggaatttaaggtggattttagtgtggttggattgttttgcctacctgactgcagaatttatattctgacatttacaatttcctaaatactgaatcagtactttttcttgtttcaaaataaatcaacttcttctgtagtttatatgaaaaacaagtccatgtcttccactgtgggtgggatgcacatgactgttttatttgggtcagttttgtctctttttttaattggcagtttaggaacttgtttttatcattttgtttaaagatcttctggcagaggtgcaggctgcacttactataattatttagatgacaaggtggtgggtggtaattaaagggtaattatcatcagaggcaaaaggtaagatcaaaaaaccagaagaggtgaggaaacaattgcaagatcttcctgtaggagggtgtcgtgatcctcccaagaccaaaggatatgtctattatgcctggcctctctagtgctggacacttggcagggtcagtgcctgcatgaggctgaagtggaagggcttattgtttagactggtgccttttgagggcttttatgtgatggttgtgttaagtaatgaaacttagtagtgtcaaattcttgccactcaaagaatgatccccaatcagcagtgtagcatcacctggaagcctgtaagga

SEQ ID NO: 914189 - DNA, 4001 bp, Homo sapiens
aaattctgtatttactatattctatattttgttgtcaatacctatacttaactttactggtcctgagggctataacatttctagtaaacaaaaaaaatatatttcttctgccagtttatgatttccactggaaaaacaaccccaacaaaggctaaaacagaagggtcccaaccctcgaaaagggaatacactgggctagaaaatgagctacattcctttcacatggtatttctagtatacacaaacatatcctgaggaaaaattagacacttcaatgcataaataaattgtggtttacagataacagaatgttacttggtcatgaacaggaatgaagtactagtacatgctacgatgtggatgggccttataaacattacgctaagtgaaaggagccaggcacaaagaccacatattgtaggatcccgtttatataaaatatccagaatagataaatccatagagactgaaagcagacgggtggttgccaggggctgggggaaaagggagacagagagtaactgcttagtagggacgaggttttctattggggtgatgaaaatgttttggaactagatagaggtggtagttgcacaacattgtaagtgtactaaatgccactgaattgttcactttaaaatggtttttgtcatgtgaatttcaacttattttttaatcagtattttaaaatagaggataatgggcaaaacaagatgtatttgtgaaaaggcagccctaaaactcctagggaaaagataagtatttttgctggcactcagtttctgctcttgttcacaacacaagttcaagcgctaagttgtataaactttgccactacgctatgcgtctatgtgtgtatgcctttctgaaaaaacggggaaaagaacagaaagtgaagaaaaaagaatcataaagctttgccacatgcaaggaaggaggggtgattgcccccactgcaccccacccaacttggcaccaggagtaacgctcccattagggttttgaaatgccagctggagctggaatcagcacaagcaagcttctctgcctggataaagagcaagccacccagcaagaaaagctagggtgctccatttgctgcccatattggcatcagaaccaccctctggtcaaaagccctgagctggctcagatcagcatccgtgacttgctctcccaggccagccagcctaacagcaagagcttgttacagctcaagtgtgctcctcctcctgaggggttccactctgtttcatcccacctgccttctgagagtcctccctccaaccaagtgcgccatggcttacagattttaaaatggggccaagtctctcccaggaacatagtaattttttttaaacgtactaagatgccctcggaactttccccagtccatccttaaagaaatatcctcaggatcccctccctcacaggccaactcaatagcctgtgtacccctacacacacagacgtacatactgcattactgcctgggacacctgctccacagagggacacgaataaggcccacatcctcagcttggcaccgctatccagccacagtcaccccagcccacctaaccaacctgccgtctcaaacgcccctcactcgcttggcatcatgcctctgccacctccttgacaccaaaactgtcacaggtgtccctcagctaaataccgacgcccctttagatcctgtccacgccaggcatagacgcccctctcgggacccctcaactcttggcaacaacactccttcagacccctccagccaggcctcgacgacccccaggacccaacatggcccagacgccccctcccccttacctgcgggggttcagccctggctgacaaggggctgggcagcgcctggaggagcaggagcgccatgccacccaggagccttctcctctccatccccctcctgctcctgctcctccgccacggcgccgccacctccctcctcctcctccctctcctcctctaccctcttcttccttcttcccttcttttcctgtttgacgctcccctcccgcttccggctctgctccaccccgccccgcgcaaaacaccctcccagacacgcgagagactctccagttccagcgcttcattggcctttgccctttgtccattgatcaatgtagctgtcgatcaaatataagtcccgccttcccctgaagacgaagcgatgcagccaataaaaagtaggaggaagccggaccatcttgaatgctgcgaagaagtgtaaaattcgtcccaacccgcagagagtggcggaagcagcttcataagggggcggggccacccaggtggatggaaaagtctatttctgatgtagccatcttgagtgtggcggaagtactagttttccagttttccacatcaaaaaaagaaaaaaggtttaatgtttctcaagggtgttggaaaataaattattcctgaaaggtaaccaggcgctcctgaagaggaaaacaattgcaatgtaaaaatattttaatgtcttttgtcttgaagcacagcactattaccaggatgcctctcttggtctcaactgcccaaatagcagcttaggtccgtttgaattccctagaagatagtacctttatctgaggcatagtgcttcgtcaccccaagttcgacggacaaaattctggttctacttcacaaattgctctgaaatccatcatccattgcttcaatccatgttcttctagctaaatacaaatggcttccctgctgccctgcaagttgacaattcttcctctcaaatttccgccacacactacaaccataccacattaaaccaaatattactatatcatggcctcttcttttaaatacttcatctacctacagaatagagagtccaaacttcccaacacggtcctctctgtgacttcgtccctgtctacttctctttatctcacctctcaccactacattttcccacacattccactcacactgaccattgaagagatgcccagtaacttcatttacatattacagatacagttccctgcttacaaactcctagccccatctccttgctgcttcttctggattcttgtaacacttatatctgcgtgcctggtttgcagttttttgtacagcataccaggtctttcttcttcttcttttaaagcctataatatcctgtacaaggctcaaccagagcttgatcaatgttggtaaaatagccaggtgtggtggctcatgcttataatcctagccctttgggaggctgaggcaggtagatcccttgagctcaggagtttgaaaccagcctgggcaacatggagagaaccctgtctctacaaaaataaaaaaactaaattagccaaattagccaagcatggtggtgcacacttgtagtcccagctacttgggaggctgaggtgggacaatcaccagagctagggagattgaagctgcaatgagccttgattgtgccactgtactccagcctgggcaacagagtgagaccctgtctcaaaaaaaaaaaaaggccaggtgcggtggctcctgcctgtaatcccagcactttgggaggccgaggtgggcggatcacatggtcaggagttcgagcctggccaacattgtgaaacccaatctctactaaaaatacaaaaaattagccaggcgtggtggtgcatgcctgtagtcccagctactcaggaggctaaagcagaagaatcgcttgaacctgggaggcagaggttgcagtgagccaagactgtgccactgcactccaccctaggtgacagagtgagactctgtctcaaaaaaaaaagaaaaaaaaaagttggtaaaataaatggacaaaggaagacccatggcaaataacacagttgactttagcagtcaatttcctctcaaaaacctgtcaaagtgttttacagcctggcccagtctagcccacatctgagcccagaggaagttgttcttggcttaagtgttggaaaaatgggaaacaggtaagagttaagtcagtcttc

SEQ ID NO: 914190 - DNA, 4001 bp, Homo sapiens
catacattctttcgtggaatccctgtgtgacctcagagatgaggttcagaacagttaagggcctgcccaagacctcagggaagctgggatatgaacgcaggtctttccagctcccagcccactctttccactctgttaggcagttttcaccctaccagcctgctgacacagcatgagacgcttcatccagcttcatcctatttccaacactgcttgaaatcctctccagggctcactctgcccataggttaaaaggacagcctttctggccaggcacagtggctcacgcctgtaatcctagcacttcgggaggctgaggtggccggatcaccggaggtcaggagttcgagaccagtcagaccaacatggcgaaaccccgtctctactaaaaatacaaaacttagccgggtatagtggcacatgcctgtaatcccagctactcaggaggctgaggcaggagaatcgcttgaacccaggagacagaagttgcagtgagctaacgccactacactccagcctgggcaacagagtgagactccatctcaaaaaaaaaaaaaaaaaaaaaaaaaaggacagcctttcttgtgggggcagaagggatgttcagagtggtcacctctctgcccatcagctgtgtcaacgcaacactctgaagataacaagagctgtaatggaatgtttggggcttttcagaggagcttcctttgaacagaactgtaggcaactcaagggagagttgtccacctagcacttttctcagagtgagggcaaccagtggtccctagcagctcccctctagggcttctgctgtgagctcatctgtggcttttcctcacccaggaacaggcagcagagggtgtgtgctccctccccaccccttatggccagcagctgctggttacagttacacattccgatacagacatgcctctcagacgaagagggggtgggggtgtctgactctcagaagccctggaacaaatagttggcaacagctgtgttctcagcagacagcagttggtggcttgctactgttctctcattccacactgctttaccggctggaatgaatgcagtgctcccacttcaaagggcggctcaccgagcaatcaagtctctgccacaggggtctttttgaaaaactggtcagtaaggccaaaatggggtcaattccacaccccttcccctgaggcgtcgggaacgtccctcagctgcacagccccaggcacatgcttgaaaggaagaaagcctttcctttaaaagaagaacggagccctcaccccacccccaacacagagtcccttcagaaccagaggactgtgaggaaatctccactaactagccaaatcaaaatggagaaggaataaaaggggtttggagcaagaatcgcactctgcctctccccttccccagccccattcttcagctgtttctccgtgaagtttccaaagcagttttacagtgtctgatggaaaatcagaactggtcagccctagagaaacctcggggacgtagagggttaagaacacggtggctctgaaagtaaggagcaactagcaaacaagaagggagactggaaagttctgtgtgggagctggcctggtctaactgagaggcatttgctaaaatattccctccacccaaagcagtagtacaataaacaagctcccaccccttcttcccttccaaacccgatccgtgcagaaacaattacctgtctaagacccaaaaggaaaggcatcctgcaagagcatcgtccacactaacgttggaacaaagggctcttaaaagttaaggtcttggaatgagcattgcccctggtgggcctgtgtgtgcggtggtcctggttcaccggccttctttagcaaagcagacaaagtaaacagagtcctgggaccgagcaggcacactgtctcctgctctcctcgctactccccctgcctggctctggcccacccccaccttctcgtgacatatctcagacgcagcaaagccgaagctgtctgccaagggggaaatgacatcagttcaggcgcagcagaaaaaacttcagacagctgcactggaatactgaggaggatgtgctgcagacccgcgatgcccagccctggacccacctagagccagagcccactgtgggaggatggtgggggctgcagatgggagcaggctgctgcaaccccttggctctaagcaggctggggggtacataaatcaagtctctaaagctgaaaacaggaacactgctctgaataaggactgactttgtagctcctagagtattgtttctcctccctgggaaagaaaatcaagtccagtgtctgtcagtttcacagaaacttttccacccccacccctgccagagtcggtgctcagtaaataataggacatgaagcctggctgtcccaactttctctagggaatgaggcaattcgcagcgggggcttggagaggcaccttttccccagctaaggtacgacacgctaccttggacactgacctttcgagccctcgcttccaccggagagtttatatttcataaacaaactgcgcaagtacaggtgccaacatctttcctcacttgtcttataaaaggtacaacaagtcccaccgcagcctccaagttgccagaaaggcagatcatctatatttaaaccaactcttggttcagaaaagttcaccgccttaggtttgtcgtgctttcttcactaagttcagctcagggagacaagagttctctaacgcaagctttgcacaagcaagggccctggggatggtgtcctgctctgactttccctagtcggtggtgtaagccaaatcccttctggctaccctccctgaaacaggaggtcacagcagctctccctcggcctgaatcctctaccaaagacaacacttgcacagcacaaaaggtccatgtttgggttcggatttccagaaatgactcaaggagaacaatcttcagaggagctttataaatcgaaagttacttttttttttttttttttttttttgagatagggtctcactctgttacccaggctggagtacagtggtgtgatgatcttggctcactgcaacctctgccttccgagctcaagcgatcctcccacctcagcctcccaaggagctggtaccacaggcacgtgctaccatgcgcagctaatttttgtttttttgtgtagagatggggtttcgccatgttgcccaggctggtcttgaactcctgggctcaagtgatctgcccaccttagcctcctaaagtgctgggattacaaaaagttacttttcaataacttcctcagctacaaattaattacactgtccaggactcaaagcaagtatatttcatctttcctttcattttctgcaacaattttctttcatgatacttatccaaggcctccatggtagtggcactgtgctgggcatgatccatgtaagtcagaaatgattcttgcaaattagtacctataacccccaacctaggacaataaattaggagcacatgacacgtacagcacagtgaggtgccaaaagcactgtttgatcattagaatccagccagacacacaacgtgtttaccgcaggtccccaatgatggtcaaggtcacattgactttcctgacaagaaaatgaatgtgccaaactggctgaaccatttccttgagactcactgaaagaatggatcacagcttcattgctagaggaaaaggtggctgatgtgtaaaagaagtggctcctgctgctgccggtgtttggggactgggaagccattcttcagcacatacatattctcaagacatggtcagtctatcccaggccttgtcaccactctcacaaccaggccaaactgccatacagacaaggctggacatcaaggcacagccgcccagggaacagcaatgaggctgctttcaaccccttcctttcacttcctcggttccctggcaaccactgagaaccacaaaacatacgcagcactaactttggcaatcaaa

SEQ ID NO: 914191 - DNA, 4001 bp, Homo sapiens
aatattataacattttttgaaaataatatgagaataattttacaaccttatagtggagaatttcttagataacacataacaagtataaatcataaagcgacaggtggataaacttatttgaaactaagaaattcagtcattaataaaaaccacaggaatataaggagacaaggcaccaacaaatgaaaaatatttgttatatatataaatgacaaaaagtagtacccagaatatgtattgaattatggcaaatcaataggataaaagacaggtaacccgatgagaaatggccaaaaaatgtgaacaggaaaagggaccccaaatggccaataaacatatgaaaaagatgtccaaccttagtaatttggtcaatgcaaattaaaaacatgctaagatagcttttcatttctaccagattggcagaaatacagtaccagacaatatcaaatgctgatgaagaagtggagcaacagaaactttggtgcattgctgaggggtgggtaaaatgaggcaaaaactttggaaaacaacgtggtgacatccagtaaggctgacgatatgtacaacctatgacccaccaattctatttctagagtatatacccaagataaattcttgcacacatgccccaagatgcatgtacaaaaatagttctagcggcactgcttataatagaaaaaaaaataaactcttgaaatacctaaaatgccatcaacagcatctcagataaatatattgaggtacactcatctaatagaatactgtactgcagaaaactttaattatctacaggtacatgcaacaatatgaagaaatttcagaaacaaacttttgaaccaattaggcaaattttaaaagaatatttaattccatgtttacagagttcaacaacttgcaatcatacatatatagcgatttaaatatgggatgtaaaattagaaaaagaagcaagggaacaataaacccaaaattctggactgttgctgcttctgaagagggaaggtgaaagatgggcatgaagaggacctcagagatgatgctgatctttaaaaaaatctaaggtgtcagcacacagggtttatgctgtttttattacttctatcttattatggtctttctaaattttcttttctttccttcttttttttttttttttttggagatggagtttcatcgtgttgtccagactggtcttgaactcctgacctcaggtgatctgcccctctcagcctcccaaagtgctgagattacaggcgtgaaccactgcgcctggccgaaattttcttttctttcaacacagaaaatctttccaagttcatgaaagaatagcccatgtgctcaggatggacagacaggaagggcctccctgacctgaccctgttccctacctctctggccagaaccccaggcatgccccttacccggctctgccacaccaacctccacgaggtctcctcctccagacccttatcaagaacacttctcagaaacccacaggactcggcctccctcacaggtcccctctcagaagactagagccatccccaccctcccaagacccccaccctacctgctattctcccacctgctgagcaccgtagacccctgtccgctttgaccagagcctggcagggcgtggtttctcaatacctatttgttaaataactaaatgaatgactatacataaactcatattaaaattagtgtgctccatggaaagggtaatgcatagagcccttagttatcaaaccagcccccccacactttagatgagttgggacaaaggatcggtttagtgttctagaagtttcatttcaggggaaaagaagaatcagtccttactgagcaggtggccctgcttaggcagaaaatgcaggcgtttcaatggtttgctgtaataattcagatgagggaagtgagcccagggaggcacctacttaccagaacccagtggagtaatgacagggccgggatagaccagctccctctgaggcccgttggaaatggccctccaactctgcactcctcagaggcctatgagggagcttggagggcgagcctcactgtcctgtcggcctgctctctccgccccctcgacaaccaggaaagcccgtgtcagcccttcccagggttcccttcatagcaggaccccgagaaaggacttgacctaccgtcagaggtcgaggagtgctgctggagcccagcctgactcccaaacttcagcagtgacacacactcaggcagacccaggccctggagtggccctgaccacatgggccccccacgccacacacacttcctgctccccagctcacctcctctcccacattcacaaacccaaaccaggcactgggtcacatgtgccccatagtcagcctcccaggaggcagccagtaggccccacgctgacaggcggcgcccatatgcccacctctaggctggcctggctgggccaagagcaaggtggcctacctggaggggtggccgtcagcgcctgtagacatcagaaggcatgggccccctatccccagctgcagcccctcaggctcgggggaagaggacccggccccacatcgtcagtcctcagcgccgtttcactctgaatcactggagctgggtctctgctcatttcctggagaaagcagaagtggagagccggcagatgcctgactctgcccactctccagccgaccacggagctgctggagttctggcgggtgacttgggttctgcagcaaggccccttggggctggctgtgcagcctccgtggtcaagcggtgctggttggggccaaggacaaaatggaaagtacagcccagccctagaagagtaggtctggattctgtgtcccctcttcactagccgtgtgaccactggtgcacacctctcctctctgggcctctggcaaaatgagaacaatgatggtgttaggtgaatctaatcagaggtgtgtttaagtgcacccctggacatggcatgggttgggcagccctcaccccaccaagctcagagttgcccacttggatttcttcctcccccatcctcagatagaacttgaaccaccaatgaggggagtcctcctgcggccaacactgaggcaaggatgagaggacatctaaaaccatagaatggaagtctctgaaactcagactccaaattctcattcctctgagtatataaactaggctgaattatccatgtcacctatccataacgtcatctccacagtacaaacaagcatgtccattcacacacaatcctgcttgtgctctgtaaaaggagaattttgccaaagagcaagggcacttgttagcgctaatgcctgatccttgatcctcagtgcagctcatcgcttgtctctagctcacaaaaccagtggaccatgcatgactgactgagaggcagcaacaacatcacttgttatgacatggagtaaagctccaagattggtttaaagaggaaaataacatttgtcacaaaacctcaacctccaccagtgcaaacttgtcagtagacagcagccaaaataggagatctatccagctgcactccagtctggacagcaagagcgaagctccgtctcaaaaaaaaaaaaaagaaaaaaaagaaaagaaaagagaaattgaaaggatacatgcagtgccagccaagggaaagagaaaaccttagagaatttgcagtgaagtgtttgttgtatatgatgaaaacccctcgtcattgtcaccaatgaaatcataaataaaatctacaagaagatattgcctgaaatcagaggcctatggtaagagcggattagacagaggaacttccacagaggcaggaagggtggccagcatgggacaggccaggaccccatgcctgtgaatgcccagaggaagcgcggagagtctgtcatagtgggatctcgcaaagtctgctggagggcccacctgcacccaggtctcctaccttctacccaccccagcaccttgccgggtagccagcagcaggcaggtaaaga

SEQ ID NO: 914192 - DNA, 4001 bp, Homo sapiens
tagccatctttatggcacgctacttacttctgtgtatattcttgcttttccctgcaatgctccttgtcaattttttacttggctaactactgtctactagtcttgaaactgtagacttctgtgactctcctcacaaccaggcaatatgcagctcctctgttttctcacagcgtgttacgcaagtctcacttatcacactatcacgctgtgagtcttccttataagatggagaattatctgagggctttcatctccatatccatagcatatggtaagtgctcaaaactaaggaatgactgagtggtcttgtaaatggtagaactttcatctgccttaaaatgatctaacaactagcatttaataactcaccctgtattgacattaagtcatatatatgaaaattctaggctaccccaaataggttgttatatttaaaagctattcaacacttacacgtaagacttaatgagagcttagtgatacacagtattaaactttagactagacaacatgttagcgtcaaagtgggattttacttacctttacaacatcagctttatgcttttctaaaacttgaagagtttgggcagtaatggaatcaatcactaccacaagtgaatgacatccataagcaattaaaccttgccagcccctagcaaaacagtaatgttaaagtttaagtacagaacaaagcaggacgacttctttcttgccaagcctaaataaatgataagtctaattcatatgtaccaccattaataaaatcatttaaacccaaaggccagtatttatcattatcccacttaaataaaagatctggctaagcttaaaatgcttgttgaaattcacttttcattcggataaaaaaagttctaaaagatatgaaaatagagacccgaggacataaaaaggaacttgtgccctctgactgttcttgtaggcatacgtctttcgcttatccgatttctaatccttagtatccacaatgtgcctggggatactgcgactaatcctagtccttccaactaaataaaacgacaaacactgcacaagacgtttcagtcctcctaacaacatcccacagccacagaattttgctttacatttgtctaatgagtagttttcagagctgcagtagtaatttatagtgaaaggagagagtaataaagacgacctgttgaaggcaggaatgttctacacaggaggagcccgaaaagaggtgaaaaggacaggtgaaagaacaggcgcctagcacagggtctggcacattgttgaaagacaacaggaatacaagacaacgaaaaagaaaagacaggatgggaaagagaaagtgcacagggaattaatggtggagagagagaagcctggaagctggaggagaggaaaagagagaggaatggaacggcaaaagggcgaggtgcagagaaaacagcagagaaatacgcgagaaagaggggaaatgtatttgcatgggggaatttcccacacggggctattatcacttttgtaacaacaaaaatccaccaactgaaagcaagctcattgcgtgagggcggctccctgccttagcgaggccaaactaaccagggggtgaaacctcttgtccttcccccttccccctcacacattcctggccgatcctggcgacctggaagctcggcgtcctcaccagtccaccgccgccttgttgtgggcgttgagggcccccgtgagggtgcgcgccgacaccttgaagttcactgtgtagggcaacatcccggcggccagcccaggacctgggcgctgacccgcaaccaggaagcggcggacactgtgcttccgttccaaacagagtccgggtggccccctcggcgccgctgtcaggttcctctagattcaagttctacaggctccgggttccaccgctcccggattccatcgcccccaggttccgttgccttcagtttcctaggatcctaggttccgcactctccagagttccgccgcttaggcggttgtgctaatctgcgtcagctggggctgtatttggaagaagaggcgctgcctccagtcaagtctgtttttttcaggtggggactgtaggcctttgtgccctgctggaaatcgtgaaaagcaagagagaagagtcccagttattcttgctgcctttgataagtgaatttagggcaactactagtgccagtaggcatgggggatctaccgatgaagaagacacaaagtctccgctctcgtggagtttacagagaataatgaatgagattaattaagaaatgaatgagattaattgaatgaaattgccagactgaatgaagtgaatggcctgaatataaacaatttccaaatacagataacactgcatatctggtgtttgcaatactcccttcgcacttgaggaagaagcactatgtctggggccaagtgtgaccctttgtctgttgctgggtacctttcatttcgcactttctcctctgctgctctccaggtcagacccagtccttccctcctttgtgttcagtgttgggtttatacgctttaactatagcacttaatgcaatgatttcttttcagcaatgatatttgcagatgtgtgtttctctccccaatacattgttagtttcatgcgcgtccgtgtgaagagaccaccaaacaggctttatgtgagcaataaagctgtttatttcacatgggtgcaggtgggctaagtccgaaaagagtcagcgaagggagataggggtggggctgttttataggatttgggaaggtaatggaaaattagtcaaagggggttgttctctggtgggcaggggtggatctcacaaagtacattctcaagggtggggagaattacaaagaaccttcttaagggtgggggagattacaaagtacattgatcagttagggtggggcaggaacaaatcacagtggttgaatgtcatcagttaaggctgtttgtacttcttttgtggatcttcagttactttaggccatctggatgtatacatgcaagtcacgggatgcgatggcctggcctgggctcagaggcgtgacattcctgccttcttatattaataagacaaaacaaaatagtgttgaagtgttgaggcggcgaaaatttttggggggtggtatggagagagaatgggtgatgtttctcagggctgcttcaagtgggattaggggtggcgtgggaacctacagtgggagagattaagctgaagggaggtcttgtggtaaggggtgatattgtggggatgtaagaagaaacatttgtcgtatagaatgattggtgacggcctggatacggttttggatgaattgagaaactaaatggaataagagaaggagaaaaacaggtataaaaggtctaagaattgggaggacataggacatctgattagagagtgcctaaggagattcagcatagtcctgccagcaaagattatttatttacttcaagagtttagagtggcagtttggggatagcaccaggagatatcagctgtgatggcttggagaaacagtgtaaaccggcagtgtaaacaagagcagggcatgtatgagtagttgagaatggtgaataggagtatgactacaaaagatagggatgacaagttttttggggcacagtctaagttggtctggtgtcaaatgagactggggcctaataaaaaggagcgtctatacaggagcttaaatgggatgtaccttgtagcattctgaggacaggcctgaattctgagaagcgaaagtggtaaaagtattgtccagtcctttttaagttggtggctgagcttggtgagctgtctttttaaaagacctttagtccgttctacttttcttgaagacggaggcctgtaagggatataaaggtttcactgacacctactaagagcctgaaaaactgcttggctgatttgactaataaaggctggtctgttatcagactgtatagaggtggaaggctaaactgaggaattatgtctgacagaaggaaagaaatg

SEQ ID NO: 914193 - DNA, 4001 bp, Homo sapiens
agtttgtagtaacattttatcgtaataacactgttagacgaattcctagtgggctgagacaccaaattcaacttctgagcaatatcgaggaagagaatggtctctacaggcaacctcagaaatctgtcatcagtattaacctgcttaaaatgttttgtcattgacgaaatgaaggcatggaatacatacaccatcaattctgtggatgacaatcaattaggaaataccattaatcagataaatagccatcaagattttcaaaagatctcagtagttaaaagaacaactttaaaccaaggatgaaattcaacagatgtaaaatcttttccctgaaaagaataagacaggataaatatgaaaactctatcttagtttcaccttggggaaagggacttagggattttagttcagggcaaatgcccaaagtgaacagcctaacatagctacccaaaaagaggaggagggaaacacactcactcaagatctcctgtatacagcactttgcaaaaatggctggcatatattacataacgtaaccttcccagtaagaaaatgaggctgatatgaacaccatgttagaggacagggagtcgggacttaggaaggccttgcccaaggtcacactgctgttgagacgtggccagtgcacacgagtccctactctgtctcctgtgagcagtattaatagaaaggcagcgtctaaacccaggggataacagatcactccatttgttccacattggtgagttcatatttacataccgtgtttaactcctgggacatatcaaaagctattttgaaagactcgaatttgatcaggaaagtaaccagaacagtgtgtgtgtctgctggggttgggggaagttcagaagacgaagaaagttcctggagatataactatcttgagctttctcattcagaggtaaataattcctgcaatacttttatgaccgtaactcacaggccaacatactgaatttaagagaaaaacacttgaacttcaataaatgaaacttccaagcaattaacacttttctataatggtatccgcttcaagggacgaatgttttagcgtttaagttaaatgacaaaatctctaaaaacctggcagaccttaagctattttcactcacaacctggaaaaatgtatttattcaacttggtttagtaaatgagtacattattattgttgctcttgtgttattccggtgaacagctgtcttaaaatgtttccctccagcggtggctgctttcagggggaagggaaggaaaaggaagtcttcaaaaggggaacaatatcatggcgctgtgttaatcacttcagcatccgtcactccacactcaccacccttcttgaagccgaccatccccactctttggagagaagaaaggccattctcctctctgaagggcctcccaagtgcttccctggagacgcacttccccgggatgcccaggccgaagcaaagggggcggggagagaccccgggccgaacccttctgcccccaacccctccagcgccccgactcttcctggactccgacatcttctgcaccgccccgggcccccatccctcccgcaccctggtccctctggcaccgccacggactactcctgcgccccgacttctcttgcaccctgaacccttctgcaccacggcccttcctgcaccgccacgggtcctccagggacccgacccctcctgcaccaccacggaccctctgcattccaagcccacctgcaccccatccgccactatgccccgactgcccctgcacccccttgagccctgcagtgtcccgactcctcttcggggcatccggggaacgactcggcgcctgacaggtaggaagatggcggcactcacctgtcacagcagctgcgcccgccacccccggagccagcccaggtcgcgcaccgccagtgagtccctacgacgcggccccccgtactgacccgaagacgcgcaggacaccgctgtctccgcactgacgcgaccccacaaccccaacctggcgctaatgcacttccggtgtcgccggaagtcccgccccagtcccgcgccgctgggttctccggaagccgccccacacctccgccccacacccggcggcgccggaagtcacgccccggcttccgccccgcagccccgaggggtctgggcgcgctgaagaccccttcggctgctgggccaacgcccccacccttggtcacgtactcctgccgccgagcggttcgcgggaggtggcctcgggggtcgtagctactcaccggcggggcgctccgagtccatctgccccgtagcccggcagccggggcgggagggctgcgagcccggggcgcggtccgcctgaggcctgagacccggggccgcctgcgctcagggccgcggtgccggccgcgcgggagcctggcggggacggcgcggtcagtgttcggctcctccgcagtgactcaccagcgtcctgaagcttttgatcaccattggctgggaaggaaaaacagaatcagctgttccctgcgaaaggtgggacttgggccgcttttttcttagaatctaggttggaaacgtcgcatgatggtctttacgtaaacagccgtctcaacgctctacagaaagcgctaaccgcgcatttgaagcccacctagagtaaatcaagagcgtgaaagcattttttttttctgtgtaggttaacattcctgctccttcctttaaaaaggaagctcaaggccaggcgcggtggctcacgcctgtaatcccaacactttgggaggccgaggccgacgtatcacgagattaggaggtcgagaccagcctggccaacatggtgaaaccctgtctttactaaaaatacaaaaactagccgggcgtggcggcgcgcgcctgtaacccctgctactcggaaggctgaggcaggagaatcgcttgaacccgggaggcggaggttgcagtgagccgagatcgcgcctctgcactccagcctgggacagagcgagcctccgtctccaaaaaaaaataaggaagctcaagatgaagagtcagaagtggtaacttgtttgttgcacaagaaacaaatttagcattctatttaggggatccagattaccaaaaaaaaaaaagaagtgaagttatttctgcattaagtatattaataaaactttatcactaaaaacaattctgtaagaggaacgccaaggaaaaaaatatttgagtttttagagaagtcattttttaaacttttagaggttgtgacatttaagtaacataattttatttagtacctagtatgcaaagacattgtactgggcatggcagcaaatagaaagctttgtaaatcgcagtgtcccatctaattaacccgcattctaacaggtggttttatttttctggaccgcaccacagtcaggtaacaccaagaatatcgctaatgtaattttttaagttgatatatttaggattccataaaagtcactgaaaataactgagagcatgacatgtcacaaaacaagggaaagaaatcattttgaggatcagtcgctttacatcttttgtaactaatttaatccccaaaggaatccaataaagtaaaagttattctaaattgaattttaagcatgagaatgtggaaattactcgtcaaaagtcaaaaataatcgtgcagcagggcaaagactaaaggctggcatcagaatccatattcttttcactgttgatgtgctagggctgcaggaacaaaatactgcaaactaggcagcttaaacaaatttattgtcagaggtctgactggaagtcccaaatcaaggtattggcagggttgattccttctgagagctgtgatgggagcctgttaatgcatctcagcgtctaggcattccttggcttgtggcagcatgcccccgccagtcttcacatgacgttttccatgtccgtgtctgtctgcacacttagcgttctttttatgaggacatcagtcatattggagtacagtagacgctactt

SEQ ID NO: 914194 - DNA, 4001 bp, Homo sapiens
atgcttttgaggtccttacataaaaggttgataatgaagtattaagagaaacatttcaaaggctgtggttggtcaaatttctctgcatggcataaaggggaagatgaccttatgcaaaaccgtgatagtttcattagaagcataatcaacgtttaatgttaaatttaaaaatcacttttcaaatgccaccacaaacagattcttggtgaagtacaaatgtttaatttaaattggggcttataggaaaaagcaattaaaatctaattgtattataaaggagatttgtacattttctcctcaaagtcaggcaaggcgagaagggctcttaaaccctgttttcttaaattagaactttctttcacatctctttttccttttttctttttgaatccagacacttgaatttggacagacaagcaacccagccacctttcagtgtggctgtgtcagtatcggaatgaaatgaacatgaccccctccagcagggaagggaacacacagtaaaggtattttttatagaacaattcttcacaccgccctggtgactagggaagggaatctcgtgtttctcttttgctgatactgaatcagctgaagaataccatgaacatcagtagaaatgctctgaaatagtctcctctcccttttgtctttttgttctcatgagggggagagaagagagaccttttttttaacattgaaatatttaattaaaatgccaattaaaaatggactaattggtggttctgcttataatcagaaatgttgcaaattattgtattaacttgcaaatagttttatgaagttggcatacttcctatcaacactcctataaagacggctacactcatttatgataaaaatgtattttcaattctcaaaggaagcttatctcagcaaagaaatttcttttcctgcttcctcaacagtttatgtagcaattggatttatatctttgttaaatagatggtcaaaatgagagctgatgaagagagagactgagctcatatctgaactggagagaaactccgaacaccctagcaacctgcattctgtatgttattgtgtactggtgtatttgctaatgaacagttgcatgtatagatagtttatgtggtttccaagagctaaatgagaatggtgatgatattctttagcatttgtgtttataatttacaaagcactttcatatacgttatctgattttctgaacaatttagaaatatttgtaaattgaacaaattaaataaatttctcgagacgtttagatttctaaaatatctggtttcaaacatgtttgttaacccaatgcctgcttagtggttcaaataaaattttttatgtctaggaaatgataatttgagcaattacttagaatatcctgaaaaaaaaaataaagtcagaaagtacaaagtaagatcccattgaattttgtctccagactttacctcaagatcagattcaacacacggtagaacttgctttgaactaccttcctcctctctacaatgctgacatcaggatttcgtgaaaagggctgctgtccatttacccccaaatcactttgggggaatatttgtggaatagcaatttataaaaataggaacccccgctcccatcatttagtcctttattggtaggggtcctaaagattcactaaaatcagccataaatttaggaagagccctaccccatagaacagtttttcctaggagagctatcaaggcttcctacatttctggaaatgaaatgagctttacccaacacattacatacacttacctattcccagctccaggtaagagtccaggttacttaccagctgtggctgagttggaggacacaggtgaaaagacagatgtacacagaaggctttgaaagaaacataatcctctggagtaacagctagagaaaattccaaaaaactgggagatgggtaagcaagacggagaaatattctcctcagtgccagtgggatggaattctcaaagcccaacttccttggtgtgtaagcgatcccaaacagagttaaggggaggtgaaatggagctgccaaacgtccaaagaagagattatctacttaattaaagttttttttcccctctaagtccttcagccaatcagaactcaagtgccagagaaagattgagtcgatcaaaagaacactccaggatcctcccagacaaatgcagaagaaggggaccaggagaaagaggacaaagaaagaagcggggggaagagacatagcaaatcccctccacataatcactgcatggagtctctttcctccctcttgcctatcccctcccatcacaccacaaccttttcccacctatgcacacttacacacacacacacacacacaacacacacacacacacagcctggtccccaaaagggatccagaaaggactgtgctttcctggttgtcctctgtagcactttgagactgaatttgcattcaggatagcatttttttgtttgttttgttttttcagaaaaaaatacaccaggtgcaggtgaacctccaccctctgatttgagaatgtggggatgcagtcctaccatctagtgtattctctgtctaagttagaaaggctagaaacttcaggaagcccgatggttttttcttcctttcaactttttcatcacacaattacttaccaaatgcctattttattctcaacaccaccctaggcattgtggaaatttttaaaaaccaaaacatgatttctgccctaacaacatttacagcctagtaaggtgacaataaaataacgcagtttaataaagtattagaaagctacaaactgcctataatagtgtaggcttatttaggggaggttttctgaagaaggtagaatttgagtttcgaagaaggaaagagatttcaataggcacacaaaggtgatctcaaaatccctactttcttaaactcaggtggcggagccaggagggcacccaggccctcgctcacacttctctgggactctgctccttctgttccctagggaggagggtggcctcagccacagcactggggatcctcaaagggctccagactgatgtctatgtagccatatagccccatcttttaaaaaaaatttcagttaacttttgtggatacatagtaggtatatatatttatggagtacatgtacatgagatattttgatacaggcatacaatgaatgcatgataatcacatcagggtaaatgagtatccatcacctcaagcattaatcctttgtgttacaaacagtctaattatactcttagttaccatgtacaatgaaattattattgacgatagtcaccctgttgtgctgttgaatactaggtcttcttcattctttctaactattttcacaccttctactttagcatccgcatcacctttcttaaggtctccctgagacaatggtctttgttcttttcttttaaccttgttcctcttgctccaaaaccctctctggctagactgaaccagaaaataaagaattaatacacaaattcactttctccattacctaggccagacgatttagggggtcttcacctcagtatcttaactgtgtaattttgttgtccacatggaatcttctagaccaagtctttatttggggctccaaaccttattgtgagatgagcttggtcagttgtggctcctacacaaacaactttaggtcctcctctctcttcattcagaaagggagcagtagagtctatttcaggccaagagtcaggttctaggaagataaggagcaatgactcctggatttcagccttgacttcttccctgaccacagtttttgccatttacttgactagagaactcctaagggatgcaaaaattcattgggaggtagagcagatttgggcagtttttgtgtaaaaagggagagctaatttaaaatgagttcattgaggcactgtcctatccccttagaatttcttccacaaaggagaaagttaagacttttattgtttgtttatctatc

SEQ ID NO: 914195 - DNA, 4001 bp, Homo sapiens
gttcagcatggggcaaaacaaggaacaagatgctcaatcacacctagtggatgagacaagggtaaactggaacaagttctaaggttgggaagtaagcaatgttgtctttgtctacccagaatccatccctccttttgatgggaaccttggttttccttttgagaatgtaccctctccatttcagcccaaggggttcaaagcagtcttatccaaacacctaacaggctctgggacccaaagcaggtcaatccctccctctggccataatgattggttcacagatgaacatgagaattaaggcagcccagtgagcatcagatcagggacttctgctccattaggaaggagggctcaacttctctgctggggctgtcagcctagaactgtcataacctgccataaggagaaagtctccctgagaatgaagcggatactgaataaatcagagccaagagatgataaagagaagtctgaagccaatgttggtggtgctcccggattcagccacactagaagccagctcaaccccattttaggtaaatcaatttgagttcagtttccattaccgaaactgaaagaagtgctcacttttacaaggaatggcactcaaattctaccagtaggggaggcgcctgtggaaaatggcttcccctctctcagcctttcactggactttcctttgaggtaaaaaagactctaccagctggtgtagaaaagactcttctgctcctaaaaggctgtgagtctataaatctagcacagatcaccttggccccctaaagaccacctgaggcctacagcctaactcatcattatccacttgcctgactccatttccagcacttcacttacaggaagctccttccagatggaagttctccacccctcccacatacttccacagggtgggtctggttttctgctcacccttaacaagctgtggcaacggcaaatccaggtcaaggtaggtttgggacccccctactcacaaacacaagcaggagccatggtctgtgttcagcaagaaagcctggccatgctgcaaagtgagtgcattcatgtctcaagtggttagcaggtgggtgaccccttggggatggccagggagtctggcctgtggcctccatgaactctgaacacctctctccgtctcccactttgtcagaggctctgataagtacatcctggttatggcaggggaataaactaaaacatgtttaacttgaggccgggaaattatctgtctcaccctcctatgcccaaggagagcccagggcaggctactggggggattttcctggagattataccaaaatattcccttacacagcctctgaaaccatttgggtagggaggggcccgcgaccgtctatccttgtggcggtgacagatcagtagagtgaattgcaggagtcagtattgtcgagattgtaacttgaggtttagattcctgggtaacagaagcgagggcaaaggctcgcccacctccccggacacgaagaggggccaacttcctccaagaacggggccttcccgcgggccaggaactgtgacggccgccgccccctcaggccgagtgcagcagttccgcgggcatacgcgtccaggaaccagactcgggccgccccgtgcccaccgaccctccggaaacgaaccggatctcgcccggcctcatggaccccttcccccggctcctgttccggggctccggcgagcgcggccctcgccagactgcggcgggccgggctcctcacccgcgcgtccctgcccgccgaggtgcaacacgcgcggccgcgcagcgagggctgcacgctgcccggacgccggctgccggcggagtgccctcaccttactcgcggtggctttctggaggctgccattcggcggtgacgtgccccagcccacgtcaggggagcgcagaccagctgatcacccgcggaagggccggcgcgaaggaggcgcgagagccggcgggcgggcgggcgggctagcgccgggtcggccacgccctcgcccgtggcgggcgctggcgccgcggccccgcccacacgcaggccccgcccacactcccggacctggggttcgcggccgcagcgcctgcggcccagagcggggcctgcccttccacaccagtccgcattgcctctccctgcagcgagcggggaaaggacgcagtgctgctgagtgtcttcatttttgttcgtttttgtcgtcattcctcaaagaggaaaaagggctttgccgaataaaggggctactgtcccagggattttccggcttaatttaggagggctgagaagagagggacgtggccggctccggaagaacctcgacagggtcttcgaggctttggaacagggtctcaagctttagaaatgtccccaaaagtatgttcccagagagcttcaaaatccagctctccgctccgcttggatagtaaatagccccttcaaacttaacgtccaaacggaactcctggaactcccaatgcaccgaagcaaagcaaaaacgttctccaccagtcttctttgccatctcaatcaatggctactctattcttaagaggcaaaatttaggaatcctccctgcctcttctctttcacaccccacatctaatctgccagcaaaatcttgttggccctgcctccaaaatagacccctaatctggccgtgtcacaccacctccacctcctaccctctgatgtgcatcagagggttgtaccaccccacccgtgtggttacagcagccccccaaatatcccctcaccatcccgcacctgcacagtccagcctgaacaaagccgccagaccagtcctttgaagcgtgacaccaggtcacttctttgctcagcactttccattaatttctcgtttcacgcagcataaaagctccatttgatctacccccagccacatttcctcctgttctcaccttcctcactcttcttcagctgaaatggcctcctggctctccttgaaaaagcagggtacactcatgtcccagggcttttggacttgctcatcccccaaatattgaggctcccttcctcattttccttcaagtcttcgttcaagtatcacctaccctgaccatcctatttaaatttgtaaatcattccaatattcctaatccgccttaccctacttcattttttccatagcacttaccaccttttaacaggattcttttaatgtacttatgtgtactgtattcttccccctctcctgccaccacccacgcacacaacaaaaccatcagtgcagattgtttctgttttgtttaatgatgaacaatatctaacatgtcataagttctcattatatattttctgcagaaatgaatgtttcagaatgtgcactcctcaaaagcagggatggtggctctcttgttcattgttatttccctggtgcttagaacaacacctggcactaaatgaaagtgaccacatttttttaaaggtgaatggcacctcctcctgctttgaccttggtgtaaggcctaatatacctgtatcagctaggttctgctacctgcaagaactcaaagtcgttattgaataagcatttaggcaagccgaattagactgtgtagttaaagcatgaaaaaactaaagatgtgcttcctgggaaagcagcacacatctgttgcatttccccaaatttatgaagccaaaaacagagagattgtaaataaaatactggttccagcccacatctgaaagctggtgggaaaaatcaagttataagagaaaacgagataagagagagagagataagtgaaacttaagggggacaggtatttaataatcacattgcctaaaagaaaaggagttggctcagaatttacggcatccagcttcaggggagagagagaaataccttgcattccctgagctggatttgagttcctgtttgcaagataaaaaaaggaaccctttcccctcttgaagtttttttgtttgtttgttttttgagatggagttttgctctttttgcccagg

SEQ ID NO: 914196 - DNA, 4001 bp, Homo sapiens
agagtcctcactatatttgagccctgttaagactgcctagggtacataaaaatccctttatcatctctaccaacatcacatactactaactgtccattcagttgatggtaaattctcctaaaatcaggcctcttgatgtgaactaaggcaaagagttgagtttcaaaaacttcaataccatattcaataggccatgtcagacttctttttcaaacaattactaggacttctccagacactgtcatcttggtaaatagcaccttcaatgcattcatctgatcaaacccagaaacacctctccccatcatctctctgatctctcatgcaattccactttcttcaaaatatatctcattctcttctttccataaccactgcaacagctttaattggggggtgggtgggtatttttagctgataacatcttccactcttgccctctcctattctccatatagcaaaagccagtcatctcttaaaaatgaaaatctaatcatgttttaaaactttcaatggttcccaatacacttaaaatgaaatcagccataatatatcctttactccctgtatgatctgcctcaagtcttttctccaacctcttctgtcactaccccctttaactactatgttctagccacactagccttatttttgttccttcaacctgctaaaccctttcctaactcaggacctccaggtatttttctgtatgcctgtgatacctgttcactcttcaccttgctaagtcctactcatatttacttcatatcaatattaagagaagattccacatttgctttgctcacctggtacataactgatgcccaataacaagcagctgcttcagtttgttagccagtactagcacaaaaaattaaaaattcttaaaatgagggggagtaaaagttacacaaaggaacacaatcatatgcttaaatcaagaacctaagagtgtcgattttcttaaaaattatgttttaaaaaaactcaatgttttaaaaactatttctttgcaaaactgtaggaactctcaaaaaatctattaaaatgttaccatcaaaaaaagagactggaatgaagcaagaataaaacattgtcacaagtgattgcccaagagcgtaatgaaaacccttgaaatcatttttctcttcactaccttttgttttacaaaacgatgaggatgaggctgaatcaaaattttaactgcaaacagtttacgactcggaaatacacattttagttacttctggtcaaaatgagaaaaaaacttgcatggctggccatccgaaatattataccatgtttgggttaaatttaaattccatttaaaaggaaataaagagcaggggataggggctgtgaacactaaagccactggaaagtcggaaaaaagggaacattacctgctccctttaatgtatggtacagacattttcccaccccagaacgccggacactgaacaatgccggacggattctctagcagaaattccacgcaatcagttcgataagccagggtctctctctatcactgagctcacatcccgcctctgccctcaacagcttcatcgtcagcactgaagtctccggcccactctcagcgtcgtcccctgatccactcctcaatcctgggattcgcattgagtacatcacttcatttctagagtcccttctgagaaatcgcttccacgagcgcaatttgcaaacagccacgggcagggcgggaggaaaaaaaatgggctgaatgcctggcttacctggggttgcaccgtgctcgacaaggaaaacatctccggcgggccctcagcgacctcacccgcctgccgaaactgtgcccctctgtccacggcccggcggggaggcgctgagcccttcttttttcctttttctccgacccgttgcccctcactcctcccagaaacggaaaatggcctccccttcctacagctactgcaacgacagacaatccgccccggaaggcgaggcgctaactcaacagtacttccggggcaagtgagcgcccacaaggccaagtgcctgcgcgttctttcccgcggaagtagttgacatttacaaggagcagcgcccccaaaggtctttagctgttttttaaggggagaacagcctttaccctctttggactttttcttcgttttttttttttttggagacggagtttcgttctttcgcccaggctggcgtacagtggcgcgatctcggctcactgcaacctctgctccccgggttcaagcgattctcctgcctcagcctcccgagtagctgggattacaggtgcccgccaccacgcccggctgatttcctcttaagactttctacagcttccttatgaaatcttctgactgggccttgagcaataaggtcttttgctacaatttagtgctcttttcctcacactaaatcgaaaactctccctgttggtcctgatctgtttcagtcaggcaaattacatcctgggaaaacgtcagatgacaggggaggccactcgcttcctgctcatccagtttcgacactttctgtgctttcattagcttccagacctcagccctggccctcgctttactgtacagtcagaactggtttctacgcctcgcgagggtgggaggtcgtgtatgggaggaggaccgcttcccaccagcctcgttgggaagccaggagaaatctcttcaaatcctgcgattcagagtcaagtcccagtcgtcctttttctggtcggcccagaactgtttgtgcctcctccctcatgaggaatgatgtcagtggggccgcggtcgccgcccacgaagagtgtaaggctgcgaagtcggggctttcccgacgccccctccgtccgcgtctgcgtaggggaggtgacgagggcggggcgcggcggcggggtgacgtcacggccgcgcgcggcgtgggcggagcctcactttgaacccagttggcgggagtggctgctcgcggaggggcagtgtctgcggggccgctgtatgctgtccagcgatggatcccaccgcgggaagcaagaaggagcctggaggaggcgcggcgactgaggagggcgtgaataggatcgcagtgccaaaaccgccctccattgaggaattcagcatagtgaagcccattagccggggcgccttcgggaaagtgtatctggggcagaaaggcggcaaattgtatgcagtaaaggtaggaagtcaacgagtagcaaggaaggggttaggcccttcggccctccttcctgccccaccggcttgggcaggccccggggttgctggagcgaggagtctgggtggcctggcttgctgaagcctccagagccctgcgagctgacttctttttggggcgacatcagcggtcgggtcgggtgtctcgcctctgttccgcccttccctccatatctcagatgcccagtgagaacagcaaagtttgactctcttctccctgcccagcgttagcaaatgaggaaactgaggccaaaggcaaagggacttgaccgaggtgattacatcggtcttagtacaacaggcacttaaagccaaagccgtgattcgtagtctcaccctggcttgagttaggtttcttttttatttttttttgaggcggagtcttgctctgtttcccaggctggagtgcagtggcgcaatctcgactcactgcaagctccgccccccgggttcacgccattcccctgcctcggcctcccgacgagctgggactacaagcgcccgtcaccacgcccggctgattttttgtatttttagtagagacggggtttctttagtagagacggggtttcaccgtgttagccaggatggtctcgattccctgacctcgtattccgcccgcctcggcctcccaaagtgctgggattactggcgtgagccaccgcgcccggcgagttaggtttctaaatccaaaaggtttttagtaattagtggttttgtttaccttgtttgctttgacgtgcagaatcgtcgaaatttttctaccacaga

SEQ ID NO: 914197 - DNA, 4001 bp, Homo sapiens
taagagaacaaacaactgaaaagacgcatgcaccaaagaaacaccccacaaacggtcctccagtcactggtcacctgaagccaattccctgaagaggcagaaaagtctcttacaagaaagaaagatccccagccaagaaccattcctcacgtggagagaatgctttacagtttacaaagagctttggcatagaaatgcttttgcctgacaccaaagggtgcactttcagactcatcttcctcctctgcacccagccccctcccacgcctgttctacccacccaggtcaacaggtcagcctgggtagtgttggccttgggccagcattttatatgtccatgcctcccctagtaaataatggcagagttgaactcaagggcgaccctctgcctccctctcttacccccagcacacccttgcgtacataggctttcctccccaacccattcaggactctgactctcctaaaactcaccggtgtgcccaggtctggaaggaaagtgacccccatgtgtgtcctcccccgaacacacctcttgcatctttgcagagaaaacccccacaaggggaggaagtgaaggccacagatgggtgtctgaaattcccaaatgaggcaggagtaaatggagggaggggaggagtccagcccacggaaaggagtggtatctgggcaggccctggagactcttcaaaaagggctgggaggtggtggcgatctgtgtatttatcttgctggcaaagaggcgctgcccagtcaactttgtaactgaatccaccaaacaggcagactttgcaacacagccggcccaggtttctgcagaaggcgctgggcagctggaacctctccccccccctttctagcccccctcccaagagctcaagaggatttccctttcatttccttcgaggctgggagggctggggacagcgcagtctgtggggtcaagccctcagaaaccacttcctatgtggctgggggagggcgagcagctggaggacgtatctggggtccccgagtgagaacagcaggagaagccctctgggcagtcactgctctccagggtgcctttcgggtcgggaaccgcagaggtcggagaaaagattttaggcccttccagaggagctccgagcagaatctgcactctcggtcccagcccgcggtggccaggacgaggataaggttgggcgtgagaaggacacttcgaaggggctccccgcccaggccgcaccccagctgtctgaagaaaatccggagacaacccctcctcaactccctcccccaacccctttggagcagggctgccctggcagggagagggggcgggagagctccgccccggcctgcattgctccagcccgggctcagccgggaggtgacgcgcacccggcaccccggggacttcgggcggcgagtttggcagagttgaacgaagccaagccaagccgggcccggcaatgcggagccgggccgcgccaggccaggaagagcgggtcagacagggaacggcccgccacggtggggcggtggggcggtggggcggtgggcgggggcgcgcgggggcacccacctctccgcgctgcagctggaagaagctgttgagatagctggagtgcaggggcgagcccagctgctcggggcggcccttgccgaaggccagctccgggggtgcggcgccggcggtcggctcgggccggaaggcatcgaaggcgctagcctggtgcgtgtcctgcagcgacaggtagacccagttgagcagctgggcgggctggtacaccgaggcggcgctcgtgtcgatggccgacagcaggctcattttgtggcggcggtgccggcccctccccggccgcccgctcgcggcccccctccgcagcggaggggcgggcaccggggagcctgtgcccactgcccgcctcccgagccccgacggtgatcgccccgcgccctgcgccccgcgcgctgcccgcagccgctgccgctgccgccgcctccccccgactgcggccccggcgcgcgcaggcggtggaaggaggcagcgaaagttgggcaggaaacttttggccccgcccctccgccccgcccactgcgtcccgccccgcccggcgatccgctatctgcctcgcggctgacccctccagcggcggctccgggggtggggtccacgatgccccgccgcccactccctgccccgcctggcactgtcctcgccctgcattggctgtctcgttgaatatgaaccgtcaggggtggggagagaggggagtgaggctcatctgcatatgcagcacggcgcgggcccgcccatgcgaggccccgcccaagccccacctcgtcccagcccggccaacccagctccccgagctgccgggagctcagtgcagccccggcctaatcaatttcgtctccctctgtcgtcagcgctcttgtctcgttctttccaaatcctctgcaattgtttttcactcacttttcctttcctattttccctcctttctcatactccttctttctctctctcttagactagtactagtctcctgtgtccgtcgtccttgtatgtggcgccctccgtgtgtgtgtgtgtgtgtgtgtgtgtgtgtatgtccttctctttctctcactcttcttgtctcctttcttctatttccgtctggtctgatgtttctccctgtctctcccgctcctctctcagacgcgtgtacacagacgcacacacttctaactccctcctctcgctatcaccatcggaccctccccctcctacttaattccttccatctgcagaatcactttgcgggccggctgcgccaaggggggcccgggttcctgccccaggaaagactccccgccccctccccccccccttctcctatttctgctctgggcccgcctcgcttctcgaccctcttcctccaccccggctccagccctagcccgccccggtgccttggcgagtcgccaggacaccagcctgggccgggggagctcgggaaagcggctgtcacccatctcgctgggacaactcagctagtccaagactgcctggagggagccccgcccccgcctccgcctccgcctgacgccccaggaagccccggggccttcaccgtctctttctccgggtggtctttgctgcgccagcaccggggacctagcccagaggaactcaccgcctggctgggaccgagtcacctctcccactttcagtctggctctggagccattccgcccagcgttggagtgccagcttggccaccgtccagcggaatgacctctgcatgacgcctaacctctgcgagcaagcctgttttctcctctgtaaaatgggagcagtcatcctcccgccgccggggacatttgtgtgcttcccagcttgggtttggtaagcggaagatattccataaaggacagctcttccccgccacccactccacgagttactcacatcacctgcagggcacctaaccacatctatggtcgctcgcaccacgaaggccttcagtgatgaccaaatgccaccctttttcaccaaccaagaggcccttggatctcagatctccatcttgtctatcaatttgcagttattaatacaaacgacagcatatgtatcaatcatgtcttcatattttcattcatcaagaacacatctatacagtaccctttatatttttaaacagtattaaacctatttgtttaaagagtaggtacacggttcttgcaaatggctcacctgtaatcccagcactttgggaggccaaggcagacagactgcttgagcccaggagttccagacaagccctggaaacatggcaaaacctcatctctacaaaaaaatgcaaaaattagccgggcgtagtggcgcatgcctgtggtcccagttactcaggaggctgaggtggaaggatcacttgagcccaggaggtggaagctgcagtgagtcgagatcatgccactgcactccagcctgggcaacagagtgaaactttgtaccccccgcccccaca

SEQ ID NO: 914198 - DNA, 4001 bp, Homo sapiens
aagtcgtttttgaaaacaagcccaaccagaaatcagcccaaccgtgtaaacagaaagctcctagacgcacagatacagatttgggtgaacaaagtctgaggctagggcctctctccattagctaatggggtatgggatgccaggaaaattacatatgtagtaagtgggccgcaactgaacacacagacttttctttttttttttttttgagatggagtttcactcttgttgcccaggctggagtgcaatggcacaatctgggctcaccacaacctccgcctcctgggttcaagcaattctcctgcctcagcctcctgagtggctgggattccaggcatgtgccaccacgcctggctaattttgtatttttttagtagagaccgggtttctccatgttggtcaggctggtctcaaactcccgacctcaggtgatgtgcttgcctcagcctcccaaagtgctgggattgcaggcgtgagccaccgcacctggcccagacttttcatctcaagaaatagaagtaaagcaaaattcaaaaagatgtgtgtaggggagaaggggctaatctcagtgaacgggaggaaacagagcaaagcgcagctttactaccaccccaagcacaagcccgagtactctgatccttcagtaatagtcacaggccatactggtcatctgccaccagactggaggagattgctggccacaacactcccctcttcccatggctttaagtcacatctgtttcccaatgggaaagtcgactgaggggacagggaaggacagacggcaaagccatcagaagtcaggtgaactgagatcaaagtcgtggcgaatgtcatctggacaaagacgctgctctcaggatgtttgcaatctcaagtaggagatacccaacatcaataaagagtagcattttattcatgtgcagacctcccttctgggctaacacgctgagaagaaaaagagtaacaactttattttggggctgcttatcttttgatgacgggcccacacaaccagagttcggctttttcaaccagagaaagcttactgaagtggggatgaggggccgcgaagaggatcggaccgcaggactggaagctgcagtttaaaaaaccgggaaaaggccggaggcagtggctcatgcctgtactccctgcactttggaaggccgaggcgggcggatcaagagatcaagaccatcctggctaacatggtgaaaccccgtcactactaaaactacaaaaattagctgggcgtggtggcgcgcgcctgtaagtcccagctgcgcgggaggctgaggcaggagaatcgcttgatgccgggaggcggaggttgcagtgaacagagatcgctccactgcactccagcctggcgacagagcgagactcctcaaaaacaaaacaaaaaaaccgggaaaaggttttatttctcaatgacagccgcgaggtgaaactgcgatggactggaagtcaaaaaccgtgggttccagtttgggctctatcttaactatcttgatcattttggacaagtcaaaccctgtctctgaatctgaggttccatatctgtgaaacagacgagttgggtcgcttgacctccttccctcctgctctgagcgtaacgattgctcggaaggtgcgctcgggctgaggagggcacggccccgcagggcggggcgaggagagagcaggaacccgcactcaagacaaggccccagggcagtgccctacccagaaaaagggactaggatggggagcaagggccgaggcttcgcccttacctgccgcctgccgactccccagtcagccaaaccgagccccgtagcctctgccgccgctcactgccaccccctccgactcggcgccccggccgggcccggctcaatccaaaccaccatggcccgccgcccgcagcgccaggcagcggacccggacccgccgccagcccatcctcaaccacacgcgcaggcgccagcgtggacctctgaagttccgcccccggatttgtcccggggtaacctgggaaatggagtttactcgcaaggataaagagtaccaattgacacgtgtcttactgcggaactgtgcctgggtttggccaatgagaaatcgacttcgttttcatcctggttttgggacagcggcaatcatggcgccacctgtgagatactgcatccccggtaagtgagcgcttcccgtacagagtcctggataggggctgaagcaagaaggctaaacggcctacagcttctgggggcccgtgaccgatgcagcattttttctgcaggcgaacgtctgtgtaacttggaggagggcagcccgggcagcggcacctacacccgccacggctacatcttttcgtcgcttgccggctgtctgatgaagagcagcgagaatggcgcggtaaaggaagcggcatgccatctcccctctgtttttcccttaggctgcccttgagttccagtccttaggcatgggcactgcggacgcgtctttagtgcctcagtggtacaatgttggtctcttagtttcttctagccgtatcgccgctgtggtgcacttagccaccacacactagttgtgttgatctcgcttggttgtgctgctgaccctcggggagggaagttgggacaaaagcagatgcgaactcagtatcccatcccagcccagctcagcccagcagtgagttgcatactgtatgaatgttgcttacctttccgactttatctagcgccactatctccacctcactgacgcaatctagtcatactgtcttttctgtgtttaaaagttataatcacagtctctgcttgccctttaaaaattttttataacatactagcttctttcagtgtcggtaatgcgccaagctttctcctgctacagagcctttgtaacatgccatctatctggaacgcttctatcttcctaggcctatttaattcctacctcctttagatagcttctctactatcacctcagagaagtccttctggacccactaattgaggaaaggagttttgtggggtgttttgtttttgtttgttttgttaaagactcacaaaaaactctgttccttttcttccaagcactatgtcagcatatgatgagacactcaggtatatgtttcctactagacttctcccctgcttaaatctaagtccgtgaaagcaggccctaccaccataccatccgtatatagcacaaggcagctcctcaataaatgttgaatgtgtgagtaatacctacctttctagtttcagagatagatccaggattagctcaggatcatataagcaatatttgaaggagcacaatagaaagaggattcagaattagaacagttacgttctggctaacttgactttgattctgctttgagtaagtaacttaagctgtctgattcaaggggctttctattcagtcattgttgggaatgttcttaacagtcctgagtttgttcatttcatagatatcacttgagtattttcatgtgtcaggcacagcgctgacttggtttctgctatcaaaggacacagacacaaattgtaaacaaataaatgctcaaatgagcatatggttacatatgtggtggtgctttgaaagaatattacagggcaccttgagaacatgtaacaggcaaacccatcctagtcagcagaagtgacatttaagctgaatcatctaaagagtaggtaagagtcaggtgggtggagagagtgcagctctggcagaaagaataggttgaagagagatctgaaagtgggaagaatttagtaagttggggaaactgaaagaaggccaggagagctgaagcattgtgagcaacggagagattgataaaagatgaggctcaaaatatctgtcttataccaacagccaataccatgctcaaagagaaaactctgcaagtattcacttaaaatagaagaaaacaagcatagccgctattatgtaacatttttgtggaaatttcagcctgtgcaataaaataagaaacagaa

SEQ ID NO: 914199 - DNA, 4001 bp, Homo sapiens
ccccacctccatcttttttttaatgcagagcaaatattcaataaaattgctttggaaaatgctattttggatcaatgtgttcaaacagatatgaaataaagtctccgagcctaaatgatcagtgattagagtaatatacttagtctctgtgaggacaaacagtaggctgtgtttggtattattggttagtagataaggcaaaaaccaaatatacgattatcattaaagttcattgtcttacagaatctttcttaccggtttccaccccagagggacaaagcccggaccgacaaacatggcattgaagtaattataaagaatcatgacagtccaatttatcaacatgatgaaattcacacttcctccagttgtatgtaagggccaataccacaacacagagtcaatcatggccatggtagaacatattgctataacaccaagggctatgatgggaccccagtgacacagtctctttaattcttgtagattttcaaacttgataaccgaacagaatgtacccattttggcaaggaagaatgccttcctactttaaaagaattatagatttcctttttctgtgcgcacatttccatgtgccacaagtccatgtgtgttctttaattgtcatgccttcaagctgtgaactgttaacgcagattacaccattttcactgtcaggcacccaaagctctttatcttaactaggagaatccagtgtcttggtctgaaacccaacctaaagaaaacaaaatgggaaagttcagttaaaacaaaacaaaacaaaacctttattgcataccatacttgttaactacaataaacacctacacaacagcatctcacaagtgcactacactttgggatgcatatcttgtcaaatgtcaaaaagaactacttttgacttatccaaaatatggtacaagtttgaatggcatgcaaactggatacacgattccaaaatagttttttttattccttctccgcttgtcaggggactgtcaccatccaacgcttagtgaatagtttgagaagacaaagaattttaggaccttagagttgatctaattcagtttccttcttcatagaacagaaattgtcttagagaggctgagtgattagaccaaggtcacaagtaacaggtgaaccagaatagaaggcaagtcaacgacctccctttatgaaattctaagctgcctcttatgaagtcttgaattaagccaagtatgagtcagacatggtctatgccatttgcctgcagtctcctccaccccgccacccaaacatcaagagaacagtcaatttggcccaaaagtaaaggagcgacagtgaaagcaaagagagcatgcaaggaaaggaagggaggagatagagcgagagtgtgtgtggtgtgtgtgaaattatgaccagaagagtatatgagaagaacctgaattagaagattcgagggaagaaagaagaggaagtgcctccaggagcgagggaaatggaaggcagggcggcgagctccggagagatttgtggaagggcatctctgcctggactggatctgaagatctggaagaggatctgagctacatggataatacagactaccacgcagcagacgctgttgacttgtgcctcagtttcccgcccgagtcatggagcagagggcttagaaataaatcctcacccaaggaagaaatatcctggtaagccaggttggtctcaacattcaggagagcctgctcccactctggtgggacaaagaccaccaaaatcgtgcttatattccctgccttgactcccacctcagtgtggtccctggtgtctgctcctcagccatcgcatatccggggcggcctgggctcacccggaacagattttttcctccttggatgactccgtcatggacacctcagcccaggacaagcagagagcaaaccctggcagcgagaggctggagtgcgggacctgctacaagccgagcacctctcggccagcgccctcgccaggactctcccgctcaggccccctgcgcagtctctgttactgtcacttccggaggttcgccgcctcaaacctccctccggaagcaagctgctgtgccttgtagcgtgtggatccggagccgattcccagaacacgaaggggggaaaaaacgcttctaatgatccctcagaacttgcatattttcatacgcttttctggggggaggcactaattggggcgcttttcctttgcgaacttacttatcttaaagtcggagcggaaaataaagcacgcacgcaacccaatttccggagaaccgagattgcgacgaacaaccaggaagcggctgggttgagagctgtccccggttctccgttctgctctcgggggcaccttccggggttcctaagccgcggggcccctcgctgcccctcgaggccctttccctgacctaggctttggcctgggctactcgttccggagccgccatgtcgtccgacttcgaaggttacgagcaggacttcgcggtgctcactgcagagatcaccagcaagattgcgagggtcccacgactcccgcctggtgagagccttgcccggctggacgagggtgctggggagagctgggagggtgcgggcggtggaacgccgcccgagtaagtgtgtctatgaggcgcgaggctggagtgggtggtgccggctgttcccaggagggatacggcttggcttggttgagggtaaggagtcaagttcgggtgtggggtgccgtgaaaagagccttcggaatctgagccatctgagttcgaatcccggctctaccttcttgtaacttgcataacctggaaacgtttcttaacgtcttaagagtcttaatgttttcatttgtaaattatagacatgtgagtattcaaagaaaatgaatgaaagtatgtagcctatggatctacaatctacagcggcgttgttgtgttagtaataatattgttataattatatgcggcaaaatagaggtaagaatcagggtgcctagattcaaatcctacctctgtcacttagaagttgtgcctcttaacccgggaggcggaggttgcagtgagccaagatctcgccattgcactccagcctaggcaacaagagtgaaactccgtctcaaataaataaataaaataaaagttgtgcctcttaaacagacttcttagtctctttcaactttccttcttagtaaatgggggaaaattgtacttctctcatggggttgttaggtagattaaatttatataacatatttaaagtcacttttggtgttgttagttgctgtattagcattagtatttttcataccccccacccccatttcttgtttctcatccttcttggggatttattgtataacccagtttcatgtaaaacttggtacaagataatttttcacacttaaaaatttcacatctcccatctggaaatgtttttgtttttgtgtttccttttgtgttttagcacatcttattttctatgctagactgtcaactatgtgaaggtgggagctgtgtctgatttccttggcgtttacttattaggggctcaggaaaataagtgaatgagcaggtgaatataaatatgatcttttgtaactatggtttgtacaatgttgattcggggactatctttctctacagattagagtagttagttacagaaaagggttttacatttttgtttagttttgttagggaaattgaaccatcatctggctgctagacttgtccctaccctagctccaggatataaagtgtagaaaggtggatgtgctcattaatctgcggattggtgggcacttcacttgcccacttgtcctggtactagcaataatttctcccggacctaagttgtcattcctctttccctttccctacttcccccaaaacttatgtgtttataagtaattttcttcccttatttctttgtttttcttcccctcacctattttctgttaatagggatatttgcttgaagccaggatctctgaactta

SEQ ID NO: 914200 - DNA, 4001 bp, Homo sapiens
taaaacaagaatgaattaacagcaatctcaattagagacttaaataactcaaatttataaaattattcaagttaaaacagtcctgcttctttctagtttcggcaaactagaaaatgcttatgcctaatttaaccaaggctagttttaagtaacaataagactcagaattatactgaaggtcccaatcagcacagtcgatagagagacttatgatgctaccacaccaataatcatttttgttagcatcctctactggtggtttccaatgacagcaaggggaaatggtgctgatgacagaaggatatgtaccttctattccatctaaagagaattaatcagcatgtggtcattagtagagtacatctctctctcaaaaaaaaaaaaggtagaacaagaagaaaaccacatagaagaaagcagaaaaagaaaaagacagattttttaaaatgcaacaaagcatgaaattataaatggtaaaaactaattcaagcaattctaatgtcactcctttacggatgactaacatcattaagttaccacacaaggtttgatgctttggccaaaccttactcaattggtttacccctgtcagttacattacctgatactccttttaatatcctaccttcagacatattccagaaaggaaattaaaatattttacagaaggcttagcagcaaaatccacgtatcttatttcaaaatgaataaaacattatttacatatataacaacataaactatctctacgacaatcttccactgtatatatcacatatttcttcattaaaaagatttgagagttaacgttttgccaggcaattttctccaataaacatctgcaacttaaatatgactgcactgctaagaaatattaaccagcacatatactgaggtttcacaacacaatggaatataacttcatttttaatttgcaaaatataaggctaaatcaaatagcatggctataatcaccagcaatggatgaaatgcatttgagaacaaaaagaaatacaaggacagagccaaaagtgatgaaaatggaagatacctgtagtagtacagtgctatcttaaacaccttttgttttctgagagtaatgcatactgcagacaagacgttttgtgctaaacagacgcaaatctgtttttctaatattaaacacaaaggaaaaacactgacagcaagcgtggtaaataaatccctcccttgagaatgaaagcagcagacaggagggggctgacatacatgcaggagaaaactaaacaccatctttttttctacctgcacaagttgccatttgctgcagcgatcaagaacctctctttcctgttgatttcaagtatctttcaggatcgcttttccccccttaagtcatctgttgatatgccttacgagtgtaatattcatatcacaggatctcaaggagaaaaatccattctttcctgttcaggtaaacatgtttacagcagctgcacagacgctgggtggttcagactcacatgtcacacacatgtcgtcagcaacaagaaaagcccctttctctggcgatcaacattttaaataaggtaaaaagcgaacagctctttccgaaccaacttacctttcataaagccacatcagcaacagcggcaacagctcaatatggaacacacactatttgacgctaaaacaggaaattaaaattgcaatagcctatgctccactccttgctataacaagtcatctctccacaatgagaataccaaaatacctttcgtttataatcaacagacgtctttaaaatgcaagtgtttatttgaataattaaaatcacgaaagcagtgattttaatgatggctcgaatatattaaaaatataattatggattggaaggaaacatcttgaaacagcttaaaaatcttcgtatctgcttctagacaggaaatcccacacaaaatctaaaattgccaggaaaggttacaaaacctcgcgtttcgcatcccagaggggagggagaaagggagcccaggcgcggggggtggggctgggggagcacgagagagttttctcctaaacacgtatttcctcgttttctcgacgctgcagcggtcccattatagacgcatttattgcccctctcttaaaagtcgttttaaaaataacgcaggaaccaaagcgagcccctcggtccgaaatgtacgtgtaattccttatatagcctgggctgcggccggcggcagggccgttgccgcccattattatacaaacaggtaccggggcggcgcaggcgggggctgctctccctgcgctcccgccgcccccgggcggacaagtctcgcccctctcgccacaggaactgtccagacaataacaatcagcagacatttcgctgctgcacgagagggagagaaagcatagcatcgccccgagataaccagaaatacaatcaacttacaacgtctctccaaactggaaaaggcgactgtgcaaccaccaccacatgttcaggtctcgatccctcgggctgtctctctttttttttaactctcacgccaggcagaggggtgtgtgtttcccttggcacagcagcacaaatcaataaacactgcagctgcggtgcaagtagcagccccgcgcgtccgtcggtccgtccgccccctcccccaccctccttccacccgagacccagagcgccatccaagccccattatccggcttcagcgctccgtgcgtccggcccaggtaacaacttccccaaaaaccgaaagagaaaagcgcgaggcgcacgcacaccggcccatcccggcgcagagacctcgtctgccccgggagggggatctgtctgtggtgcttcccggtctctaagcccaggtaacaactccgcaaacacacccgccgcccagctcgcccccatccgcgcggctcccggcggcgttaagtgggtacctttcctgccttgttccccgcgccgccccgccgcgccccgccaaacgtggaccccactcgcggggctcgccgcggagtccccaggccggggctctgggccgggcagcgggaggcgccagggaggaggggcgcttagggacccgcgcccccgcgcctctaatccccgttacgcgagcgcgcccggcccgcgggtcccaactttaccgccgccggccgaaccctgtccgcccgcggcgcgcacagccggcgcccgcgcacacgcgcgcacaaaccccacgcaacccgcggccgccccgtcccgccgccgccgcagcccgcctgccgcgcgcccacagcccggcccgagtcgcggggcccgagcgacagcgacggcgccggccggggccgcggcgcgcggaagccactttgcacggtcagcgccgggcacaagtttgttccgcggctcccgggggcctgggcgctgagggagaatcgcgctgagggggccaggaggagggggagagggaggcgccgaagggcacaagagtggggaaaagtgcggaaagaagcaacagccgctccacccgggaccagaaaagtggccagtgcgtcccggccgcccgccctgcgccggggatgcggcggcgtcggcgccggctaacggtccagggaggcggcaggggcggcgggagccgctaggcggagagagaccaggtaagagacataacggttcagggagagcgagcggccgcggcgcggctccggcagcggcggcagcggaggggggcagagagcactactttctactttcccactccactttgccgtccctgccccggctgcccccagcccggctcgcccccctcacccccgggggcgccccggctgcccagctccccctgactccgccgctccccggtcccctccgccactcaccgttattgcgccgcgggttcgcctgctttctgcgcttacacctggggccatccgccatgatcctctcgcttgtgtctaaatgctcgagtcacctcctccccctccctcccccttcccccccacccctccgcctccacccctcccccctccccaccgca

SEQ ID NO: 914201 - DNA, 4001 bp, Homo sapiens
aaaacctcgcgtttcgcatcccagaggggagggagaaagggagcccaggcgcggggggtggggctgggggagcacgagagagttttctcctaaacacgtatttcctcgttttctcgacgctgcagcggtcccattatagacgcatttattgcccctctcttaaaagtcgttttaaaaataacgcaggaaccaaagcgagcccctcggtccgaaatgtacgtgtaattccttatatagcctgggctgcggccggcggcagggccgttgccgcccattattatacaaacaggtaccggggcggcgcaggcgggggctgctctccctgcgctcccgccgcccccgggcggacaagtctcgcccctctcgccacaggaactgtccagacaataacaatcagcagacatttcgctgctgcacgagagggagagaaagcatagcatcgccccgagataaccagaaatacaatcaacttacaacgtctctccaaactggaaaaggcgactgtgcaaccaccaccacatgttcaggtctcgatccctcgggctgtctctctttttttttaactctcacgccaggcagaggggtgtgtgtttcccttggcacagcagcacaaatcaataaacactgcagctgcggtgcaagtagcagccccgcgcgtccgtcggtccgtccgccccctcccccaccctccttccacccgagacccagagcgccatccaagccccattatccggcttcagcgctccgtgcgtccggcccaggtaacaacttccccaaaaaccgaaagagaaaagcgcgaggcgcacgcacaccggcccatcccggcgcagagacctcgtctgccccgggagggggatctgtctgtggtgcttcccggtctctaagcccaggtaacaactccgcaaacacacccgccgcccagctcgcccccatccgcgcggctcccggcggcgttaagtgggtacctttcctgccttgttccccgcgccgccccgccgcgccccgccaaacgtggaccccactcgcggggctcgccgcggagtccccaggccggggctctgggccgggcagcgggaggcgccagggaggaggggcgcttagggacccgcgcccccgcgcctctaatccccgttacgcgagcgcgcccggcccgcgggtcccaactttaccgccgccggccgaaccctgtccgcccgcggcgcgcacagccggcgcccgcgcacacgcgcgcacaaaccccacgcaacccgcggccgccccgtcccgccgccgccgcagcccgcctgccgcgcgcccacagcccggcccgagtcgcggggcccgagcgacagcgacggcgccggccggggccgcggcgcgcggaagccactttgcacggtcagcgccgggcacaagtttgttccgcggctcccgggggcctgggcgctgagggagaatcgcgctgagggggccaggaggagggggagagggaggcgccgaagggcacaagagtggggaaaagtgcggaaagaagcaacagccgctccacccgggaccagaaaagtggccagtgcgtcccggccgcccgccctgcgccggggatgcggcggcgtcggcgccggctaacggtccagggaggcggcaggggcggcgggagccgctaggcggagagagaccaggtaagagacataacggttcagggagagcgagcggccgcggcgcggctccggcagcggcggcagcggaggggggcagagagcactactttctactttcccactccactttgccgtccctgccccggctgcccccagcccggctcgcccccctcacccccgggggcgccccggctgcccagctccccctgactccgccgctccccggtcccctccgccactcaccgttattgcgccgcgggttcgcctgctttctgcgcttacacctggggccatccgccatgatcctctcgcttgtgtctaaatgctcgagtcacctcctccccctccctcccccttcccccccacccctccgcctccacccctcccccctccccaccgcacctggtttacgacactcccggctttacgacatcaccttccttacacctagaggctctcgctctacggccggaaccttgttgctagggaccgggcggtttgcggcaaccgtgggcactgctgaatttgaattgaggggcgagggaaaagttttcctcaggtgtggtggggagagggaggcggatgccgggaaaccgtagggacgcggtcagaaaggcgacgggctgtcggagttggaaaggtaaagttggaggctcggcggcgtcctgcctccgcgctggccacacccgccgcggctgcccggggcagggagggatctggctgattctccctgtaccctgtgccctcggagctgcccctccgagcgcccagaggtccccgcctgcctgcttcctggaggcagggctaccatcagtcccacgcctcgcgtgtccgccccccgcaccccggggccaaggaaagggatcgcggtctggactccccggggagttcccttgatgaggggaagggcaggtttggggacggcgaggacacgcggcgaccggagagaggctacctgacccgcgcagcccggactcccttcccttcccttccagggacgcctggtttccccccaagcgaaccgggatgggaagtgacttcaatgagattgaacttcagctggattgaaagagaggctagaagttccgcttgccagcagcctccttagtagagcggaatgagtaatacccacacggtgcttgtctcacttccccatccgcacccggccctcacctgctgtcacctcggcctcccacacccggtccgcgctccccgccctcttcctcgcgtagaaccgtgggatcctaggtggcaggactcagagctaaggtatccacaggccatgaattccttcctaaatgagcggtcatcgccgtgcaggaccttaaggcaagaagcatcggctgacagatgtgatctctgaacctgatagattgctgattttatcttattttatccttgacttggtacaagttttgggatttctgaaaagaccatacagataaccacaaatatcaagaaagtcgtcttcagtattaagtagaatttagatttaggtttccttcctgcttcccacctccttcgaataaggaaacgtctttgggaccaactttatggaataaataagctgagctgtatttcaagtaatatagttataaattaacaatgtagcagttattgatagagaaattgagaaaactgaaacgtgaccggagtattggaaataacgtagtacatcacctagcacaatgacacatagtaggtgctcaataaatttatgcttataatttttgtcacttctatggcaggatttttttattaggttaaaattatcttttaaacaccttccggaattttagaatattcattaataatgtcttcaaacctttcaactgaaataaatttacagctgaagtctgatgatttaaagttagaaagtttaatcttgaatataaatgaacattttctctcccacattttcttgggcattttgagaagtaaatgcgttatttattggtccatgaaatgtgactgtaaatattctttgctatacattatgtctatatatctgcattcatcctcaatgccaaaactagaatcattagtcttaatgatcattttaagtacaggcagtcctcgctttccttgataccatgttaaccgaaacttgtgtatgtcaacacggtgtccttgctttgcttggttaagtgtgagttcttcctccctttttttaagagttgtacaatgtttttcagtcgcctaccgaatcaggtcatagactatggaattgaccccaccccaccaacatttttacagctaccctgatttctgaccagaaaggaaaaaaaaactttccagctctatcacacattttacctactcttaaacttaggaggtattacaaatagcattttctcatgttct

SEQ ID NO: 914202 - DNA, 4001 bp, Homo sapiens
aaagccaaaatagacaaatgggatctaattaaactaaagagcttctgcacagcaaaagaaactaccatcagagtgaacaggcaacctacagaatgggaaaaaaattttgcaatctacccatctgacagagggctaatatccagaatctacaaagaacttagacaaattttcaagaaaaaaacaaccgcatcaaaaagtgggcaaaggatatgaacagacagttctcaaaagaagatatttatgcagccaacagacacatgaaaaaacactcatcatcactggtcatcagaaaaatgcaaatcaaaaccacagtgagataccatctcacaccagttagaatggcgatcattagaaagttaggaaacaacagatgctggagaggatgtgtagaaataggaacacttttacactgttggtgggactgtaaattagttcaaccgttgtggaaaacagtgtggcaattcctcaaggatctagaactagaaataccatttgacccagcgatcccattactgggtatatacccaaaggattataaatcatgccactataaagacacatgcacacgtatgtttactgtggcacaattcacaacagcaaagacttggaaccaacccaaatgtccatcagtgatagagtggattaagaatatgtggcacatatacaccatggaatactatgcagccataaaaaaaggatgagttcatgtcctttgcatggacatggatgaagctggaaaccatcattctcagcaaactgtcacaaggacagaaaaccaaacaccgccatgttctcactcatagatgggaactcaacaatgagaacacttggacacagggaggggaacatcacacactggggcctgtcgtggggagtgagatggggggagggatagcattaagagaaatacgcaatataaatgacgagttagtcggtgcagaaaaccaacatggcacatgtatagctatgtaccaaacctgcacgttgtgcacatgtaccctagaacttaaaaaaaaaaaaaaaatcaattcccaaagcatttctctcatttcttctgaaaagtttctaaaaacacaactccaaggatgaaatggaagttaaaggtaaacaggcaatagcgctgaatacgtaatttcagtaactcagaattttctccaacctctgctctaaagaagcttagctacagaagagcagttacctttgaaacattttccccaacataaagatatccggaatgtgaagctgccattaaaactgtgacacagatctacatttactgatacatcaaaacatccctaaagttcgaaatacgagctacagaatcacatcaaccgcctaacttgtctgtagcctaaactctagtccggagttcatctgcaagcggaattgggaagtatttcagagccagcatctcctcgcgccatccaggtacctacacacttgaggccaccgagtcacctgcgcagccgttgctcctccaagaccaatccgggctccccagacccaccggcctgaatctggaggacagcagtccgcgtgacaacagcgactcggagatcagcacccgtcgggaaagccgcgtacccgttgaagctggcgtcacgcccaaaggaacaaacgccagagcgtgtgtcctgggcaaaggcggcccgccgctccggtccccgggcagcagcggccggcgtcaggccgcaaggcgaggggcggggacaggactctacccggcagcccagcgccgagcgcccgcgccactccggccttgcgccattccggccccacgacggccggcggcggcagcgcggctgggctcagcggctcgcagcccgggcgccccccctgccggccgctcgctagctcagcctcacccgcagtcttgtccgctggctcgctcgcccgcctacaggtcgacagggcccaacgacccggcgagcaacttcacggaaggcactggccgacaacgctccgctgccgccgcgccccgcccctttgtgacaccacctaccaatcgctggacggcgctttcgctgccctccaatcagcgcgggcgggggcaggcctggcccccggacgtgggcggttgccggggcgccagggccctggggccttcttggcattcgctggaggttgtgagttacgaggcccggatgttgatcttttattactagcaacactggacccctgactcgtgcccacgcgggcgtctggagggcagccgcatggcctgctgggaacggcggggttgaagccggagccgccctccgtgagacccaccggggatcctcttccaggcgcctgatttgctggagataggcgatacaggcagacgctgtccagtcggtggcctctccagagtgaggggcgctcctggtgcgtttgggccggcctgtcctaacaaatctgctttaggcttcaccgtcccctaatgtttctggcctcaattgcctcatctggaaaatgggggcattaccgtgcctgcttgaagacaaaggcgaaaacagataactttctgtagtcctcatacaatttactgagaactgtaggccaggcaatggagtaggcaccctgggctcaaatcccagcgttgggtaagcccagccacacctcctgctccagtttccaagctgctgagctgcggtgtaaacagtaactggcttcaagccaacacctgcctttcaacctaacatgggagcccactgcctcgttccgttccccctaccgattttccaactccgtgaacctccttcactaagtgggttactcagctgacaaagaatgtcatctcactcccactgcgggttcactcatcctcgacttctggctcagaggagccagtctaatatgaaactaaacatctaatctgtgtctcctgtcctctctcattcttctgagaccctacccaccaacttatctccacagttcaacgaactattgagcatacactgggggagtatggtgaggcactgggcattgattcaccagtctcgccgttggttccttctgaaactccacatatgcttaatgctaaatagattggagacctttgaggacagagctatgatggtaatcatctttgcattcctgagcctagaatagggcctgtgatggagacttactgagtaaaaaccttagcgtttctcacccttgcctgcccacttcattcacactggagaattgacagcatggaccgtggagtcaggcaggtgtgtttaaagccttgcctcccaataccagaagctccattacctggccaagtcattcattctttacaacatcatcatcattatcatctgccattcttcaagtgccagatagttgataagggtctttacgtattctctccccatcacaatcctgcaaagttggtagtgaaatccctcgtctacaaaggagtaaacaaaagccaattaaagtagaacaatttacctataatcaaacagctctatgtcggaaagccatatttaaactaggacacaatacaaaaatccaaccttgttccattattccacattgcttccagattttagctttatctgtaaaattagtgttactacattacctatctgatagaccatggagactgaataaaatagcattaaaagttgttaccataggaacttttttttaacgtaagttctctctccctttcaagcctctcaaaatagcagcttgcgtattttctaaacctgttgtctcctgaatcccctgaaaccaatcctactgattgatgagtagatttagttgttccaaaagaaaatcatcgtatttaacaaatgctgactctgaccgacattgggtactacagcaagaaactatgtgcacaaataacctacggacagaaggaagatgcataaaatgaataggggaaaggagtggccaactagcaagtgccctcatctgtcatcacgtcactctcacagcagacttgggcaaatggttgacctgtgggagctgaacaaaatctttgactctgggtatgagtaattccctgtctgatcttacag

SEQ ID NO: 914203 - DNA, 4001 bp, Homo sapiens
gaagaaaacctaggcaataccattcaggacataggcatgagcacggacttcatgactaaaacaccaaaagcaatggcaacaaaagccaaaatagacaaatgggatctaattaaactaaagagcttctgcacagcaaaagaaactaccatcagagtgaacaggcaacctacagaatgggaaaaaaattttgcaatctacccatctgacagagggctaatatccagaatctacaaagaacttagacaaattttcaagaaaaaaacaaccgcatcaaaaagtgggcaaaggatatgaacagacagttctcaaaagaagatatttatgcagccaacagacacatgaaaaaacactcatcatcactggtcatcagaaaaatgcaaatcaaaaccacagtgagataccatctcacaccagttagaatggcgatcattagaaagttaggaaacaacagatgctggagaggatgtgtagaaataggaacacttttacactgttggtgggactgtaaattagttcaaccgttgtggaaaacagtgtggcaattcctcaaggatctagaactagaaataccatttgacccagcgatcccattactgggtatatacccaaaggattataaatcatgccactataaagacacatgcacacgtatgtttactgtggcacaattcacaacagcaaagacttggaaccaacccaaatgtccatcagtgatagagtggattaagaatatgtggcacatatacaccatggaatactatgcagccataaaaaaaggatgagttcatgtcctttgcatggacatggatgaagctggaaaccatcattctcagcaaactgtcacaaggacagaaaaccaaacaccgccatgttctcactcatagatgggaactcaacaatgagaacacttggacacagggaggggaacatcacacactggggcctgtcgtggggagtgagatggggggagggatagcattaagagaaatacgcaatataaatgacgagttagtcggtgcagaaaaccaacatggcacatgtatagctatgtaccaaacctgcacgttgtgcacatgtaccctagaacttaaaaaaaaaaaaaaaatcaattcccaaagcatttctctcatttcttctgaaaagtttctaaaaacacaactccaaggatgaaatggaagttaaaggtaaacaggcaatagcgctgaatacgtaatttcagtaactcagaattttctccaacctctgctctaaagaagcttagctacagaagagcagttacctttgaaacattttccccaacataaagatatccggaatgtgaagctgccattaaaactgtgacacagatctacatttactgatacatcaaaacatccctaaagttcgaaatacgagctacagaatcacatcaaccgcctaacttgtctgtagcctaaactctagtccggagttcatctgcaagcggaattgggaagtatttcagagccagcatctcctcgcgccatccaggtacctacacacttgaggccaccgagtcacctgcgcagccgttgctcctccaagaccaatccgggctccccagacccaccggcctgaatctggaggacagcagtccgcgtgacaacagcgactcggagatcagcacccgtcgggaaagccgcgtacccgttgaagctggcgtcacgcccaaaggaacaaacgccagagcgtgtgtcctgggcaaaggcggcccgccgctccggtccccgggcagcagcggccggcgtcaggccgcaaggcgaggggcggggacaggactctacccggcagcccagcgccgagcgcccgcgccactccggccttgcgccattccggccccacgacggccggcggcggcagcgcggctgggctcagcggctcgcagcccgggcgccccccctgccggccgctcgctagctcagcctcacccgcagtcttgtccgctggctcgctcgcccgcctacaggtcgacagggcccaacgacccggcgagcaacttcacggaaggcactggccgacaacgctccgctgccgccgcgccccgcccctttgtgacaccacctaccaatcgctggacggcgctttcgctgccctccaatcagcgcgggcgggggcaggcctggcccccggacgtgggcggttgccggggcgccagggccctggggccttcttggcattcgctggaggttgtgagttacgaggcccggatgttgatcttttattactagcaacactggacccctgactcgtgcccacgcgggcgtctggagggcagccgcatggcctgctgggaacggcggggttgaagccggagccgccctccgtgagacccaccggggatcctcttccaggcgcctgatttgctggagataggcgatacaggcagacgctgtccagtcggtggcctctccagagtgaggggcgctcctggtgcgtttgggccggcctgtcctaacaaatctgctttaggcttcaccgtcccctaatgtttctggcctcaattgcctcatctggaaaatgggggcattaccgtgcctgcttgaagacaaaggcgaaaacagataactttctgtagtcctcatacaatttactgagaactgtaggccaggcaatggagtaggcaccctgggctcaaatcccagcgttgggtaagcccagccacacctcctgctccagtttccaagctgctgagctgcggtgtaaacagtaactggcttcaagccaacacctgcctttcaacctaacatgggagcccactgcctcgttccgttccccctaccgattttccaactccgtgaacctccttcactaagtgggttactcagctgacaaagaatgtcatctcactcccactgcgggttcactcatcctcgacttctggctcagaggagccagtctaatatgaaactaaacatctaatctgtgtctcctgtcctctctcattcttctgagaccctacccaccaacttatctccacagttcaacgaactattgagcatacactgggggagtatggtgaggcactgggcattgattcaccagtctcgccgttggttccttctgaaactccacatatgcttaatgctaaatagattggagacctttgaggacagagctatgatggtaatcatctttgcattcctgagcctagaatagggcctgtgatggagacttactgagtaaaaaccttagcgtttctcacccttgcctgcccacttcattcacactggagaattgacagcatggaccgtggagtcaggcaggtgtgtttaaagccttgcctcccaataccagaagctccattacctggccaagtcattcattctttacaacatcatcatcattatcatctgccattcttcaagtgccagatagttgataagggtctttacgtattctctccccatcacaatcctgcaaagttggtagtgaaatccctcgtctacaaaggagtaaacaaaagccaattaaagtagaacaatttacctataatcaaacagctctatgtcggaaagccatatttaaactaggacacaatacaaaaatccaaccttgttccattattccacattgcttccagattttagctttatctgtaaaattagtgttactacattacctatctgatagaccatggagactgaataaaatagcattaaaagttgttaccataggaacttttttttaacgtaagttctctctccctttcaagcctctcaaaatagcagcttgcgtattttctaaacctgttgtctcctgaatcccctgaaaccaatcctactgattgatgagtagatttagttgttccaaaagaaaatcatcgtatttaacaaatgctgactctgaccgacattgggtactacagcaagaaactatgtgcacaaataacctacggacagaaggaagatgcataaaatgaataggggaaaggagtggccaactagcaagtgccctcatctgtcatcacgtcactctcacagcag

SEQ ID NO: 914204 - DNA, 4001 bp, Homo sapiens
tacaaagaatgtgccgggggcacagcctctctcctaaagaagaccaaacttcacatcatgctgagattataaaaggagaaaacagcctctcctcatactgtctccctaccccttgtgggaagagcacagtgatcttacagtagagaacacagctctggaacactgactagctcacctctacggatacagacataaattaggtgaacaagaaaaatgtagggcctttgccagagaactagtaacaaaacatccactatttccagactgaggcatggataaatactcaatggcatcctcagaggttaacgtaactccactcaccctgcttcctaccagtctctctcatgtatttcagaggactgagggtctttatgagaatctgatgaaaaccagaagcttttccctagaaatacacacatgtgcagacacataattttacatgcagtttcaggggattcactgatccctaaaactcacccataggctccaagttaaaaacctctgctctttaggacaatcaggtttttgtgtgactcctgatgcaatgcaacaccaggggcacaacatttacctttgcaaaaaaaaaaaaaaacacttttctaacttcaatcaaatccaacctttaaatctaacttctagtctgcaccacaaggaagaaaccagacaaatctcggtagtaaattctccaggaaagtcagttcaggctcagtctcttcagcaaatcaatgtcacgagagagattgtcttagactgaaaaaagacttaaaagacataataagtacaaacaatgcacactcctggactgaaatgtgatttagccaaaagagatggtacaactgaggaaatggaatatgaactgagtataggatgatatcaaggagttattaattttgttaggtatggtgttactttgatcttgaaagaaatgtccttatttagagataaaaactgacatatttagggagtagaatgccatataagtaatttaaaataattttaacataataaaatgagtcaaaagaaaaaatgaaaattatagagaatgaaaatcaaagcaggataggagggaaaaagttaagatccataatctcaataaattagtaaaaatgggctgggcacagtggctcacacctgtaatcccagcactttgggaggctgaggcaggaggatcacttgagcccaacagttcaagaccagcctgggcaacacagtgagagcctctctacaatttttttttttttttaattagccaggcatggtggctgaggtaggaggatcgcttgagctgaagaggctgaggctacagtgagccatgttcacacgactgcattccagcctggacaatacagcaagattctgtctcaaaaaaaaaaaaagtagtgaaaatggtatctgcttattcacaggtttttgtatttctttaatttttgttcaaaattataccctaattttttaatattaattatgctaatattgggggcaaaggaaaaaattaagcctgctctaagctgtagaaggcgtgatgttcaaggttgtccagcagtccagaggaaggagcttattcagtcacaaagaagaaccttgctgaaaggcaggatcattcccagtatctgcctctcctgggctgggcctgagacacagggtaggcctagataaacccagaggccgaacagacctcccagaactgctcctcactagggcagaaaggacagcccagccactgcctaaatggtcagtgttagttactacagagcaggacggcagaaggcagagcagaccagagcaactccacaaagtctgtacctgagcaagtatcgaacaccatcacctgcatccttcaagggttccaggtagatctccagcctcttgtaggagagaaccaagttgaaaaggtcaaacgctggggacttggtaggaaaaggtggagactccaggggagcctcgggcatcacgctggggctcagctccggcccactcccctcacgttctgatgtctgcatcctgtaaccataataattcccaacatttgcattgcacgtctagtcctcaacacaattctacctacagattcaggtggtgccaacagtaaacctgtgagcaagggaaagtgaactattcagacctaaaatcctgttctttgtactctccatccaatgctcttttccccaaagatccatcaaaactaaaaatcataaaaaccaagcataaatgatcgctgcagcgaggcagcccatgggctgaaatgaaatgatgtcctggaacatttttctcccactctttacctggttaattcctactcatccttcaggtatcagcttaaacatcactcccttactctgggaagtctctgccaacacccccaactctggactgggagaccctctccgatgctcccaaaggatcacgtactcaccctaacagagcacttatcacatcacatcgcttcttggccttgtggctaagatcaagtgcagagcactgaccacgtcaaagtaaaactccctgctcttaactggcctccattcacgactgcttctgtacacagtgggtgcttaacaaatgcctgctgaatgagtgaatgaaataccgtgctccaggactctcgcccgatcctctaactcttcccactcccttcggttcccaacaacttcctgggccatctctgccccagggcagtcggcatcagaacgccccattcccgtctgccctttctgatgaggaaaccgaggagcctttacggtctttcccagttcaaagtcctatcctgaactctaagcagcaaacgagggggcggaacctcggcgaagagcaacataaaccagtcccaggcaatcagccgcgacctgatgggagggtgaggggatgggacaaaggggccaacgggaccccgaaatccccgcaggccgagccaaggcgaaagggcacagagcggcgccaggtatgagcccaggaaggggcgaggtatatcgacgcccgcactggccttggccaacacctctgcagccaggggggcctgatggagcccgtgaggctggacagggaaggccatgcccgaggtcgtggggccagcatgtggcggcccccgctgcgcccaagcacccaactacacacagcctgcggagacactgggacgcggggggacggcacctcacctacccggccgctggctccgtgagggaggcggcagggtcgggcaggagcaggggtagagccactgggccccggagcgtttcttcaggcctcccccggctgaacgccgctcctcctgccagggttgttcggaagtcgcaggtccgaaaatctcctccgcctacgccgcggccgccaccgccgcttccgggacgcgaatcgctctgcggctgcgtcctcatgacgtcatcccgctccgggtttagctccgcccaccccagcacaggcaagcacccttgccagcagtgcgcctgcgcgtctttcccgcgcgctccaggctggagttaattctgtccttggccggccgccgttcacaaagccttgaggacccttggaagcacgtgcttggcgaccctgcagctcgttgccctgccttgccgcagggaacagttggcgagaggcttaaatgaagaatttacgtcttcatcctctttccttccaactttggaactgaactggggactgtgtgtgagccccggaaagacaccgtatcctgtatgagatgcccagcagagcatgcagttgtttccggagtagctagtgtgtacaaggtcctgtgcaggcctctcccagctcagttcacttcacaccgtgtggcccagttaatttcccttaaagcacacatccgatggctttatattagtgacttagcgctcaggtacagaggagccaagcactgaaccggactgagctctttttagacattatctagttctcctccaacgaccctattagggttgtcgccattttacagatggggaatctcagacgtgttaaggaacttctttagagtcacagctaagaagcaaatg

SEQ ID NO: 914205 - DNA, 4001 bp, Homo sapiens
ctgtctcaaaaaaaaaaaaagtagtgaaaatggtatctgcttattcacaggtttttgtatttctttaatttttgttcaaaattataccctaattttttaatattaattatgctaatattgggggcaaaggaaaaaattaagcctgctctaagctgtagaaggcgtgatgttcaaggttgtccagcagtccagaggaaggagcttattcagtcacaaagaagaaccttgctgaaaggcaggatcattcccagtatctgcctctcctgggctgggcctgagacacagggtaggcctagataaacccagaggccgaacagacctcccagaactgctcctcactagggcagaaaggacagcccagccactgcctaaatggtcagtgttagttactacagagcaggacggcagaaggcagagcagaccagagcaactccacaaagtctgtacctgagcaagtatcgaacaccatcacctgcatccttcaagggttccaggtagatctccagcctcttgtaggagagaaccaagttgaaaaggtcaaacgctggggacttggtaggaaaaggtggagactccaggggagcctcgggcatcacgctggggctcagctccggcccactcccctcacgttctgatgtctgcatcctgtaaccataataattcccaacatttgcattgcacgtctagtcctcaacacaattctacctacagattcaggtggtgccaacagtaaacctgtgagcaagggaaagtgaactattcagacctaaaatcctgttctttgtactctccatccaatgctcttttccccaaagatccatcaaaactaaaaatcataaaaaccaagcataaatgatcgctgcagcgaggcagcccatgggctgaaatgaaatgatgtcctggaacatttttctcccactctttacctggttaattcctactcatccttcaggtatcagcttaaacatcactcccttactctgggaagtctctgccaacacccccaactctggactgggagaccctctccgatgctcccaaaggatcacgtactcaccctaacagagcacttatcacatcacatcgcttcttggccttgtggctaagatcaagtgcagagcactgaccacgtcaaagtaaaactccctgctcttaactggcctccattcacgactgcttctgtacacagtgggtgcttaacaaatgcctgctgaatgagtgaatgaaataccgtgctccaggactctcgcccgatcctctaactcttcccactcccttcggttcccaacaacttcctgggccatctctgccccagggcagtcggcatcagaacgccccattcccgtctgccctttctgatgaggaaaccgaggagcctttacggtctttcccagttcaaagtcctatcctgaactctaagcagcaaacgagggggcggaacctcggcgaagagcaacataaaccagtcccaggcaatcagccgcgacctgatgggagggtgaggggatgggacaaaggggccaacgggaccccgaaatccccgcaggccgagccaaggcgaaagggcacagagcggcgccaggtatgagcccaggaaggggcgaggtatatcgacgcccgcactggccttggccaacacctctgcagccaggggggcctgatggagcccgtgaggctggacagggaaggccatgcccgaggtcgtggggccagcatgtggcggcccccgctgcgcccaagcacccaactacacacagcctgcggagacactgggacgcggggggacggcacctcacctacccggccgctggctccgtgagggaggcggcagggtcgggcaggagcaggggtagagccactgggccccggagcgtttcttcaggcctcccccggctgaacgccgctcctcctgccagggttgttcggaagtcgcaggtccgaaaatctcctccgcctacgccgcggccgccaccgccgcttccgggacgcgaatcgctctgcggctgcgtcctcatgacgtcatcccgctccgggtttagctccgcccaccccagcacaggcaagcacccttgccagcagtgcgcctgcgcgtctttcccgcgcgctccaggctggagttaattctgtccttggccggccgccgttcacaaagccttgaggacccttggaagcacgtgcttggcgaccctgcagctcgttgccctgccttgccgcagggaacagttggcgagaggcttaaatgaagaatttacgtcttcatcctctttccttccaactttggaactgaactggggactgtgtgtgagccccggaaagacaccgtatcctgtatgagatgcccagcagagcatgcagttgtttccggagtagctagtgtgtacaaggtcctgtgcaggcctctcccagctcagttcacttcacaccgtgtggcccagttaatttcccttaaagcacacatccgatggctttatattagtgacttagcgctcaggtacagaggagccaagcactgaaccggactgagctctttttagacattatctagttctcctccaacgaccctattagggttgtcgccattttacagatggggaatctcagacgtgttaaggaacttctttagagtcacagctaagaagcaaatgggagctggaatttgaagcttatgtgtcatctgaccccaacgccccaaccataccaccacccaccttggtctgcatttcctggtcttgtctcctgccatctttcagctgcctttaactttggccaactgaacccctccactgttaccctcaaatgcccctggcactcaaatgtctgtatcccttccttgagtgccccagctggaagtaatcacttccctcttcaagtagccacagagctttaactgcatctcttcctccattatctcctttcagaaagacaggcccatccctccagccaggacttagctgtgctccagggtccaactcttatttccttagggctttgctctaacaggcctgaaatcttgactctcgctaactcttaatcatcattctagagacaaaattcatggaaaatttctcctttagcctaactttaccccctctttcctacatgagttggaagactcactgtgaagtgctctctaccgctgcttcctcgcccaattcactcctcactgcactgtggtcctgctcccctccatatttctgggctacctgcctgctcacctgtgacatcctggctgctaaatccaatggacacttcccagtcctccttgcagatgacctcagaagcactggaatctctttcctttttggcaccattgtccaccttagcttccatgacaccaccctctcctctctttccgaccttcaaggtctccttagggcttttcttcctacccctcaaatgctggggctccttttgctacccttctttcttctgactcaaggcactccgtgaggatctcattcactcttgtggcttctgtcagctaatgtttcgtttcccgtgtctatgtctccagcacctaaagcagtacctggcacatagtaggcattctgttaagaagggttgcaagatgttaccattggggggtagtctgtgggatcaccctgtgttagttcttataactatgtataaattgacgattgtcccaaaagtaaatgcttaccctgtgtaggtatttttctcaaagctccctgctttagttgactttgtcaattacccggcatgcgccagtcccaacataagtaaggtaggagggcttctcctcagatgaattgcttggttggtttttccagctgtaaaatggggataaccatagtggtaccctcagtgtggggctgtgatgagaattaaatgagctaaagtatgtaaattcctgacatgttataagtgttcaaaaatcgttagcaatcattgtgatttttatttttactcaaagccctaccaccaccacccctagcccaaaaatcagacaagaatccacgaaaggccaaaatgtagaaaga

SEQ ID NO: 914206 - DNA, 4001 bp, Homo sapiens
ggaaaggctggccgagccgtgccctcaccccgccagcccagccgccagcttcttggaggacctctgagagaacatttgtttgggctgccaagttaaatcttcctccctcatgtcagggcattggaaaagcagtcaggggagaggagaagggggagagcgcgcgggggaaggagcagcgggagggagggagggagggaggcaggcgggcaggctcaaagccccagttactcgggcactgcctacccaggaagctgacggctcccgggcaggcgcagccggggctccgggcaccgaagcagggacccggccgtcaggcctccccggtcaggcaagggtaccaagcacccttggcccacctgggagcggccctcgctctgtgacctgctggagggacgaggtgggaagggaaggcagagaaggaaaaagtttgctgcaggtagaggggtagggctgggcggcagtgccgaccggctgtccccggggaggggtggggggcccggaccggctgccctggcgcgctcccgtccgcccgccctcccgcccgggttgtttacattcctggagtgtcttttaaacccggggctgaggccggctcccggccttctccggcggctccggggcagtctcccgtgaaaatctgctggcgcacaatggccgggaaggcggccgcccctcgcccgcgcccccaccgctccagggcggggagcctgccctccgcaccgcgccctatccccgcccggccggcttcctggacagatgtccccagcgagggggcgacgcgcgcccgctgcccgcgccctagacgccgaggccgcgctccccactgttttttccccagcccagacgccaggaatgtgaagcaagcttccagaacccgcctcccccccccgaccccggctccagccccggccccccaacctccgccccggctggcctcccactcccccggggccaccgccgccggagacggagaggaagaaagaacacggggaaattactttcgtatttgcaacgcgcgcgcgcacacacacgcacatcttccccctgggctcccctcctggccggggcagccccgtccaggcactggcctgagcgcccctctggcttgcgaagccctgggagaaaaccctgcacacacacctccgcgtttctcgtttgtaccgcgcgccagctttccccgggcaattcccacacaaacaacttaaccgcgcccccacctcccatttacaaaagtgtatgttttccctggaaattcagacgcacaagttaacaccaccaccccttgccatcctgaaatccagcgctttccccagcggttcctgtacacacacaggcgcacaacttcgcatctccccagaggaggcgaaggagaccgaggcggtccttccctccctcctccgattcccggtcctgcccggcccccgggtgtagggagcgagggctggaggcgcgccggcaggaggcgggcaccgggtccgcgcgcgcacgaccacacttacgccccgcacaccctgacaaacccggcccccacgcgcagcccaagccggctccgcgcagccgggagctcgccggccgccgggcctcggcccccggccgccaaggagagcggagcggagcccgcgccgccggccggtcgccccgctccgggggacactttaagggaaaaaccccagcacccaatccccacgcttgcaccccgagagtccccggggagcgggaggtagccccggagccagcgggcgcctggctctggccccaaacttaccgggcgctgcgagcgccgctgccgccgctggaggacgcgccgccgccaccgccgggtagggcaggctcgggccgggaggagcgcagcgagggcgccgagatccgctcggctccggctcctgctccgcgccggctggggctggggtcaccgcgctgcgccggcgttgctcgctcgctcggccgcccgatcgctgctcgcccgcctgccgcccggccgcccgctctccccggcgcccgccgccgccgctcgcttttttaatgtccacagacagtgaaaaggaactcggcgttagggggtgagtaagtgaatcaactcgcccggagccgagcaagttgaagtgtcagattacattggctattctatttccaaagggccccgcgccgccggccgcccgcaaaagccggtgcggagtcaggccggagtggagcgccgcgccgcgccgccgccgctgccggcgctcggcttggctcgcgctctgcgctctctttcccctttccttttcgcctctcctcgttctctccctcgcctttcctttcctttctcttcctctcttcctcgctcctcggtctcggcgctctcccagcttttcttctcctggctcctggttccccgctacgccaccagtccactcacctctctccttgccctactccctccgctactccctgacgccccctgcagcccccagcccccctgcaggccccagccccagtaagtttggagaggggaacaaatgctgagcctaggtagggaccaccttggggaggaagccaaaatcacactgctcacccgagagcccctgccccgcgctggcacgcccccgcctggagtgcactcgtggccccgggcgctgtcaggtacccgaattggggtaagcgagttggtaactggacctccaaagccttcccctggggttgactttggaattgttcctacagcccggggactggtggttggggtgggaagaggaccaccaccaccaagggtgactttgagggagactagagcgcggccccccgacagctgtgggggagcgggggtgtggtggccacagttgatccgcggcacctagcacagtccagagacgcgtggattcccctaggcccggcgcggagcgcccggggcgctgtgcgcgcgggctgcgtgggagctgctaggctggggcctggccctctgccccggactgggcactgccagagatagcggagagctaaggtactcacgaggcgcagttgggtgcacccactcgcgggagttcccctagccgacccaccccccccccccgagagcatccaactacgcgcccactttggctcacgtccactgccactctcacggaaactcctacaagaacggcacacacgttcgctccctcagcattgcaaacacgctcccccccaaaccacaaacgcgcccccacacactcgcttactttccctcacaaagatgcccgcttacacggccacagcaggcacgctcagagacacgcagttacacacacacatcgctgtacacaaccccacatacaatcaaaaaacaaaacacgaaacgttcccctgggcactaaatcctcacgttaacgtacacacacaaacacacgccctcctctcccacttcctcttccataccccttcctcgaggccccccacccctgattttcggcacccccagtcccaatcataattggcgcccgcgcagccctctttggacacacacgcgccgcccacgcacgcgctcccctccccggcaggcgggggcggcttcggccgggagccggcggagcccgcttcggattccaggtgtggcagtgactccgcgctccacgttttgcaggctgccaccgtgtcggaggcgaggcgaggaagggagctggaataacaaaggcaagttggggagagcgcaagggggcgcagccccggccgggctgcggggggagccttgcacggccggggcttcggaggctgcagggtcgggggcgcggggagccggaggtgggggaggaagggtggggggagaggggcggggctgaggcgtgacgtcagagaacaatgacaccgccggggggcgggcacccggaggcggcccaggcgggggtctcccccggggcctggggcgggccgaagatgtccaggcctggccggagccgcctcctgattgacgaggcccgcatgggagtgcggacgtgcagcacagatttgcgggtctcctgggcctcttgggcggtgatcagcgcgga

SEQ ID NO: 914207 - DNA, 4001 bp, Homo sapiens
aacaagtaaacatttactttctgcttttggacaaacagattaaattatttttaagaatgttcttgcctccatatgactcagcttactgtgggatgcagaacacctaagtgaggaggaccaagggctctagacctccctaaaaacccaacctgcaccactccctcctaccagcagggtcctgaatgggccacctgggtatctcctccaggctcacattcttgacaccagataccatgtacacactgtatatgacccagggtactagataccctgaatatgacagtgggtactgtgtacacagtacatatgacactcggtactaggtacacactgcatctgacactgagtacagcttatgtgacaaggatagtgcatgcatggtgcatatgacattgggtaccatatatgcatggcatatgacattgggtactacctacacaccatatataacactatgtaatgtatacatactgtacatgccaccagatatatatacaaaacatagataacaccaggtagtgtatatacactgtatatgacaccagatactatatacctaacgtatatgacattgaatactgcatacacaccgcatatggcagcacggtaccgtgcacatactgcacaaaataccgggaaccgcgtaagggctgtatatgacactgggtgctgcatacacagtgtgaaaggatactatgtacacaccatatatgaccccaagtactgtgtgcacacagtatatgacacctggtactatacacaccgcatatatgacaccaggtactacatacacactgtatgtgacaacaggtaaggtaaatatattcaatactatccagatactacatacactcgtatataacatggagtaccacacgcacagctcatatggcagcagggtaccaggcacctactgcacacaataccgggggctgagtgcacagcctaagcgaggaagatacatgtacacaccgtgtatgatagccggtacgacaccgggtacttcgagcacactgcatatgacacagagtacacaccatatataatccccggtactgcgtacccaccgcataggacaccgcactgcacaacgagcactggtacacacgaataaaacaggtacggcggtcactctgcaaaagacaccgggcacggcgcacacatcgccagctcctcctcctcccggctcgggagaaaagcgcgaggagagactgcaagtgaaagtccgggtcccggcgccccccctcgtcccagccgcgtcctcagcagcttctccccggagctctgggtgggaggagggcggcggaccccacaggactgtcccggaggtccgcgaggacctgttgaggcggcggcctcgctgccggggtcgctcacagccccgggggaccgacgaatctccgccccgggcctcggggccagccctgcccgccgctcccgggctagcacacgacgtgccgcgccgacaaacgcttcctctccgcccgccacacgcccggagccgcgttccccgccggcccggactgcgcacgggcccaggaggcctgaccgaaagcggggcacagggcccggcgggcggtgctcacgcgactccgcggcttcccggcccgagcaggccccgcgcggtcctccggggcctcatcccggggcctcttccgcggccgcccaaggcgagtgggcgcgggccggcagcctccgcaggccccgccgccgccctcgcaggccccgccggcccggcccgccccgccatccacaaagctccccggcagctcggagctcttcgcgagcgggcgagcgaccgtcagcacccactggtgccgccgccgccccagaggccgcggccaggcaggctccaccgcgcgggccgcgccatctccacggacgcccccgcccgccccgccgccccgccgccgagctttccccaccattatgctccggctcctccaccgccgccgccgccgcgcccggccctcccctccggtgccgcctccttcccgccgcccggcgcctctcgggcctgagccggcgacgggcgcggggggcgggggggacgctcaggccgcctcctcctcctccctgccggcctcctccctcctccccggctcccccccgcccggaccccgccgccggctccgcgcgaagggctccgggctcgaggggcgccatgtttgtaatactccacctcagagaacgccgcggtcgcgcctgagcgagggaggctaggcggccgggtcgccgcgtgcggggtgagggccgggagggcaccgccgcccgcacttactcgcgtcttcccctggcgccgcgggcctgcggggccggagcgggcggcgggaagttgggcgccgccgcccgggaaagttgggtccccgcgaagccgcggcagccgctcacatggcgatgcgcgcggggcggccgctcggccccaccggcccctcggcccgcccgccctcggagtttattgtgtcgggtcgaggcgccccgcggccgggccgcgcactgggggctctagcggctggcgccggacttgcgcgcggccggcccggctcgcggccgcctcccgcccggggccggagccgtgcacgcggctcctaccttccccacgtcctgtcttcggcgcctctatccgaaatttgttggagcatattcctctgtctccacacatgcactccgtatccacacacacgtgaaggctacgtacgtgcaggcgcgctggagccgggagcgggcgccgaggccggggcgcgagggggcattgtcaggcgccgccgcagctcagccccgggtggacccggtgcctgcccctggctcgcggggtccggaacagcgaagtctgagaagtacgagtgcttctcttaacaacattgtttaggtagtctgaacagccctttactcctgtcatcaaaaagagcggtagggatacgctaagttccccgtttcatctctgcgcaaacaggaccgcgaaaagaacaggaccacccatcagcagccctgcaagaacactgcagatttgcgcgagaagtaggttatcttctatggagaggaattctagacctaatcagagacgatcccttaagactctggtttaagaaaggttcggagataagcatactttgatagcgttcacctgttttccctgaggacctttcgccactgggagtcggggaacacctgtcagtcagagtcctctgctctgaaattcggtgagtacaggacagcaaggtgttttcagggagaccgcattctcataacttttactacagtatagtgttataattgttctggtttattattagtgttgttaatctctcattgtgcctgacttctaaattaaactttattataggcaggtgtgtataggagaaaacgtagtgtaagtaaggttcagcactaccccgggtttcaggtatctattggccgtcttggcacgtgtccccacctgaaaagtcattaggaagagacggttgtaggaatttggggattctgataaaatatatcaatctgcttctacagctggtttctaagactgttagaatttagaaatgggtggtacttgaataggtctgtgatatacactagtcaaataaacacaatctttcatgctattcacagccctcaatctgatacatcccagagagtttttgattatctcaaagaacatcacagaataattgtaattcattttaagagtaaatatatatcgctaaaaatttagtagaggggttaaaacgtgtcagaagaaaagcaagccatgcctggtttgaatgttgggccaggaattccaacaatgaagagctttcagtgagtcacctttttaaacagtctgttacttcatctgtaaaatagaggactgcatggttctgtgtattttagagaaggcactcgagtaagacaacatcgtatcaataaaaggaagcttaccttttaggaaagaagtggcagcataactccacatttttttcccagttatactttgtagggatcatttaaaattttatacgcag

SEQ ID NO: 914208 - DNA, 4001 bp, Homo sapiens
tacttcgagcacactgcatatgacacagagtacacaccatatataatccccggtactgcgtacccaccgcataggacaccgcactgcacaacgagcactggtacacacgaataaaacaggtacggcggtcactctgcaaaagacaccgggcacggcgcacacatcgccagctcctcctcctcccggctcgggagaaaagcgcgaggagagactgcaagtgaaagtccgggtcccggcgccccccctcgtcccagccgcgtcctcagcagcttctccccggagctctgggtgggaggagggcggcggaccccacaggactgtcccggaggtccgcgaggacctgttgaggcggcggcctcgctgccggggtcgctcacagccccgggggaccgacgaatctccgccccgggcctcggggccagccctgcccgccgctcccgggctagcacacgacgtgccgcgccgacaaacgcttcctctccgcccgccacacgcccggagccgcgttccccgccggcccggactgcgcacgggcccaggaggcctgaccgaaagcggggcacagggcccggcgggcggtgctcacgcgactccgcggcttcccggcccgagcaggccccgcgcggtcctccggggcctcatcccggggcctcttccgcggccgcccaaggcgagtgggcgcgggccggcagcctccgcaggccccgccgccgccctcgcaggccccgccggcccggcccgccccgccatccacaaagctccccggcagctcggagctcttcgcgagcgggcgagcgaccgtcagcacccactggtgccgccgccgccccagaggccgcggccaggcaggctccaccgcgcgggccgcgccatctccacggacgcccccgcccgccccgccgccccgccgccgagctttccccaccattatgctccggctcctccaccgccgccgccgccgcgcccggccctcccctccggtgccgcctccttcccgccgcccggcgcctctcgggcctgagccggcgacgggcgcggggggcgggggggacgctcaggccgcctcctcctcctccctgccggcctcctccctcctccccggctcccccccgcccggaccccgccgccggctccgcgcgaagggctccgggctcgaggggcgccatgtttgtaatactccacctcagagaacgccgcggtcgcgcctgagcgagggaggctaggcggccgggtcgccgcgtgcggggtgagggccgggagggcaccgccgcccgcacttactcgcgtcttcccctggcgccgcgggcctgcggggccggagcgggcggcgggaagttgggcgccgccgcccgggaaagttgggtccccgcgaagccgcggcagccgctcacatggcgatgcgcgcggggcggccgctcggccccaccggcccctcggcccgcccgccctcggagtttattgtgtcgggtcgaggcgccccgcggccgggccgcgcactgggggctctagcggctggcgccggacttgcgcgcggccggcccggctcgcggccgcctcccgcccggggccggagccgtgcacgcggctcctaccttccccacgtcctgtcttcggcgcctctatccgaaatttgttggagcatattcctctgtctccacacatgcactccgtatccacacacacgtgaaggctacgtacgtgcaggcgcgctggagccgggagcgggcgccgaggccggggcgcgagggggcattgtcaggcgccgccgcagctcagccccgggtggacccggtgcctgcccctggctcgcggggtccggaacagcgaagtctgagaagtacgagtgcttctcttaacaacattgtttaggtagtctgaacagccctttactcctgtcatcaaaaagagcggtagggatacgctaagttccccgtttcatctctgcgcaaacaggaccgcgaaaagaacaggaccacccatcagcagccctgcaagaacactgcagatttgcgcgagaagtaggttatcttctatggagaggaattctagacctaatcagagacgatcccttaagactctggtttaagaaaggttcggagataagcatactttgatagcgttcacctgttttccctgaggacctttcgccactgggagtcggggaacacctgtcagtcagagtcctctgctctgaaattcggtgagtacaggacagcaaggtgttttcagggagaccgcattctcataacttttactacagtatagtgttataattgttctggtttattattagtgttgttaatctctcattgtgcctgacttctaaattaaactttattataggcaggtgtgtataggagaaaacgtagtgtaagtaaggttcagcactaccccgggtttcaggtatctattggccgtcttggcacgtgtccccacctgaaaagtcattaggaagagacggttgtaggaatttggggattctgataaaatatatcaatctgcttctacagctggtttctaagactgttagaatttagaaatgggtggtacttgaataggtctgtgatatacactagtcaaataaacacaatctttcatgctattcacagccctcaatctgatacatcccagagagtttttgattatctcaaagaacatcacagaataattgtaattcattttaagagtaaatatatatcgctaaaaatttagtagaggggttaaaacgtgtcagaagaaaagcaagccatgcctggtttgaatgttgggccaggaattccaacaatgaagagctttcagtgagtcacctttttaaacagtctgttacttcatctgtaaaatagaggactgcatggttctgtgtattttagagaaggcactcgagtaagacaacatcgtatcaataaaaggaagcttaccttttaggaaagaagtggcagcataactccacatttttttcccagttatactttgtagggatcatttaaaattttatacgcagataccatctctcattcaacctaatgtaagttagataacttaccctgattttcctgttggttttgcctagaatttaacccttggctctattttccaagtaaggtggtatttatccactaagatgaatacgaatatccctccccacataaaacgcaaaagccatggataatgtacaatagaagaaataaaactattaataaatactgacagctattctaattcactagtaatgacacattcaaacaacgtaacattgcttttcttcaaaggacagaattcttttccagtgataatgctactgatggttagcgaaatgaacgcttatatacactgctggcagaaaattgggttgatgtcaactctcttgaaatgcataccaagaggccattaaaacagtttgatttatctcatttgcccctcagctgaatgaatgtgtgtgtgtgggtctggggaccaaaggtttgaggtttggaggaagcccagaagaccagtaactaattgctgtgctagtatcttacatgacaaagctatactgtttatacaattgaatacagacagatttttacttcttgattctcctttttgcattggtgagtttcaaagcgggtgccactgagccctggggcttctcagagctgtcggggagctgtctctgcaggaccaagacgtgggaatactcctcccgcccccaatcagacagcactgctctattttctagaatgagtgtccagatcagatttcattacctggctattgggacagtatagtgtgtgtaaggtaataattgctcaaactcatttgacatgagttagggtttagtctcattatttattttgttaaatattatcaggaaatactgtggaagaaaatgttaactgtaactgtaataaagtgtggactgctgcagatggctgtgagtgtaaacgtcacagcaccttcattggcccatggcctccagagccgcttcctgctgcggggcagccctcaaaaatgtgtgtcta

SEQ ID NO: 914209 - DNA, 4001 bp, Homo sapiens
cattcttctctaagcaatttttatgtaaaggatggttttttaaaaatctcaaccataagaaaatactgttttgtactctgagtttttttaaaatgttttacatcaacatcatttgcatgtagttatcataccccaaattatgtgctttatttaaaagcataataattaaaataatgtactatttattttattcttattgttcacatagtattatcttttttttcttctactatcttataggagcaaggagttgtacatagctttaaaataccacaaaggcgagtacagaattggagccacatatatcctcaccccttctctatctccttttttcttccctcttaagtagcctttgggtttctttgttggtttgttgtgagacaggggtctcactgttacccaggttggagtgcagtggcctttcctcggctcactgcaacctctgcctcccaggctcaagtgattctcccacctcagcctcctgagtggttgggaccacaggtgtgcaccaccacaccaggctaatttttgtatctttggcagagacagggtttcaccatgttggccaggctggtctcaaactcctgagctcaggcgatccaccagccttggcctgctgaagtgctgggattacaggcgtgagccactgagcccatcgttaagtagcctttgtaatcttcttcaccagcatacagggaaaggacaaaaatacatggaactcaatatattacttattaataaaggccaaaaaaagcatttatttaagtgagttttgtaaattactcccattctccatttctacccatagcatctaaagaatgtgaaaagtatcaagaaattttctctaaattatttttaaaattccaaacacttaaaaaagataaatttagctttatatctttaagaatacccagagaaacaaaacaaaaccaagttcctaattgaagactcccttataattagcatacaacatgtaaatagaagcttcataaggtactttgatttttttttttggtatcctgaatctgtctacccatataaatagcatgagaaactaggggatgggggtggacaattttcttctttaaaactgaatgtttatttaacatgatttctaaaatacagaaggaaattgttaaaaattctgttagtgggctataaagtagtaagatgtttcttactacacataccatgcctatcctatgttaaaattagtaataaacagtagactgtttttagatagcttcgctacataaaagtgattcactaaaggtgtttttaataaaagaatctctggccaggtgcagtggctcacgcctgtaaatcccagcactttgggacgccaaggcgggcgaatcacgaggtcaggagtttgagatcagcctggccaacatggtgaaaccctctctctactaaaaatacaaaaaattagctgggcgtggtggcgggtgcctgtaatcccagctacttgggaggctgaggctggagaatcacttgaacccgggaagcggaggttgccatgagctgagatcgggtcaccacactccagcctgggcaacagaatgagactccgtctcaaaataaataaatcaataaatagagttaaaaatttggttaactaaaaaactattataaatagtatatagtgatattttccttatctaatttttctatgaaacttctaaacacaagttgtttgtgtatgtttctgtgtttgtttttctaataatactcctgcaaagcaaaaagtgtcttcagttctttgtaatatatgttgattagcataacagataaaattttttttggcctttcccccaaagtcttctacgacattttacagagatatttgtgtttaaatttacttactttgtaatacggtcaatgttggcaatctgcttctggttccgtataatctcaatggctgcccaaagatgctggatagcttttgtatccgcctgtcgtctttttgttaaacgtgccatgacctgtttacttctttagctgcagtaataaacaaaaacataagggaaaaaaacagattacaaaatgaattatcagtataagtgagtaacattatcaggacctctcaactattgattatacttagtatgtagtattgcccactttctatttttttctaccatccacatcaccagttacttcatataaagtatcattcatttcattacatcatgaagaatgacattctaaaagccaaaaagttaaaaaggttatcccaggaaggataagtggtcacttcataccaatatactttcagaaaatgcatttaagtttattctaaaacacagaaatactccaagataaaacttcatttgttgacatcgcgttgtttgtaatttgatcaatacaaaatggaatttaaatattctaattggcactttagtttattataatcatggcttaaaaatcaaattttatatacatacatagatatatgaaaacaatattattttaaatcaaaccatgaacattaaatataagaaagttactcctggaatgagatgtgaaaggttgagggacagaacactagaaggtcacaaattatgaagaatggtaacattcttggattaggtgtaagttttgggggtatttattacactattaggaaacagcattgttattttactcaaattttagtattccagatgaattgaagaaaactgccaccacacctcccacctcccaataattttcctgctgtctcctggcaagatggggaaagaaaagaggttaaaccctggatgtccggagagcagtggtatcacagagaggattctcttaactcagcatggagagacgtgcttgtaggaatctggtaagcgtttgtcatgaatcctagcattggggacgcactgaaacatctctctagatcatacatgttatcatgctgagtttaaaatctaggttcttaaatatacagtgaacattaagccttctgagattgctgaaatctccttgacctgccctttcctatcttttaagtttagagaatgagggagggaagcactttgctgtgttccatgactggccaagacagccacaggaatctcctttttctctacctctgtgtttcttcacagcctactcagttcccctcctttctcaggcaaacacaaataaactatatagttgctatcaaaacctgagaaaactgggtcagtcaggctcctaaaataagatgtctttcagaattacaccaccatcagaatacattttgaacatgtttaaaggtattcctgaatattctcacactattacttctaatagttccaagctgctccacagagcaaataattcaaaaacaataccagtattcaagttctaaagaaaactttaggaaaatcagttagttctgtataaatttatacataatgaaaatataaaaattataacttaggaacacttccattttagacagtaatcacttttaaatgtacaaaaatttatctgtttaagtgcacttgtgttggagcaccaactttcagaatccaatatgccttaatggaaggaattcattggtaaggatttaacatatgtcagaaagtgacatctaatggtgaactgtaataatacaactcaatcctgtgagattatataaatactcagataaatgaacaaagtttcactcattcttacatagttaaaaatatatacaggtgtccactttatctaaggcactgtgctagacacaatgaagtagttaaaactgtataaacggcgacccttgccaagaaaataatctaaaactggcagaggaaatttgacatatacatggaactaactgtaaggtcatatatgacatataaatggtccacaatatgtgctataaaaattcagacaagggagacactacttctcgctgaggtaaaatttcagcagaaagagatgaggaactctgcaaaatggtaaatatgtaggaaaatgtaaaagccaatttttccctttcttaatttctttaaaagataattggcagtttaaag

SEQ ID NO: 914210 - DNA, 4001 bp, Homo sapiens
atgacacagagtacacaccatatataatccccggtactgcgtacccaccgcataggacaccgcactgcacaacgagcactggtacacacgaataaaacaggtacggcggtcactctgcaaaagacaccgggcacggcgcacacatcgccagctcctcctcctcccggctcgggagaaaagcgcgaggagagactgcaagtgaaagtccgggtcccggcgccccccctcgtcccagccgcgtcctcagcagcttctccccggagctctgggtgggaggagggcggcggaccccacaggactgtcccggaggtccgcgaggacctgttgaggcggcggcctcgctgccggggtcgctcacagccccgggggaccgacgaatctccgccccgggcctcggggccagccctgcccgccgctcccgggctagcacacgacgtgccgcgccgacaaacgcttcctctccgcccgccacacgcccggagccgcgttccccgccggcccggactgcgcacgggcccaggaggcctgaccgaaagcggggcacagggcccggcgggcggtgctcacgcgactccgcggcttcccggcccgagcaggccccgcgcggtcctccggggcctcatcccggggcctcttccgcggccgcccaaggcgagtgggcgcgggccggcagcctccgcaggccccgccgccgccctcgcaggccccgccggcccggcccgccccgccatccacaaagctccccggcagctcggagctcttcgcgagcgggcgagcgaccgtcagcacccactggtgccgccgccgccccagaggccgcggccaggcaggctccaccgcgcgggccgcgccatctccacggacgcccccgcccgccccgccgccccgccgccgagctttccccaccattatgctccggctcctccaccgccgccgccgccgcgcccggccctcccctccggtgccgcctccttcccgccgcccggcgcctctcgggcctgagccggcgacgggcgcggggggcgggggggacgctcaggccgcctcctcctcctccctgccggcctcctccctcctccccggctcccccccgcccggaccccgccgccggctccgcgcgaagggctccgggctcgaggggcgccatgtttgtaatactccacctcagagaacgccgcggtcgcgcctgagcgagggaggctaggcggccgggtcgccgcgtgcggggtgagggccgggagggcaccgccgcccgcacttactcgcgtcttcccctggcgccgcgggcctgcggggccggagcgggcggcgggaagttgggcgccgccgcccgggaaagttgggtccccgcgaagccgcggcagccgctcacatggcgatgcgcgcggggcggccgctcggccccaccggcccctcggcccgcccgccctcggagtttattgtgtcgggtcgaggcgccccgcggccgggccgcgcactgggggctctagcggctggcgccggacttgcgcgcggccggcccggctcgcggccgcctcccgcccggggccggagccgtgcacgcggctcctaccttccccacgtcctgtcttcggcgcctctatccgaaatttgttggagcatattcctctgtctccacacatgcactccgtatccacacacacgtgaaggctacgtacgtgcaggcgcgctggagccgggagcgggcgccgaggccggggcgcgagggggcattgtcaggcgccgccgcagctcagccccgggtggacccggtgcctgcccctggctcgcggggtccggaacagcgaagtctgagaagtacgagtgcttctcttaacaacattgtttaggtagtctgaacagccctttactcctgtcatcaaaaagagcggtagggatacgctaagttccccgtttcatctctgcgcaaacaggaccgcgaaaagaacaggaccacccatcagcagccctgcaagaacactgcagatttgcgcgagaagtaggttatcttctatggagaggaattctagacctaatcagagacgatcccttaagactctggtttaagaaaggttcggagataagcatactttgatagcgttcacctgttttccctgaggacctttcgccactgggagtcggggaacacctgtcagtcagagtcctctgctctgaaattcggtgagtacaggacagcaaggtgttttcagggagaccgcattctcataacttttactacagtatagtgttataattgttctggtttattattagtgttgttaatctctcattgtgcctgacttctaaattaaactttattataggcaggtgtgtataggagaaaacgtagtgtaagtaaggttcagcactaccccgggtttcaggtatctattggccgtcttggcacgtgtccccacctgaaaagtcattaggaagagacggttgtaggaatttggggattctgataaaatatatcaatctgcttctacagctggtttctaagactgttagaatttagaaatgggtggtacttgaataggtctgtgatatacactagtcaaataaacacaatctttcatgctattcacagccctcaatctgatacatcccagagagtttttgattatctcaaagaacatcacagaataattgtaattcattttaagagtaaatatatatcgctaaaaatttagtagaggggttaaaacgtgtcagaagaaaagcaagccatgcctggtttgaatgttgggccaggaattccaacaatgaagagctttcagtgagtcacctttttaaacagtctgttacttcatctgtaaaatagaggactgcatggttctgtgtattttagagaaggcactcgagtaagacaacatcgtatcaataaaaggaagcttaccttttaggaaagaagtggcagcataactccacatttttttcccagttatactttgtagggatcatttaaaattttatacgcagataccatctctcattcaacctaatgtaagttagataacttaccctgattttcctgttggttttgcctagaatttaacccttggctctattttccaagtaaggtggtatttatccactaagatgaatacgaatatccctccccacataaaacgcaaaagccatggataatgtacaatagaagaaataaaactattaataaatactgacagctattctaattcactagtaatgacacattcaaacaacgtaacattgcttttcttcaaaggacagaattcttttccagtgataatgctactgatggttagcgaaatgaacgcttatatacactgctggcagaaaattgggttgatgtcaactctcttgaaatgcataccaagaggccattaaaacagtttgatttatctcatttgcccctcagctgaatgaatgtgtgtgtgtgggtctggggaccaaaggtttgaggtttggaggaagcccagaagaccagtaactaattgctgtgctagtatcttacatgacaaagctatactgtttatacaattgaatacagacagatttttacttcttgattctcctttttgcattggtgagtttcaaagcgggtgccactgagccctggggcttctcagagctgtcggggagctgtctctgcaggaccaagacgtgggaatactcctcccgcccccaatcagacagcactgctctattttctagaatgagtgtccagatcagatttcattacctggctattgggacagtatagtgtgtgtaaggtaataattgctcaaactcatttgacatgagttagggtttagtctcattatttattttgttaaatattatcaggaaatactgtggaagaaaatgttaactgtaactgtaataaagtgtggactgctgcagatggctgtgagtgtaaacgtcacagcaccttcattggcccatggcctccagagccgcttcctgctgcggggcagccctcaaaaatgtgtgtctagtgagtgtcatctcttaca

SEQ ID NO: 914211 - DNA, 4001 bp, Homo sapiens
actaactagtaactgcctaaggtatccaaatgaataagaaatgacaaattacactactttatgatatattcctgtttatctgtatttagcattcgatttccatagctctagatgacagtttagctctaattctgtagcataaagtgttttgaaaattgaaacttctctacagggagtggtaggtttacttagtctatgaagacacgctttattattggtttttatagatcctaatgatccaagaaagcaatttgttgaaaacccaaaacgaaagtactgttttcggagacagaaaaactgcaaaagaacttttaccagaaagtggaatgaaactgagtagaaaacgcatggtaggtaggacacaagaaaaggagaggggggagaaaatgagtttacatgtaaaactaggatggaatttttagaatacccaaatgctgcaaaattcaaaatttcaaatgattttatttatttataaggctgacttgtggctatttaaaataacggccaaaacaaaccaacaaaaacccctacaaaccccacataggtggcaatgtcggaaaatctagaacttcaaaagcaataaaattattggaactatttttcattatcttgtgtcagaatgtggaatttaaaatagaaacaattattctgggtttctttgcatacaaacatataaagcaaataaatgaaaacaaaaacataatttttcttgccttcctttcatcttattgtataattgagactttaggtccaggactttatctggatatttaataattacatcagctgtaattatggtcagcgtaagagtaagccgcatataacacaagattacagttaggactacccactccttaacttaagcaaatatttacagaacatctaccacacaggagacattgtgttaggtacatggtgttggtgttgcttttttttttttttaataactataatggtcattatacataaaagcacacgcatttaatacaatggaagtcagatctagtcagaaactcagactgtcaaatccacctacggatgaggcaatcatactagtatgtgccagacactgtgtaacttgattctgtgctagctctttaattctcctggcacctttatgcagttatttccgttttaagttaaggaaacgagggcacaatgctagaaggcactggccgggttcccagaccctagcagtttgactccagagcctgtactcttagtggcagccacatcttccattgctcagtccagcgcggcgacccgtgctttgcatagctccccagcaggggcaagcacgaagttaaacctgagtgacagaagctgctgttcttgcacacccagctaactggaatgtgcctcagtttcctcgtaaaatggggagggtaatgataaagtggcaacaccatcaagatgttagaagttgcaatgagtctgaatctgaaaaccgctcagagcagccctgtgctgcctaagcatttgttccacgtatctagtcctcgaacgctccgagcgacggaaggggccggggctgctgctcacccgcccagttccacccgccgcgggccgcgcctcgcccgggcccccagtccaagcctcccgttcccagcactccgccggccgctcctcattgacccggcccgcccgccgcgcaggccgcggccccaccctgggcccgcgtggccctcccgcccccgcccggcggccaggccctgcccggaggcgggagacgcaagccacgccatcgcccgggcccgcgccgccctcgttgcggccagcgcgctcccgagcggacccgagtatccgacgcaggccccgagcgccccaagtgccccaatcccactcaccgcgcgggaccagccaccactctggctcgctgggcgcctcccgcgccgccggaagtgagggcctcgccgcgctctggcgccgccgcggtcgctctaggaaagtggcggagcgaccctctatggtcccgggcccacccgaaagcgttgttcgtttcttcctgtggttttgttttctcctccccccaactcggaaggcgtcctgtgacccccgggacctcaagagctgtaaccgcccctgtgtgtggtcgaggcttttgaaaccaaactctagcctctccaacctagaaactgcatactttccacaaattttgagatttttgagaccctggtacttttcacgaagtcaccttaattatcaccaaaaagctcctgcaagatgggagtggttatactccatttacaggaaaggaaccaaggctcagagaagaaatgtgctccgttcaccgtgtgtaagcggacgacccagaattggaatggttctttgtggctccaaagtctgatttcaacacaccccttttgttgctcattagtaatgatctctctttgttcttattccttccaggctcctcctcagccatcctggccgtgctcagtcatctgaccagctgacctccgtgttcccccactccctggggagctcctccgccttttggcttccaatgctattgctgcatgctgaagactcccgcattggtaactccagtctgactgtgggacataaatgttattgaactttagacttgtatatcgaactgattactcaagagctgcatttgcatgtgtaatggacatcccaaacctaacataccccccaaatgaattcctgatatctacctaacctgttcttgcaacagtcttcttcccagggatgggtgaagatcccatcatctttccagttgctcaagccaaaaaccttgatgtcactgttgtctcttctttttttcatccaaaattcacctgtgatttatccacaaattctgtcggcttcatcgttaaaatatattcattatcaagccactttcaacacttccactgctataaccaccaagccaccttcatccaccttctggattattatattggcttccagacgggttgccctacagtctattcacggccccagagtaatcctcttaaacctaagttagatcatgtcattcatttgttcaaaaccttcaaaggcttcccaacttattagagcaaagccaaggacctcgcagtggcacccgatgcctctcatgatctgtctctttagttctttattgtgtctgcagtgctgaaaacagtgctcagcagggaacagacactcagtaaatagctgttgaatgaatgaatttataagatgccttattgtttacaaagtacttttacatcttatcttctggttattcatcttcaccatagtctcatgaagcacagattatcatatctgtcttgcaaatcagtaaactgaagcaagagaggctgacctgcctgaagtaatacagtggtttgttggtggaggctaaactaagtcataggttcattctcttaagttggggctttctgctctgtagggagctgtctctgcatatggcaaagcacaaagctgaatgaggtctggacaaagaagctccactcgcaatctagagagtatctggactattgcagtgattaaatgaggtaatgtaaggcacttagcacaatgtataacacagaagaaatgagagtcgttgttacttttattattaaattgttataagttggttgatgctggtggttggagagtttggggtaaagggcaatggccagagatctagaaatggtttaggaaaagcgtcaggagcaaacatgacccgttgggactgtctgctctatgtacactaaaataaaaagataatttttaaaaagccattttgttagtaaggtagttactaattaaaactaactcctttaatgtctacataaagatggattatccctttttcctatacctgaaaacaactgggccagccatagaagggccagaggtatgtcaactaaagcattgggtaaacgaggatggattttttaaaaagagagagacgaaagtcaggaaataaaggggtgtgtgtccctaagtgtggacagagtcctgggcagtaaggatggagaggagggagagccagaaaaata

SEQ ID NO: 914212 - DNA, 4001 bp, Homo sapiens
tccttcggctctctcagagttagccgagttagagctctccaccataaaacgccaggacagggcaaagagggggccgaccatctcaaacaccatgggattctaagtgggggctgaccatctcaaataccctgggagtctaagggttaattttgaggtaacctcctacagatggttttatggggacaactgaaaactctctttaaaaaagtacgacttggtaatttaaaatttactggaacagttaaatatgtagacatgctagtgaaagagaacaaatcaacctgagtataaaggatgaataactcattttacctaccctagagacacttatagtgtatagagagatatttcacaataaacctttggatgtacaaagatcaacagaataaaaaaggagtgaaactctcctttcactaggtctggaagagagaaggaagcttagttcttaaaaaacaccacagagagttctgatgcatagcctagttgaaaagcatttctagagtgattttgtaaccactgtgctgccatttaacgaatttcctcgtttttgactcatagttaataaattatcactattaatatgcatttttttgtgtacaggtaatataatatgttcatcaagatggtaagctccttgaagaaaagcaccgtggtttatcattctatctgttttgctgagaccacttagcactgggatgagtatggaatagcttggaatgactttcaatgtgagtgaaatgtctggcaggaaaaggcaggctttgagaggctccccaggagggcacagcccactgctctgaggagtggaataaattcttggaggcaggatgggccagtgaaaactctctgtgcagaccctggtgacatcatctgctagctacatgtccttagtatcttaatgtccctacatccatagctataaaataccgtactgggggcctgacaataaagaaaacaacacatggcacagggacatttcagggagatggcattttaggagaaatggaacgccaactcacccggaccctggtcatttcttactcccagaggggatggattcctggaaaggcagagttagggaaagagaaaaagccatgaaaatcaagtccagcaagactgcggggaaaaagttactccgctcctgcctctgacgcttcttcagtcacttccacccacactccctccatcaggtgagaggtgaagcattttctgtcaccaccttcatctctctccacagggctttcgattaaacaagccaagttttccccccaaaaccaagaggctaggtaaattccgcagccgccggcagctcgaagccgtgcccatttcctctgactttcccgatctctgtcctaaagttctagttaagaggagaagcttctcgggatggatttcggttgcccaagacgccttccccgacctcattctcaggagcctggctcgttcctgcggtgcgggggctcagatgcaagctcttttcagcgaaggcagtgctgcggacagaaacctcagtctcttacaggagcccccgtccgtcgcctaacgtccaccgaaaacccccctgcaataacgcccgtcacaggcgaggaaaaggccggcgtggccaaccacgaagcccccagccggcccaggccagagctcggccaggagggaggaggggccatcggaggcgcggccgctcagctgcagggccccacaggcttcggtgtggccgcagcccggccccgggggcgcagcagctcggaaatgcggcgccgggacacacgtgccgccgcgggccgcgcctccgctggtcgcgtgccctaccatcgccgccctcccggcttccgcagctcggcggcccagcgccttacccgcggcacacccatttcctgacccctgaacgcctctgccagcggctggggaagcccggccagtctcacctcccacgtggaaccccacgcctgcaggggccagattccggatgctgaccgctcgcgcgcctagggccccgaaatacaagtcccagcaagccgcgggcgaaccacgcccacttccggcgcgggcccctgaactctgcgctgtgcggagcgggattcttgggcggaggggaccatctttgagtcagcgacgcgtgtattcaagtcctcctcctcgttttttattacaaacaaataagaattattttaggaatacctgttaaggtgattttcatttgttaaaatactattgggggaaaaggatgtaaatacccataatttcatctttacctttcaaaacattctgaagtgaatatttgccattcggcatcttccatctcacctctgaagttcatccatttaacagatattaattgagagccaactgtgtaccaggagctgttcaagatgcttgcacaaaagtcactgccctattctagttggggaaacaagcaatccataaatatagtaaatatatggcgtcgtgtgtgtcatgaggtggtactgaaagcatagagctgggcggggtgtggcgaggtgcgtttgtgggtgtgtaggactggaggtgtactttgcaattttaaataggggatcttggaacaaacacaggaggtgagggaattagacaagtggctcccagcagtcagaactctcctaaacgcacacaagggttgttgataccaggattttacgtttatttcacttctcaccgagtgacacagagctacccatttggtcttttcccaattcctttctttcagatttattttggagaggaaagagatgttgcctggacctctcttctacatcctcccccttccttggtgtattagtttccaattgctgtcacaacaaattaacacaaacttagtagtataacaaacatgtattctcttaaacttctggaggtgccaagtctgaaatcaagttttactgggctttataaagtcagtgttggtggggctagttcctcctggaggttctagatgagaatatttctttgccttttccagttcccagtgactatttgcattccttggcttatggctcgctcctttatcttcaaagtgcatgactgcaacctctgccttcatcatcacatcacatgctcaggcactggctcctcgtgggtccttctaataacgactgttgtgattacatcaggcccagctggctaatctgggataatctcttgacgtcaagatccttaatttaatcacatttcaaaaaaaatccctcttgccatagaaattaacatccacagcttctgggggttaggacatggacatatttgggggactattattttcagcctgcgatgcttggagaggcccacgtccccttcggtctcctcctcagagatgctgtcttaccttttgcctggggaacacaaaatgtctcccttggaccttactcctctcctcattcttcattggaaaaccacagagcttttccctatttagatttaccacccttgccctgaccttcacttcctcatgtgctcacttctctcctcactcaatttaagaggccatggagcatggttatggccagtcctgtgtatgtgccgttacccttaactctcttgtcccagtctttcttggttttattctcttgatggaaacccaaatctgcttgaatccagttcctggcctgcgcctgtacggcagaggttgtttgagaaaaccacatggctgggatgattggtttcattttcagtttataaccattaagttcaagtgggcccttcacgctgcctggctatccttctacatttcttagtccatccattctcctaaatgactatttcacaggttctactctcttttcattatttatttatttatttttttgagccaggctggagttcagtagtgcgatcttggctgactgcaatctctgcttcctgggcacaagcaaccctcccacctcagcctcctaagtagctgggactataggcttgcgccaccacaccaggctaatttttgtatttttttttttaagagatgaagtttcaccatgttgttcgggctggtctccacc

SEQ ID NO: 914213 - DNA, 4001 bp, Homo sapiens
ccttcggctctctcagagttagccgagttagagctctccaccataaaacgccaggacagggcaaagagggggccgaccatctcaaacaccatgggattctaagtgggggctgaccatctcaaataccctgggagtctaagggttaattttgaggtaacctcctacagatggttttatggggacaactgaaaactctctttaaaaaagtacgacttggtaatttaaaatttactggaacagttaaatatgtagacatgctagtgaaagagaacaaatcaacctgagtataaaggatgaataactcattttacctaccctagagacacttatagtgtatagagagatatttcacaataaacctttggatgtacaaagatcaacagaataaaaaaggagtgaaactctcctttcactaggtctggaagagagaaggaagcttagttcttaaaaaacaccacagagagttctgatgcatagcctagttgaaaagcatttctagagtgattttgtaaccactgtgctgccatttaacgaatttcctcgtttttgactcatagttaataaattatcactattaatatgcatttttttgtgtacaggtaatataatatgttcatcaagatggtaagctccttgaagaaaagcaccgtggtttatcattctatctgttttgctgagaccacttagcactgggatgagtatggaatagcttggaatgactttcaatgtgagtgaaatgtctggcaggaaaaggcaggctttgagaggctccccaggagggcacagcccactgctctgaggagtggaataaattcttggaggcaggatgggccagtgaaaactctctgtgcagaccctggtgacatcatctgctagctacatgtccttagtatcttaatgtccctacatccatagctataaaataccgtactgggggcctgacaataaagaaaacaacacatggcacagggacatttcagggagatggcattttaggagaaatggaacgccaactcacccggaccctggtcatttcttactcccagaggggatggattcctggaaaggcagagttagggaaagagaaaaagccatgaaaatcaagtccagcaagactgcggggaaaaagttactccgctcctgcctctgacgcttcttcagtcacttccacccacactccctccatcaggtgagaggtgaagcattttctgtcaccaccttcatctctctccacagggctttcgattaaacaagccaagttttccccccaaaaccaagaggctaggtaaattccgcagccgccggcagctcgaagccgtgcccatttcctctgactttcccgatctctgtcctaaagttctagttaagaggagaagcttctcgggatggatttcggttgcccaagacgccttccccgacctcattctcaggagcctggctcgttcctgcggtgcgggggctcagatgcaagctcttttcagcgaaggcagtgctgcggacagaaacctcagtctcttacaggagcccccgtccgtcgcctaacgtccaccgaaaacccccctgcaataacgcccgtcacaggcgaggaaaaggccggcgtggccaaccacgaagcccccagccggcccaggccagagctcggccaggagggaggaggggccatcggaggcgcggccgctcagctgcagggccccacaggcttcggtgtggccgcagcccggccccgggggcgcagcagctcggaaatgcggcgccgggacacacgtgccgccgcgggccgcgcctccgctggtcgcgtgccctaccatcgccgccctcccggcttccgcagctcggcggcccagcgccttacccgcggcacacccatttcctgacccctgaacgcctctgccagcggctggggaagcccggccagtctcacctcccacgtggaaccccacgcctgcaggggccagattccggatgctgaccgctcgcgcgcctagggccccgaaatacaagtcccagcaagccgcgggcgaaccacgcccacttccggcgcgggcccctgaactctgcgctgtgcggagcgggattcttgggcggaggggaccatctttgagtcagcgacgcgtgtattcaagtcctcctcctcgttttttattacaaacaaataagaattattttaggaatacctgttaaggtgattttcatttgttaaaatactattgggggaaaaggatgtaaatacccataatttcatctttacctttcaaaacattctgaagtgaatatttgccattcggcatcttccatctcacctctgaagttcatccatttaacagatattaattgagagccaactgtgtaccaggagctgttcaagatgcttgcacaaaagtcactgccctattctagttggggaaacaagcaatccataaatatagtaaatatatggcgtcgtgtgtgtcatgaggtggtactgaaagcatagagctgggcggggtgtggcgaggtgcgtttgtgggtgtgtaggactggaggtgtactttgcaattttaaataggggatcttggaacaaacacaggaggtgagggaattagacaagtggctcccagcagtcagaactctcctaaacgcacacaagggttgttgataccaggattttacgtttatttcacttctcaccgagtgacacagagctacccatttggtcttttcccaattcctttctttcagatttattttggagaggaaagagatgttgcctggacctctcttctacatcctcccccttccttggtgtattagtttccaattgctgtcacaacaaattaacacaaacttagtagtataacaaacatgtattctcttaaacttctggaggtgccaagtctgaaatcaagttttactgggctttataaagtcagtgttggtggggctagttcctcctggaggttctagatgagaatatttctttgccttttccagttcccagtgactatttgcattccttggcttatggctcgctcctttatcttcaaagtgcatgactgcaacctctgccttcatcatcacatcacatgctcaggcactggctcctcgtgggtccttctaataacgactgttgtgattacatcaggcccagctggctaatctgggataatctcttgacgtcaagatccttaatttaatcacatttcaaaaaaaatccctcttgccatagaaattaacatccacagcttctgggggttaggacatggacatatttgggggactattattttcagcctgcgatgcttggagaggcccacgtccccttcggtctcctcctcagagatgctgtcttaccttttgcctggggaacacaaaatgtctcccttggaccttactcctctcctcattcttcattggaaaaccacagagcttttccctatttagatttaccacccttgccctgaccttcacttcctcatgtgctcacttctctcctcactcaatttaagaggccatggagcatggttatggccagtcctgtgtatgtgccgttacccttaactctcttgtcccagtctttcttggttttattctcttgatggaaacccaaatctgcttgaatccagttcctggcctgcgcctgtacggcagaggttgtttgagaaaaccacatggctgggatgattggtttcattttcagtttataaccattaagttcaagtgggcccttcacgctgcctggctatccttctacatttcttagtccatccattctcctaaatgactatttcacaggttctactctcttttcattatttatttatttatttttttgagccaggctggagttcagtagtgcgatcttggctgactgcaatctctgcttcctgggcacaagcaaccctcccacctcagcctcctaagtagctgggactataggcttgcgccaccacaccaggctaatttttgtatttttttttttaagagatgaagtttcaccatgttgttcgggctggtctccacct

SEQ ID NO: 914214 - DNA, 4001 bp, Homo sapiens
atattttgtagagacagggtttcgctgtgttgcccaggctggtctcaaactcatgagctcaagccatctgcccgccttagcctcccaaagtgctgggattataggcatgagccactgtgcccagccacttttcagtgttttttgtagaatggctgcttttggctataaaatggcaagttcatatggttcaacctagtaggtatacattcatttccccatctaatttaagttcttcatgaacatattttttaatggctacatacttttctgtgatccatgataatttgcctgaccaatcccctgtgatacatctagtgggtaaataattttttcactattttaaataattctataatgaatatctttgttcacaattttcagttaaaattactaattattgccttagactagatatctaaaaaatgaattactgcatttgaaaatgtttaaggctccttgattcaggtagtcaaaaagtgttttatctggccgggtgtggtggctcatgcctgtaatcccagccactccagaggccgaggcaggagaatcacttgaacctgggaggtggaggttgcagtgagccgagatcgtgccactgcactccagactccagcctggacgaaagagggagactccgtctcaaaacaaacaaacaaacaaacaaacaaaacaaaaagactccgtctcaaaaaaagaaaacaaaaaagtgttttatctatttgtagggtatgagagtgtctcaccatgaatttcgattatttttgggaggggagagggatgaattcctgaatgtgtaagaaaagaaataatggaaactggatattgccaggcagggggaggacattcaatgaaaaataaagtccaagcaaagatggcacatgaccaatgttggggaaatgtggggaaaggcaggagtacagagaagcaagtgaccattactgggaaagaccacaacctcctgcagaggtagaagggcagtaagtgaatagatcaggtaaaacagtagcacataggaaacatcctggaagtccctgctttcgacacagactgcaagataccagataactcctggaacgttgaaaaagggattcctctgctgtggattagcctggcttataacttgccatgatgcctggtgctctttgaggttcacttgctattatataatgatctttatcttgctccatctgagagatcacatttcagaaactcacagggattgggtgattgtgcagaaagcaaaatcagtcccacctctggcttataaaggatggaaaaggtatggtttttgagacaacccagtaaaactaccattctccaatttttaccaagttctttagctgcttagaatagtcagaaaacatccttttgtgtcaaaaaggaagtaggaaacaaagaagccaatgggcaggtgtccaagttcacatgtccttacccaccaagaccaagtttctgtagttgcccagcatcacagctccgcacagcttcctgggagcagagtccaggtgacctcactcctcctcggtgaaggccacagaggcatccttgaatgtaactggttcctaaaacattaagcacattcctcctcaacaaacaaccatctgcacaaatgccctgcaagtggggtgaagtcagcagcactggaaaaggtaagaaaggtatagaagaagtttgcagctcagggatctgagtgagctaagccaagttttgttggaaagtctttcctttctcacttacttggctacttccatccaaatcatttccctcctgcccacaacatatctacgctcaagttctcagctactgaatctttctgtgtcactctcttcttgtgtcattgctgagttgtcatcttcaccccattcccaccattatcctgacaaccttaacactcgcaggaacaatttacccaacactctgacctcacatttcttaatctccacagtgccaatgatctcagccacatttcatcaaactgtaataaccataatcgggactagtccactacctggacccctctactcttaaaatatgaatctctctaatatcctacaagttaaaaatcacttcctatgctttctgttcttcctcttctaaactaagtagttgaacattactgggaaaataaaatagcacatatacacacagccataaaacactctcctgagggatcccttgacttaaaataccattcactgccaaatatttatttccagccctaacctcttacctcacctccagactccacctttctaccttttaacatctacactgggacgtctaaagtgcttaaaacttaacaggccctagctgggcacgatggctcacggctgtaatcccagcatttggggaggccgaggtgggcggatcacttgaggtcaggagttcgagaccagcctggccaacatggtgaaacctcgtctctactgaaaatacaaaaattagccaggcgtggtgatgtgtgcctgtagtcccagctactcaggaggctgaggtggaaggatctcttgaacccgggaggcggaggttgcagtgagttgaacaaacaaacaaaaaacaaaacaaaacacttaacaggccccaacagaactcctgctccagcaatatccatcagcatctgctcttccccagtcatccccattttagtaaacagccacacgaaccactcaattgctcaaaccaaaatccccgatgtcatttcattctcatcctcacatctcacctatcacccacctcctttaccgctaaagcatatcggcatccacccagctcccctgccctgcactgtcacctctctaggcctaggcagcacttgctctcacccacatcaacctcctggttggtctgactctactcctgctcccccaaacatgagttttccacatgacagccaaggtgatcttttaaaacaaaaacaaggccaagcatgaaaccctccaaaggcttttcagtggccatccagtaaaatccagactcttcatcctggcccatgaggctctcctgtcacctccccaacctaggcctctcttatgatcatattcagcaccagtgacccagcaggcccttgaactgcatcaaactcattgtagcttctgcactagctgccctctccattcctcatgattcagctctcagtccaactgttgcctcttcagaaagcatgtcactgaccatctaatccactggagcatcctgtatatatcattttcctggtttaatttaattaatttcttcttataacttatgccttaccttattttcttattcacttgctttcttatttactgtctttccctgctgagatttaaattccccaagaatagagaggctgcctcatttgttcatgactgcatccccaagacctcaagcagggcctggcacataaagggagtccaaatatttactcagtcaatgtcagcaaatctggttcccttcagggctctgtctgatgaagcaatgcttcttaaactacctgtggtgaagaaccagtttttttttgtttttgaaactctcaatttcagtacttatatctgcacagtgcatgggctggcaccactctctaaggcacaatttcaaaagtaaagtgatagaatatataaaaagtcataaaggctgtctcataaatttgatcagctaagccagctttggcctgaggctaaagaggcaccactccctccttccttgggcctgccctgcaggagtgacatgacttacccaacttgtcaccagtggggaaggatgagggtaaagatgaaggtaaggatgggtgctgtctcccaagctttctgttcaaggtcactggtctccattctgaggaagagggctggaaaaggaggctcaagccccggagtaaaggtgggacaaacaaacagaagcaaaggttgctgccttcaagctccatcaccacatcctttagcaaggcatgacccatggcatattaaaagcaagtggactggctgctcttcccaaccagaccttctcttcagaccacagagaaaaaa

SEQ ID NO: 914215 - DNA, 4001 bp, Homo sapiens
ataatattacaataacttggataattctgcaaaattaaaaatcctgcatctaatttgccaactgcactattttggatttgctacttcagttttatttcccttaatgtcaatttttgcctatttctatttttccattttcaaaacataaacccttataaacttcagaaatccatttttaaacaaactgggaataaagaaacaagaatctcacctgggatttgttcattttccgctcttagtggaggaaggagagctgaaggattagaaaggaagaatgtcaggagagccttcgccggccttgcagttcggagattcacctgcctatacaggtccacacacaagatacttacgtgtccatgtgtggctccgatatatgctgagctcagacatgacacttttcactgagtgaatgtaaatatttcttattgatttattaccaatttaggttctgtgacacagaaaaattaaaaacatgaaaagatgagtttaacaagttaacagtaatctgaaggaaaaaacactatgggtttgtcaaaattccttgtagggaaaaaaaaaaactgaggccatattgtttatctgtttacctgttaacaccattaatgccctgaggttagataatgcaaaagacctctaaaaaaagggataggatgttaaatgcaagtttaaaaatgtttgttctaacttgctaacaattcctcaaaaggatcttttaatgagaaactgtgatatagagtaacaaaatgggcagcagtggctcgggaaactgcagacttgacttctaatctcagttctgcctctaaggaatgacaagatctgaactactcacctcctcaaactcaattttgtttttccatctttcaaataaggtcaaaacagataacccaagtatgacctgactgcactaccatccggcggggatatcaggccaagagaggaggaagctcagcagctcatctggatgtgcccggtgttcgcggaggggtgataacagcatttctttcgctgtggccgtgagcctttcacccgtccctgccctcagactctccagaggtgacgttcctgttagcctgcgcgcccacccctcagctccagctcacctctctcttcttaaatttgtcccagaccttgcaccagcacacagactccgacggcttcaggatactgtgccatgattacacataatacataagcgaacgcgaaacgtgtaaataattacttgggataggagggcggtcagagccagcaggggccctggtggtcagctaggccagccccttcgctcctgcactccacgggcagagaggcccttggggccggtgcaggagccgtctccctcgggctctcccagggaacgcacacccaataaatacagcacctaaacaatgaaagtgctcaaaacaaccccaggcggcaagtattcctaatatccgtaatttacagagaggaaaaccgagtctcccgtggataattgtgtctaattcatttgtcgcggacctggcgcagtcgctctcccccgcagccccgcctcctccccgcgggctcagggcacaaaaagcgcacacgcacacatcaaacgccatgcgcacgcgcacaacaaacgtcacacgctacgcacgcgcgtgctgtcccctccccgcagccagttccctccccttcgggccagtgcgcattgcctaccccgtgctacaggacttcgctgagcgccaggcgcagggactggacgcatacggacccccgggagccccggaactcgcgttcccacgccagacctcatccccttctgacagagacgccctcgtcccaccgtcgccgcaggcgccaggggtccctccccaccgccgaggtctagccgccgcccgcccgccttcagggcagcgcggggaccccctggccctcgcccagtgctccggggctcacccgccgctcctcgccgcctccggaggcgagggattgtttcccacaagggactggagtccagggaaggactcgcctggagcgggaggcggggatgcacatgcgcagagggagaggccgagcgcccgagttaggctggtggatgcgatgcggggcttggaagcggcgctagacggtgcctgtcagctctggccgcaaccctcagttgtaaaatgaggctgatagtgcctacctagcaggggttttatgagaattggaggcgcttacgttgtaaaagcatttaaaccggtgtctgacacataaattgttcagtatatttctcacaattatatatcatgctggtcatcataaggctctcctgcaaaacagccttgtatagtgggttgagagattactgtctcagttacccactcctgcttggaaccaggattctgtcagtgtccccagaggttgtggatcaaatcaatgtgcctgttagacacaagccaagagaaggaaaggtgtgcttgaattcattcacgatcatgcatggtaacgtttaactgaaagactggaagagaaaactaaaatctgtgaccagtatggttattctctggaataaggaaaaacagaagctagcaattcaagacccaaacataaaattgtttatatgtttaaaaaaaaaaaagccgtttgagtaacaaatttgaagaagaaagcacgcactcatttcccaaaaccaaccatactttacccagaactacactacacgtacattcttttacgtgcacatctggcattttcagcacactatgagcatgtgcgtgtgttacaacttttcatttaaaaaatcaactcctgggtcattgtccacttttttaaacttttcatttgctcataatttcagatttacagaagagttgcaaaatagttcctatatgcctttcacccagattccactagtgttagtattttacatgaccatggtatatttatcaaaactaagaaaataacataggtacaagtactattaactgaactgcagagtttattcagacttaagcagttcttccactaatgccctttttctgttccagcaaccaatcaaggatattgtcaccgggggtccttgctcccagagctcccaagatggtggtgggctgcttccgagatgggggcaagcctcatgttctctgacctggggttcttggcctcatggattacaaggaatggaattttgggctatgtggtgagtgttatagctcaattagaagccgtgggtcacggaagagaactgtggaacccagtgactagtgttcagctcgattaggaccaacctgggacttagctgtgcaggaacaatggcaagcctttagcccaacttgggagcagcaatgggcacctcgctggatcaggagcacagcggacaccctgccagatccggagggatggaagtcagcggcgggtctgcgaaggccgcaaacagcagcggtggacagcgagcgaaagctcagctcaagccgtaacaaacacggaccagaagagagtgcagttgcaagatttaatagaatgaaaacacagctcccatgcaaagggaggggacccaaagtgggtagctgttgccggctccaatgcctgggtttctatcccgatcattgtccctcccgctgtgctcttaggcaatagatgattggctatttctttacctactgtttttgcctaattagcattttagttagttctctttactacctgattggtcggatgtgagctaagtgcaagccccttgtttaaatgtggatgcagtcaacttctcagctaagcttagggattcttagtcggcctaggaaatccagctagtcctgtctctcagtatcacagtacatttacttgtcatgtcttagccttggccagtttgtaatagtttcttgctcctaccttgtctttcatgaccttgctatgaagatgaaagcacgctctcttgacttcagtcctcccaccttggcttcccaaagtgcttgggattacaggcatgagcaaccacacccagcctatagtttaactttaaaacaagaacgataatgatcccttcctgaaactaaccc

SEQ ID NO: 914216 - DNA, 4001 bp, Homo sapiens
aaagaccatggttaacaatatatgcagcagaccaggcaagtaatgcaaaggcaaaaacatgcactagccttgactatgatttggtggcctttgccagaactgattcaggtgagtttaggtgagggaataaggttgcattcatcagattgaaacataaatgagaaacacagaaacaagtcggaactgtcagtgattcaacctagaaataagaacgagctgacacaaacagttagggaaaactgttttgaggacatgcagtccctccattcctccacatcgtcaaggttttattcctggatcaaacaggaccatcaaacctcagcgtttgttctcctgaaaagcatatgcactgagttctgctctgtaactgtgttctttgtttctacaaagaaatacttatagacaatttactgcatttatttcagaattgttactagaacaattagagataatattacaataacttggataattctgcaaaattaaaaatcctgcatctaatttgccaactgcactattttggatttgctacttcagttttatttcccttaatgtcaatttttgcctatttctatttttccattttcaaaacataaacccttataaacttcagaaatccatttttaaacaaactgggaataaagaaacaagaatctcacctgggatttgttcattttccgctcttagtggaggaaggagagctgaaggattagaaaggaagaatgtcaggagagccttcgccggccttgcagttcggagattcacctgcctatacaggtccacacacaagatacttacgtgtccatgtgtggctccgatatatgctgagctcagacatgacacttttcactgagtgaatgtaaatatttcttattgatttattaccaatttaggttctgtgacacagaaaaattaaaaacatgaaaagatgagtttaacaagttaacagtaatctgaaggaaaaaacactatgggtttgtcaaaattccttgtagggaaaaaaaaaaactgaggccatattgtttatctgtttacctgttaacaccattaatgccctgaggttagataatgcaaaagacctctaaaaaaagggataggatgttaaatgcaagtttaaaaatgtttgttctaacttgctaacaattcctcaaaaggatcttttaatgagaaactgtgatatagagtaacaaaatgggcagcagtggctcgggaaactgcagacttgacttctaatctcagttctgcctctaaggaatgacaagatctgaactactcacctcctcaaactcaattttgtttttccatctttcaaataaggtcaaaacagataacccaagtatgacctgactgcactaccatccggcggggatatcaggccaagagaggaggaagctcagcagctcatctggatgtgcccggtgttcgcggaggggtgataacagcatttctttcgctgtggccgtgagcctttcacccgtccctgccctcagactctccagaggtgacgttcctgttagcctgcgcgcccacccctcagctccagctcacctctctcttcttaaatttgtcccagaccttgcaccagcacacagactccgacggcttcaggatactgtgccatgattacacataatacataagcgaacgcgaaacgtgtaaataattacttgggataggagggcggtcagagccagcaggggccctggtggtcagctaggccagccccttcgctcctgcactccacgggcagagaggcccttggggccggtgcaggagccgtctccctcgggctctcccagggaacgcacacccaataaatacagcacctaaacaatgaaagtgctcaaaacaaccccaggcggcaagtattcctaatatccgtaatttacagagaggaaaaccgagtctcccgtggataattgtgtctaattcatttgtcgcggacctggcgcagtcgctctcccccgcagccccgcctcctccccgcgggctcagggcacaaaaagcgcacacgcacacatcaaacgccatgcgcacgcgcacaacaaacgtcacacgctacgcacgcgcgtgctgtcccctccccgcagccagttccctccccttcgggccagtgcgcattgcctaccccgtgctacaggacttcgctgagcgccaggcgcagggactggacgcatacggacccccgggagccccggaactcgcgttcccacgccagacctcatccccttctgacagagacgccctcgtcccaccgtcgccgcaggcgccaggggtccctccccaccgccgaggtctagccgccgcccgcccgccttcagggcagcgcggggaccccctggccctcgcccagtgctccggggctcacccgccgctcctcgccgcctccggaggcgagggattgtttcccacaagggactggagtccagggaaggactcgcctggagcgggaggcggggatgcacatgcgcagagggagaggccgagcgcccgagttaggctggtggatgcgatgcggggcttggaagcggcgctagacggtgcctgtcagctctggccgcaaccctcagttgtaaaatgaggctgatagtgcctacctagcaggggttttatgagaattggaggcgcttacgttgtaaaagcatttaaaccggtgtctgacacataaattgttcagtatatttctcacaattatatatcatgctggtcatcataaggctctcctgcaaaacagccttgtatagtgggttgagagattactgtctcagttacccactcctgcttggaaccaggattctgtcagtgtccccagaggttgtggatcaaatcaatgtgcctgttagacacaagccaagagaaggaaaggtgtgcttgaattcattcacgatcatgcatggtaacgtttaactgaaagactggaagagaaaactaaaatctgtgaccagtatggttattctctggaataaggaaaaacagaagctagcaattcaagacccaaacataaaattgtttatatgtttaaaaaaaaaaaagccgtttgagtaacaaatttgaagaagaaagcacgcactcatttcccaaaaccaaccatactttacccagaactacactacacgtacattcttttacgtgcacatctggcattttcagcacactatgagcatgtgcgtgtgttacaacttttcatttaaaaaatcaactcctgggtcattgtccacttttttaaacttttcatttgctcataatttcagatttacagaagagttgcaaaatagttcctatatgcctttcacccagattccactagtgttagtattttacatgaccatggtatatttatcaaaactaagaaaataacataggtacaagtactattaactgaactgcagagtttattcagacttaagcagttcttccactaatgccctttttctgttccagcaaccaatcaaggatattgtcaccgggggtccttgctcccagagctcccaagatggtggtgggctgcttccgagatgggggcaagcctcatgttctctgacctggggttcttggcctcatggattacaaggaatggaattttgggctatgtggtgagtgttatagctcaattagaagccgtgggtcacggaagagaactgtggaacccagtgactagtgttcagctcgattaggaccaacctgggacttagctgtgcaggaacaatggcaagcctttagcccaacttgggagcagcaatgggcacctcgctggatcaggagcacagcggacaccctgccagatccggagggatggaagtcagcggcgggtctgcgaaggccgcaaacagcagcggtggacagcgagcgaaagctcagctcaagccgtaacaaacacggaccagaagagagtgcagttgcaagatttaatagaatgaaaacacagctcccatgcaaagggaggggacccaaagtgggtagctgttgccggctccaatgcctgggtttctatcccgatcatt

SEQ ID NO: 914217 - DNA, 4001 bp, Homo sapiens
cattaatcatcagacaaatgcaaatcaaaaccataatgggatatcattttaccccttaaaacagctattataaaaaaggcaaaaaaataacaaatgctgggatatagagaaaggagaaccctcatacaaccttggtggcaatgtaaactagtacagccactgtggaaaacagtatggaggttcctcaaaaaattgaaaacagaattaccatatgatctagcaatctcactgctatatatatatccaaaagaagggaaatccgtatattgaagatatctctgcactcccatttttatcgcagcactattcacaatagtctagatacagaatccacctaagtacccatcaatgcatgaatagataatgaaaattgtggtatatatacacaatggaatattattcagacataaaaagaaggaaattttgtcattgcagcaacaaagatggaactggagggcattatgttacatgaaataagccaggcacagaaagacaaatatcatgttctcactcatacgcaggagctaagatagttgatctcatgaagatacgatgtagaatgatggttaccagaggctgcgaagggaagtagggagtgaggaatgaagagaggttggttaatgggtacaaaaatacagttaggtagaaggattaagtcctagtgttcaatagcacagtatggttacaagtgttagcaataatttattagctatcagaatagctagaagatttcgaatatttgcaacacaaagaaatgataaatgaggcggtggatattgtaattaccccgatttgatcatgacacattgtatgcatatatcaaaatatcacatgtaccccacaaatatgtacattatgtaccaaaaaaaaaaactaaaataagcagcaaaaaccacttccagctagcatggtgcttacgaaatgcctaagctcagttatcagccaatgagaggcattataagatcaccaccataaaatggaggaactgatgaactgcagttttcatctttaaaaaaattttttgtcccatttcctgtctttagaaactagcctctgggctggatgggattcccagcttctcctgtaaaatgcaaaattgagggctcaaattgtggtttcaatttacacgtttcacagtcctctgagaagagactaaggttggaggatgcaggaaggccttaaataattcaccttttgactcaagtgctctgaagattccccaagcatttttggaaacagaacactacctggttgagactgggttcaagtacaccacacagctacgttctggtggtgctcaaggggcaaatgctgtgctaaatacaagtcaagactggattttagtgtggcaaggcgcattaactcagaggaaaaagtgaggatttacatcccacctgctaatactgtgggtaaacggatttctctctctgaatctttaatagtcacatttattttaatagagatggttaagtcgaaaggatggttacgatgattaaatgagccaataatgaaaacagcatgttttgtaataatagaagcagctcacctttattgagtcctgtatcatactttacatctattaccctattcagtacccaaaggcccccatcatttgccagatgcgcgtcgagccgcactgggaccacctacagacgctggaccagagcccacgtccctgcggctttggagcgccgcgtctgcagcggccagcgcgcctcacatggcggctccggtcacgtcacacaatgcggctgctccgggcgcccactgcccagcaccgcaggcctcctctggccgcccctcaagcaggtcgcgcaaacgccattccgggcaggggcgccagcgcagccagccaacctccccaccaggcggctcccacccagggccctccgcggaggccgctccggggccaggaggcggcttccaggctcgagaccccgcctcccaggccctgcccgcccgcaaaagccttcgacacacctgcagggtctcggcctctgctcccggcccgcgccgggcccaggccccgccctttgcggcccagcccagacccggaggcaccggagtcctctccccaccctagggcgtaagaccaaaaaaacgccaatgccagaaagaagacactgcacatgcgcagaacgtttccctagccctactccagaactacgcttcccagaaggcccggctgcgactccatcttggatgacgtcgtgaggcgcggccgcctccagcggcctgagtgattgctgtcgggtttccgggagagggcgctgtccttgctcagtgatggccggagagctgcaccctgcacgtctgggcttgaagacagaaatccaccgtgaggtgctccaaggaacactgatgggcagttttgttaaagtgattgaactccgtgggtacaggagtacgtggagtaatgaaggataatgccctgtaaccgcttcctcttaggaatgctagctttcacaattgtgcaaacggtacgcgaaacgtaataaactacaaaatatgtataagctaaaacagaaaacgagtataccacttcccaaaagcaaaagcgcttaatgttaggtgaacatccttctcatgaatttacacaaattttaacctaatggtatagagtatcatgactatcatttcactaaggaatatatatagtcatccctccttatcctgggggtgcatatctatggattcaactaagctcagaatgaaaatacttaaaaattctatcttactgaacatgtacaaagtttcccccttgtcattataccctaaacaatacaataaaactatttacatagtatttacattgtgttaggtgtacaattaatctagacataatttaaaatatacaggaggaggtgtgtaggttatgcaaatatcaggttattttctaccagagacttgaacatccctggatttgagtaatccagggaggtcctggtactaatcccccgcggatacagagagaggacttggctgtatatgtaaaacaaattatatatttcctggtcaataactttattacattaaaacatgtagaatcatctagaaaaaaacgtatatattgtcatgtgtataaacacacatatatatacatataaaaatatgcgcacataatacacacacacacaccacctttctggatgggaagtattgaggaaataatttaaaataaagcctcttgccaacccagaaaattctctccacagatggagaaaagaacaaaacagttacattattgaataaacattaaaccagactgcgatgtgcgtcacaggcaacccactaatgagtttatgaagacaggaagaactatcattttttgtattagccggtctggtacaacgcattctatttcctcaaggtaaaaataacttgtcctcaagtaagatgactgtacagcaacatttgctatgcataattcatctgaaattcacctgataattagggtagccatcagtgttagttaattgccattatgcaaatgaaaagtaaagtttctggtatctctatgacacgcaggtagttaaccgcgggtagccaggagcctaggagtttaccacagaggcagggagatggggtgcaatcttccttgatgcttacatttcaaagacatgacccaaggccattaagaaagaccttcctgggttgttaaactagcaagaagcttatttactttttaaaaagttttgctatatctcacagggacagagaagggatttacaattacaagttttcttaaggaaatgctgtaagaaaagagaggagtaaaggtctttttccctttttgcaagaaggaaaattcagttgttttatttttttctttgagacagagtctggctttgtcacccagactgggatgcagtggcatgatcccggctcactgcaacctctgcctcccaggttcaaggaattctctgcttcagcctcctgagtagctgggattacagtcgcccaccaccacgcctggctaattttttttgtatttttagtag

SEQ ID NO: 914218 - DNA, 4001 bp, Homo sapiens
gactcgcctttctcttgctcttgaagatacaagaataccagttctgaccaagtgtaaacacttgtcaattcttggaaaagaaagacctactctggactccaagcccaaggcactccaactaggttaagtaacttgcccagaaacccacagaaaataaggagtcaaagtggagcaaaggttcaaatccaagactttctggatccaaaatgtatgctcttacattagacagttgtctagttcctaatcactaaagagctggtcagaatgcttataaaattgaacagaaaggaagagagtttgaccagattgaagtgctctttcagatcctaggaatcctcttgtatgtgctctaaattattttttaatttttttaaaattctgagtcaagattttgctctgttgcccaggctggagtacagtgactcaattacagcttgctgtgactttgaactcctggactcaacggatcctcccacttcagcctcccaaataactaggactacaggtaagcaccaccaagcctggctaatttttaaaaattattttaacttttttttgtagagatcgggtctcattatcctgcccaggctggtctccaactcttggcctgaagtgaccctcctgcctcggcctcccaagacatgtaggcatgagctactacacctggcccacatgatctattttttaaaaaaaatatttcttcttacttcaggatcctaattactgaattcttatacttttaagaaatgcagtggttcaatgcatactccttgtttccctctaatttgtcctatcaaaatgctggccttctgatttaatgaaataatagtatgatgctaccattctttgttttgtcaacctaagcacctggttcttcttgacaactgcacattctgctacatgctgtgatgaccaggagaatcatttaaatttttatttggaggactcacttccaacttggaacacaagctgcaaaggaattccctaccagcatgccagcacatcatttggaagttcaaggtattcttgctcaacagctgcacacacattaaaagtccctggggtacatggcgcctgctgcctggggttggactctgtcgccggggattccagaaattagagtagaattcacagctctgcctctccacctgctgtgaggtcttcaagttacaactccgccgcctatcagggacctccgtgattagtaagggagaaattgtcatatttttctccctagatcacaggtctgaggaagcagtttccccaagattttgtaaaagtggctttataattaaaaacattgattttcctattagaaaggctactatatcctttggaaaaagcttagaagtagtccgtgagtcttggcttcttgccgtggctcccccaggatatgatcttgggcgagtaacccagcagccctgactctgcttccccacttattaaacaggttactaacactgtcctatcaggtaggacaatgagaaggaaagaaccaaacaagaggagtatcagacgagaccaccagacttaagatctaaaatccggcgtcctctggagggcggatgagaagaggggtacacttggcggtctggaaaatgtcctggggccagtttcaggtttaggagcttgtgggtagcgtggtttcccacacgctgcctggcttcctactctcccccgcaggggctgcctctcctcccaccccggaaggccggcaccggcttcccgcactcgctgaagcccgcacggaggccgggtgagcctgccgcggcctccccctcccacgccccgacgccatgggccctgctcctctccgcagacgctgccctcccgcctcaggccccgggccccgggcaccgggcccgccctgcgtcctgaacctcggcatcccgctctccggtccacgggaccctgctctgcggaccgccgacctctccgctcgcggctggcctccctcggggcccgggccggccaggcctgctcatttccttggcggccgctggcataaggcggccacacggagggcccgggacagcggtctgatggcgcagccccgccttgccccggcgctctgacccggccagcggcctcactcaccgcagcggcgcgtgcccgcagacaaaggccggcgccgagcccgcagcagcgccagcgccggcgccggcggaatggactacaactcccaggagtctccccgcgagcccgcccgccgggccgtgggtctcggcggccccggcttcccaagagctctgtgggaaatgtagttctctggcgcgccctgcgctcgggccccgcaggtccctagggcgcggggacctcaagccgtcccgtttggactggtaatccggagactcacagcggtgacctgtcagcggacgcggagccgggacggagccacggccgctcagattagcaggatctgattgacagcatcggggtagcagacgctgagccagggactcaggaatacagggttcttgcagggcgtcgcggaaggaaacgaagtttttgggagaaatccgtttgataaagccttggcggcttcgaggtcatgtgttgagcctctggctgcatgaacaaaagcgaagcccgctttcatggagcttctgtgaagagcaacaggaacacaggcagtccagtcgtcctgagatactgggaggagcatggttgcttttgaacacgtaggagataaagcctctctaataatgcctgtttttttttttccttcactctgtctcccaggcttgagtgcagtggcacggtgtcgcctcactgcaacctccgccttctgggctcaagtgattctcctgccccagcctcccaagtagctgggactacaggtctgtgccaccatgcctggctaatttttttgtatttttagtagagatgaaggttttaccatgttggccaggctgtctgatatgccttaagcctcttttaaacgcacttttccaggatcggggccacatcctggagctgttctgcctggccgggtgtatctctgggtccctgcctctggagcccctctccgtagatgtgtctgtccatcctctttcgtgaaggactaataaagaatgcttcctcttgctatgttcttgttctctaccccaaagccacagatttgttaaatcaaacaacttaatttcactcaatatgcaaaggtgtctgtaagtaataagttgattcctaaatgttagcttttactattgcacatcatttctgaatttcattcaacatttatccgttgaatccattttaagtgctgacactggggatacgaatgtgagcaagacacactccgtgctcctagggaggagctgacagtctggtggagcaaacaaacaccaccttcctcacatgggggtcggggtgttgcacagctaagtcccagagtgtgtggtgcaaactgtcctgaagctccccattcctgaactgccccaggtggctcctctcctcactcctcccaagtctgagaaaggggtggagggcggcacacagcaaaggccaaggctcagagtcctaaggctgcggcctctgcttcacacaagggtacataggttctgttaaggtcaagaccggctgtggacactaggacaagtttcagatcctgccgtgaaggtacatgacaaagcattggtgggaaaaggtggctgtgaggggggaccatcgtcacttttatagatctgcataaattcccttaaggcgtctcaggaaagtggacacattgaagggcccaaagcaggggagaaagctgttaggattggggttgatgtgaccccagcctccatagacagactgcccagctgcaaaatggggcacatcctcacccaccacctgcatcttaaggcaaatactcaacaaaagggagggtgtggggtgagggtgaaagggaaatcatccgcagtgtagatttgaaaaattaccaaagaacaatttcctcactttgcaggcatttcaaaatattaggggaaggacagataattcaataaatggtgttatga

SEQ ID NO: 914219 - DNA, 4001 bp, Homo sapiens
aaggttcaaatccaagactttctggatccaaaatgtatgctcttacattagacagttgtctagttcctaatcactaaagagctggtcagaatgcttataaaattgaacagaaaggaagagagtttgaccagattgaagtgctctttcagatcctaggaatcctcttgtatgtgctctaaattattttttaatttttttaaaattctgagtcaagattttgctctgttgcccaggctggagtacagtgactcaattacagcttgctgtgactttgaactcctggactcaacggatcctcccacttcagcctcccaaataactaggactacaggtaagcaccaccaagcctggctaatttttaaaaattattttaacttttttttgtagagatcgggtctcattatcctgcccaggctggtctccaactcttggcctgaagtgaccctcctgcctcggcctcccaagacatgtaggcatgagctactacacctggcccacatgatctattttttaaaaaaaatatttcttcttacttcaggatcctaattactgaattcttatacttttaagaaatgcagtggttcaatgcatactccttgtttccctctaatttgtcctatcaaaatgctggccttctgatttaatgaaataatagtatgatgctaccattctttgttttgtcaacctaagcacctggttcttcttgacaactgcacattctgctacatgctgtgatgaccaggagaatcatttaaatttttatttggaggactcacttccaacttggaacacaagctgcaaaggaattccctaccagcatgccagcacatcatttggaagttcaaggtattcttgctcaacagctgcacacacattaaaagtccctggggtacatggcgcctgctgcctggggttggactctgtcgccggggattccagaaattagagtagaattcacagctctgcctctccacctgctgtgaggtcttcaagttacaactccgccgcctatcagggacctccgtgattagtaagggagaaattgtcatatttttctccctagatcacaggtctgaggaagcagtttccccaagattttgtaaaagtggctttataattaaaaacattgattttcctattagaaaggctactatatcctttggaaaaagcttagaagtagtccgtgagtcttggcttcttgccgtggctcccccaggatatgatcttgggcgagtaacccagcagccctgactctgcttccccacttattaaacaggttactaacactgtcctatcaggtaggacaatgagaaggaaagaaccaaacaagaggagtatcagacgagaccaccagacttaagatctaaaatccggcgtcctctggagggcggatgagaagaggggtacacttggcggtctggaaaatgtcctggggccagtttcaggtttaggagcttgtgggtagcgtggtttcccacacgctgcctggcttcctactctcccccgcaggggctgcctctcctcccaccccggaaggccggcaccggcttcccgcactcgctgaagcccgcacggaggccgggtgagcctgccgcggcctccccctcccacgccccgacgccatgggccctgctcctctccgcagacgctgccctcccgcctcaggccccgggccccgggcaccgggcccgccctgcgtcctgaacctcggcatcccgctctccggtccacgggaccctgctctgcggaccgccgacctctccgctcgcggctggcctccctcggggcccgggccggccaggcctgctcatttccttggcggccgctggcataaggcggccacacggagggcccgggacagcggtctgatggcgcagccccgccttgccccggcgctctgacccggccagcggcctcactcaccgcagcggcgcgtgcccgcagacaaaggccggcgccgagcccgcagcagcgccagcgccggcgccggcggaatggactacaactcccaggagtctccccgcgagcccgcccgccgggccgtgggtctcggcggccccggcttcccaagagctctgtgggaaatgtagttctctggcgcgccctgcgctcgggccccgcaggtccctagggcgcggggacctcaagccgtcccgtttggactggtaatccggagactcacagcggtgacctgtcagcggacgcggagccgggacggagccacggccgctcagattagcaggatctgattgacagcatcggggtagcagacgctgagccagggactcaggaatacagggttcttgcagggcgtcgcggaaggaaacgaagtttttgggagaaatccgtttgataaagccttggcggcttcgaggtcatgtgttgagcctctggctgcatgaacaaaagcgaagcccgctttcatggagcttctgtgaagagcaacaggaacacaggcagtccagtcgtcctgagatactgggaggagcatggttgcttttgaacacgtaggagataaagcctctctaataatgcctgtttttttttttccttcactctgtctcccaggcttgagtgcagtggcacggtgtcgcctcactgcaacctccgccttctgggctcaagtgattctcctgccccagcctcccaagtagctgggactacaggtctgtgccaccatgcctggctaatttttttgtatttttagtagagatgaaggttttaccatgttggccaggctgtctgatatgccttaagcctcttttaaacgcacttttccaggatcggggccacatcctggagctgttctgcctggccgggtgtatctctgggtccctgcctctggagcccctctccgtagatgtgtctgtccatcctctttcgtgaaggactaataaagaatgcttcctcttgctatgttcttgttctctaccccaaagccacagatttgttaaatcaaacaacttaatttcactcaatatgcaaaggtgtctgtaagtaataagttgattcctaaatgttagcttttactattgcacatcatttctgaatttcattcaacatttatccgttgaatccattttaagtgctgacactggggatacgaatgtgagcaagacacactccgtgctcctagggaggagctgacagtctggtggagcaaacaaacaccaccttcctcacatgggggtcggggtgttgcacagctaagtcccagagtgtgtggtgcaaactgtcctgaagctccccattcctgaactgccccaggtggctcctctcctcactcctcccaagtctgagaaaggggtggagggcggcacacagcaaaggccaaggctcagagtcctaaggctgcggcctctgcttcacacaagggtacataggttctgttaaggtcaagaccggctgtggacactaggacaagtttcagatcctgccgtgaaggtacatgacaaagcattggtgggaaaaggtggctgtgaggggggaccatcgtcacttttatagatctgcataaattcccttaaggcgtctcaggaaagtggacacattgaagggcccaaagcaggggagaaagctgttaggattggggttgatgtgaccccagcctccatagacagactgcccagctgcaaaatggggcacatcctcacccaccacctgcatcttaaggcaaatactcaacaaaagggagggtgtggggtgagggtgaaagggaaatcatccgcagtgtagatttgaaaaattaccaaagaacaatttcctcactttgcaggcatttcaaaatattaggggaaggacagataattcaataaatggtgttatgacaagggctagacattggtggggtcggggagttgaatgtttacctaactcccatgccaagagaacctccagatggattaatgtaaaatgggaaacacagagccacaaaggcccagaagaacacatggattaatcttcttataatcttgtcatagggaaggctttcatttttgttt

SEQ ID NO: 914220 - DNA, 4001 bp, Homo sapiens
cgaccagcctaggcaacacggtgaaaccctgtctctattaaaacgcaaaaaattagccaggcgtggcagcatgcgcctgcagtcccagctactcggggggctgaggcaggagaattgcttgaacccgggaggcagaggttgcagtgaaccgagatggggacattgtactccagcctgggtgacagagtgagactccgtctcacaaaaaaaaaaaaaaaaaaaaaacaaacaccatatcgactcttacaaatctcacaaagtccactgcaaaataaagtagggaattaataaacaacttaccttgttcattttgttctgttcttggaaagacggagacaactctgaagatacagctgagttagaaaaagaggaatggggtcatgaaagatttggcctgcctggcaactcctggattcttccgccctaagaagccatacacacccactaggtaaaatgcttcctctgggagagtatcaatgtcctctgacactttggaatagggggtagaaatggtggaagaacacttcggaataggcggtagaaatggtgaaagaataactccaacataattatgtagctcttgggcacaagattttttaccgggtgaaagtaaatatttgcttcctaaggatttcaatctccctcggtgttcacaaaaaaaagtataatgacaatattggccaaacaagttaacaatatatttaatgaaggaacattaacactaaaaccattgtaaaaaataggactaagctatctattttcccagtaatgttacttaacctctggtgagtgactccacagaaagccataagcggcagtgcttcaaagaaaaaatcagttttaatttcttcatctaactttgttgctatttctcaaagggatattttaaacttgctttgatgtgtgtggaaaagtagacagtactggcttaggggtcaggagatgtgacttagtcttccctactaactgtgatcctgaacaagtcagtgaccttaacaaacaaaaaaacaaaaaaaatctttttcttctaacaaatgaggcaaaattaggtaattctttgtttttgtttttttttgagacggagtttcgctcttgttgcccagtctggagtgcaatagtgcgatcttggctacctgtaacctccgcctcccgggttcaagcaattttccgcctcagtagctgggattacaggcatgcgccaccacgcccggctacttttcgtatttttagtagagacggggtttcaccatgttggtcaggctggtctcgaatttctgacctcaggtgatccacccgcctcggcctcccaaagtgctgggattacaggcgagagccaccgcgccaggccaaaattaggtaattcttgaagatctttcctgagtgcaagatcaagtcaggacagaggaacagcaaataccaagatgcagtgatggacctgactggaggtcagttcggaacctaaagaggatgaatgcaatacgtgcaaccgagtctgccggtctggcgggcgactgcacccgcctttccccgcccacgtaccgcggcgccctagcacacgcgcacaggctagacaagagaactgcccctcccgcaaggctcagcgcgcggactgcgcaagcgcacatgccctcctccgcggcccccacaaatggggcgacacacgctgcgtaccctgctccgtacagaggccgcgcctttgaggaaccggcctagcgtcgtggcccacacgctgcagccccgccgtccccgccttcccctatgaggtccccgggcctcctccccaccacttggtaccggccccctgccgcccgccccaggagtcgcgcggggctccctctctctccctgcccaacccactggggcttaccccactccctcgtcgggttgcattcgccatagaaaagcgcgtagacccttgaaatcccgggaccgcctcccacgcaaaacctgagaaaaacaaaaggaaaggcggaaacgcagacgtagccggcggacgaggcatgcgcagagcccacgcgcacagcttgatgctgttggcgccctacctggaaactacctttcccgtgaggccgggcgagcagcccttcggattggtagagaagtgccccgctaggcagtgggcagatgcggtctgagttggtgctggaactgcctgcagccctggctttccccggggcactccaaagggatatactgcgggggaggtctgtgggcagtttagacgcagacgctcaaggaaaggaccgctgcgtgtcattttccgtttaaatgttaggaaatagatctcgtccatacagtttaaaagactttcatgctatcagcggttctttgggagcgggggaaaaaaggggaaggtgcggccggaaagctacttcatcaaaatggttaaagcaataaacggaaattgtagctcagtaaggaactagacataatctgaaagaagaaaataaatgtcacgtatgatttcctctgtgacattaaaattgcttgactaaatggaaatacttttagtctatctgtacctttcttaggaagacaaaattcctaaaagaatatcaacaaatttttgttatgtattttttctctttgatctttagtgtattctgtacttcacaaaagcattctcaactttatctagaataagtaaaaacccaaatgaacagccagtatacattttaaaaagcaggaaaaaaatgcctaaggaatatctgtatctatctacatctatctatataatattgctctattcaaagtagtttggcacctgctccatggaaataagacagcttaagagtattctttaatgtgtagtagatacagcatttcaaaacagtgagggaaagaatggagtattccaaagagcatgtcattccgagcaatttggaatgtagagatatacatagatcacacatgataaaatctcacatgtatacaatacttaaacatttaaaccactaaaagagtaaaaatttttgaaaattgacaagtggaccaggcacagtggcccacacctgtaaccccagcactttgggaggcggaggcaggaggaccacttgatccttggagttcaagaccagcctgggcactatagtgggacccccatctctacaaaaaactaaaaataacaattagcctggcatgtaggcaggcacctgtgatcccagctactcaggaggctgaggttggaggatcacttgagccccgggctgcagtaagccatcatggcaccactgcactccagcatgggtgacaaagtgagaccttgtctcaaaaaaaacaacaagggatgtgatgccaaagacagaaactataaatttaatatcagtcacattttataatagagaaaaataagcaactccattccagcaaaactttttaagtccattatgagaattgaaagtaatgcaaatatggccaggcgtggtggctcacgcctgtaatcccagcattttgggaggctgaggcgggtagatcatgaggtcaagagatcgagactatcctgcccaacatggtgaaaccccttctgtactaaaaatacaaaaattaggtggggcgttgtggtgcacacctgtagtctcagctactcaggaggctgaggcaggagaatcgtttgaacccaggatggggaggttgcagtgagccaagattgcgctactgcactccaacctggtgacagagcgacactgcgtctcaaaaaaaaaaaaaaagaaagaaatgcaaatatttgagtaaaaatacgtgaaacatttattgaaatttacattttttaatttatgctttatatactgaaaagttctttatttgatgcataattttatgagttttgacaatgcatagatttgtgtaaccaccactacaagcaagacacaaaattgtttcatctctgtcaataaaattcctccatgctacctttttaaagtcagattctctcaccactcttagcctcttgcaaccgctatctattctttgggcctatatgtttgccttttttaggatattat

SEQ ID NO: 914221 - DNA, 4001 bp, Homo sapiens
ggcacggtggctcacacttgtaatcccaacactttgggaggccgaggcgggcggattgcctgagctcaggagtttgcgaccagccagggcaacacggtgaacacatctctattaaaatgcaaaaaattagccaggcgtggcggcctgcgcctgtagtcccagccaatcgggaggctgaggcaggtgaattgcttgaacccaggaggcagaggttgcaaggttgcagtgaacagagatggagacactgcgctccagcctgggcgacagagcgagactccatgtcacaaacaaaacaaaacaaaaaaaccatactgactcttacaaatctcacaaagtccaccgcaaaataaagtagggaattaataaacaacttaccttgttcattttgttctgttcttggaaagacggagacaactctgaagatacagctgagttggaaaaagaggaatggggtcatgaaagatttggcctgcctggcaactcccggattcttctgccctaagaagccatacacacccactaggtaaaatgctccgtctgggagaatatcaatgtcctctgacacttcggaatagggggtagaaatggtgaaagaacaccctaatacaactccaacataaccatgtagctcttgggcacaagatttttcatcaggtgaaagtaaatatttgcttcctaaggatttcaatctccctcagtcttcacaaaaaatgtataatgacaatattggccaaacaagttaacaatacatttaatgaaaaaacattaacactaaaaccattgtaaagaataggactaggctatcgattttcccagtaatgttacttaacctctgatgagttagtccacagaaaaccataagcgtcagtgcttcaaagaaaaaatccgttttaatttcttcatctaactttgttgctatttctcaaaaggatgttttaaacttgctttgatgtgtgtagaaaagtagtactggcttaggggtcaggagaagtgacttttagttctccctactaacaaactttgatcctgaacaagtcagtaaccttgacaaacaaaaaacaaaaaaattattttttcttctaacaaatgaggcaaaattaggtaattctggttttttgtttgtttgtttgtttttgagacggagtttcgttcttgttgcccagtctggagtgcaatggtgcaatctcagctacctgcaacctccgcctcccgggttcaagcatttctctgcctcagtagctgggattacagtcataggccaccacgcatggctacttttagtatttttagtagagacggggatttgccatgttggtcaggctggtctcgaattcctgacctcaggtgatccaccctcctcggcctcccaaagtgcaggattacaggagagagccaccgcgctaggccaaaattatgtaattcttgaagatccttcctgagtgcaagatcaagttaggacagaggaacagcaaataacaagatggggtgatggacatgactggagggcagttcgaaacctaaagaggatgaacgcagaacgggcaacagagtccgtatgtcgggcgggcgactgcacccgccctttcctacccaggtagggccgcgccctagcacatgggcgtaaacacgctcaaccagagaactgcccctcccgcaaggctcagcgctcggaccgcgcaagcgcacatgccctcctccgcggcccctacaaacagggcaacgcacagggcgtagcccgctccctacagaggctgcgccttagaggaactggcgtagcgtcctggtagacatgctgcagccccgccgtccccggcttctccgtgaggtccccgggactcctcgccaccacctggcactggcccccggctgcctgctcctggagtcgcgcggggccccctctccgtccctgcccaacccgcggaggcttacctcactctctcttcgggttgcattcgccataagagagccggtagacccctgaaatcccgggaccgcctcccacgcaaaacgtgagacaaacaaaaggaaaggcggaaacgcagaaacgcagaggtagccagtggatgaggcatgcgcagagcccacgctcaaagcctggcgctgttggcgcccaacctggaaactacctttcccgtgaggacgcgagagcagcccttcgggattggcagagaggtgccccgctaggcagtggacagatgcggtctgagttggtgtgggaactgcccgcagccctggctctcccggggcgacccaaagggatgcactgcaggggaggtctgtgtgcagcaagtgtgcaggttagacacagacgcctcaaggaaaggacagctgtgtgtcagtttcactttaaatgttaggaagtagatcttattgatacagtttaaaagactttgacactatcagcgattctttgagagcagggatgggggggatgggggaggtgccacaggaaagctacttcatcaaaatcgttaacgcaataaacggaaattgaaaagtcagaaaatagacataatccgaaagaagaaaataaatgtcacatgatttcccctgtgacattaaaattgcttgactaaatggaaatacatttagtctatctgtacctttcttaggaagacaaaattcctaaaagaatatcaacaaatttttttatgtattttttctctttgatctttagtgtattgtgtactttacaaaagcattgtcaactttatccagagtaagtaaaaaactaaatgaacagccattatacgttttaaaaagcttgaaaaaatgcctgagaaatatctatatctatctatatatataatattgctctattcaaagtagtttggcacctgctccatggaaataagacaccatgattgagagtattctttaatgtgtagtaaatacagcatttcaaaacagtgagggaaagaatggagtattccaaagagcatgtcattcctaacaatttggaatatagagatatatatagatcacacgtgataaaattcacatgtatacagtattgaaacatttaaacgagtataaatttttgaaaattgacatgtgggccaggcacagtggcccacacctgtaatcccagcagtttgggaggtggaggcaggaggaccacttgatccttagagtccaagaccagcctgggcgttatagtgggacccctgtctctacaaaaaattaaaaataacaattagctgggcatgtaggcaggcgcctgtgatcccagctactcaggaggctgaggttggacgatcacttgagccccaggttgcagtaagccatcatggcaccactgcactccagcctgggtgacaaagtgagactttgtctcaaaaaaaaccaaaaagggatgtgataccaaagacagaaactataaatttaatatcagttacattttataatagagaaaaataagcagctccattccagcaaaactttttaagtccattatgagaattgaaagaaatgcaaatatggccgggcatggcagctcacgcctgtagtcccagcattttgggaggctgaggcgggcagatcatgaggtcaagacattgagaacatcctgcccaaaatggtgaaaccccttctgtactaaaaatacaaaaattagctggacgtggtggtgcgcacctgtagtcccagctagtcaggaggctgaggcaggagaatcgcttgaacccgggaggtggaggttgcagtgagccaagatcgcactactacactccagcctggtgacagagtgagactgcatctcaaaaaagaaaaaaagaaaaaaggaaatgcaaatatttgagtaaaaatatgtgaaacatattgaaatttacatttttaaatttatgctttatatactgaaaagttcactttatttgttgcataattttatgagttttgacaaacgcacagatttgtgtaaccaccaccacaagcaagatacaaaattatttcacctgtcaataaaattcctccatgctaccttttgaaagtcagattctcta

SEQ ID NO: 914222 - DNA, 4001 bp, Homo sapiens
ttacaagtcggctgaaaaacacactactaaaatgattgctgctcatctccatgacagcagaggctttttggtttcaagtgacttttgcacataatattttatgttgcacttaaaacctacagcccatgggccaaatccatccacatcaatttctgcattatttactgctgccgtatcaatttctgtattatttattgtaaaccacaatggcagtggtgagtaactgagacagagactctatgctcctaaaagctaaaatatttactacctttacagaaaaagtttgccaactcctacctagaatcaaaaaggtgggtaacattccctctccacagaagagaacactgaagcaaggaagtaaagccattaatccaaggtcagatggaaagtggtagatccagaagtggaattcaagtttcctcccctcctgaatttggcacactaaatgcaaaaccgtgccccattttaaggatacaatccgagatgcgtgaacacaagaacatatgaaaactcacatgaattgtcaaaatgggtcctaagacagcaagctcaggacctatcctcaagtacaggaaagattactcaagctatgcacagtggcattaagcctgcaatcagctgaaaatttttcaccctgaaatttttgcctttttttccttcaggtattgctgtgatgacataaaccaaagtgctaatcgtaacaataacagaccccatacgtgagtttcactgaaacctggggacccaatgtgtcaaataccatttggcataagtggggccatggccaagatttttattataatagagtgttctggacggatttgtcttgtctcagatgctattttatatgacaacctctagggatggtcagtgtgtgaaccaggtaggtatcagcatactctcttaataacaggaagttctggtttccttgtaggaatgcattatcttcaccctagcaacagatgactgttggcaacccaattctgcaagcagtgcatatcttctattcctccatgaaaggtttctacttaaatgtaacaagcattggacccgaaatgagggagcccagctggggtctttgggtgaaaagtgtcctcaacctcttcaaaagcagaggtgcaaatggtccccaggcagcgaggcaggcaaggcttctaggtgaagcccccggcccccagagaggggaacctcttcctgtgatgggtacaccgggatgtttaaccactggttttctgggaacgagatgcaaaccctggctcagcatagggccaaagacgctgacaagaggtaaggaaaggggaagtcaggattctaagggggcaatgggaaaagggtggcattttggatggggaaatgggtaatcacacactccagagcacgcaggcttttatgggcccagaggaaacccagtccactgggctgatgaagagccctaagtgactctgccagagaagggcaggctggcaatgaccctgccccggggtcccagctctccccgccccctctccgctgcgtgccagcccacgggtgccagagtggattcgtgtgcacatgagttcctgctggtgggggccgggaagccggctctcccaactccccgccatgctgcgggctcggggaccccctccccagccccggccaccccggcaggtcccctccgccgagccgcgggcgcagatggccggcggccgcctcttacccgacttgttgctgctgctgctgcagccgccgcctccggtgctgatgctgcgggagcgaagcggttttcagcagagccgtaaatcagactgagccgggccggctcccactccccgccgcacctccgcgccgggaccggcggcgtccagggcggagcgaggcgcggctagccagcgggggcggcgctcgcgggcaccgtggggcaccgcgccgtgggtgcgggggttccggaacgccgcggcccagggctgccacctccgcggggaacacccttgctctgcccagctggcgggagcatcatctgcccccccgccacccagccgggagcccgatccgactcaggattacactgacatcactgcgagagatgctgggatcattccccgggggagggaaggaaagacgcgtgtcagcctcgcagtcgcggcgctttctgcaggccctggcaagcttttttgcactagtttggggggagcgggagagtgtggatgaggatgcagcatagctgggcatcttctttgaaaatctacccgttggaaggtccgggtatttaattaggacctcttcatcccaagcagcagggcgagaatgtcccaaaataactaacccagagagtacactccagccttcctagccaagtgtcctgaggctacgttaacaggcagaactaaatctagtaaagtgcagggattaatgaacaaacagttaaagcaacaagatccctcacctacacccccatttctgaggcggacgcccctttccctggagaaaaaatttgtcctcctaaagaggggatgtcctgaagagaagacggcaaatcattccttctgaaggactctgatgtctcagcttgctgggcttttgcttttttttttttttttttttttttttaacctgttttggtttacccctactgtaactcctgaaatgtgaaacctagataaaagttactgctgggttttcttgttcaaagaagagaagagattctgttcatctgtagacagttaatgcatcctcttgacttctcagggtgtcttttctcaaggcttgctgttactcatttcaacacccgattttattttaacggtaaagagctcaacagttatcttagttgaaattttgttttgtttttgacaaatgaaaacaaatgaattgctttgttttttcacaaatgaattatcacatcaaatgcaatgaagatcccaagctctggcatcagacttgattcaaatcctggttctagggcctgggtcaagtaactagacttttctgttccttcaattcctcatctatgaaatgaagataatcaagacctacctcttaatatagcggtggatcgaatgtgctatgatgatggaggtaaaaaccctgcctgacagggacacacactgataaagtcagctgttatcgttgttgctacttcatttataattattattaattccataaaaaaggggcctacacacatttaaaaagcaggaaggagaagaggaattaatatgtactaacttctacgtaaatggagataggctattgtgctggggtgtgtttgctttgaaaatattatatctcattgaagttactttttgactcgctctcaagactattccaagaatcaatttatttagtacaaaatcttaaagtctgaaagatacactcattggagtgccaagttatctccgtcatcttgtgaggtgcctgcaggttaacctcttacacccactgccttcatggcaaaacataacaaaagcatgctctggtcctcccttcccccccgccccttttttttttttttttttttttttgagacggagtctcactctgtctcccaggctgtagtggcgcgatatcagctcactgcaacctctgcctcttgggttcaagcgattctcctgcctcagcctccctagtagctgggattacaggtccctgccaccacccggccaatttttgtattttcagtagagacggggttttgccgtgttggccaggctggtcttgaactcctgacctcaggtgatctaccggcctcggcctcccaaagtgctgggatcacaggcgtgagctaccgcgcccagccagctcctcccatttcttagacagctgctacttcttttttggtcctaagttcctcccctgttaaatgagaggatggagattttcaaagtccttttctcaccctaaaaatataaaatattatcaaataattatggagaggttattctgtgcagggcctaaagctgagtattgtgggaaattcaacttggtcaacaggcatttaggaccttaagtggttctcaaag

SEQ ID NO: 914223 - DNA, 4001 bp, Homo sapiens
caaaaaataaaataaaataaaatacttaagaagacacctaaccaagagggtgaaagacttttacaaggaaaactataaaacactgctgaaatcagtcatagatgacacaaacaaatggaaacacactccatgctcatggatgggtagaatcaaaattgtgcaatgaccatactgacaaaagcaatctacagattcaatgcaattcccatcaagataccaccatcattcttcacagaactagaaaaaacaattcatatggaacaaaaaagaacccacataatgaaagcaagacaaagcaaaaagaacaaatctggaggcatcacattatctgacttcaacctatactataagggcatagtcaccaaaacagcatggtactggtataaaaataggcacataaaccaatggcatagaataaagaacccagaaataaagccaaatacttacatccaactgatctttgacaaaataactcaaacataaagtggggaaaggacaccctattcaacaaagagtgctgggataattggcgagccacatgtagaagaatgaaactggatcctcacttctcacctaatacaaaaatcaactcaagagggatcaagtaattaaatttaatacctgaaaccataaaattctggaagataacgtcagaaaaaatccttctggacattggcttaggcaaagacttcatgaccaagaacccaaagcaaatgcaacaaaaacaaagataaatagatgtgacttaattaaactaaaaagcttctgcatggcaaaagaaacaatcagcagggtaaacagacaacccacagagtgggagaaaatcttcgcaataagaaaatgttcgcaatgtatacatccaacaaaggactaatatccagaatctacaaggagctcaaacaaatcatcaagaaaaaaaaaaacagtcacatcaaaaagtgggctaaggacatggatagacaattctctaaagaagatatacaaatggcctacaaactatatgaaaaaaatgctcagcatcactaccgatcatggaaatgcaaaccaaaatcataatgagatatcatctcacaccagtcagaatggctactagtaaaaagtcaaaaaataatacacgttggtgtggatgaggtgaaaagggaacacctttacactgctggtgggaatgcaaactagtaaaaccatgatggaaaacactgtggagattccttaaacaactaaaagtagaactaccatttgatccagcagtcccactactgggtatgtacccagaggaaaagaagtcattatccaaaaaaagatatttgcacacacgtttatggtagcacaatttacaattgcaaaaatatggaaccagcccaaatgcctatcaatcaatgattggataaaaaagtgatacatacacacatacacacacacacatatacatcatggaatactactcagccattaaaaggaatgaaataatggcatttgcagcaaccttgatggaattgtaggccactattctaagtgaagtaactcaggaatggaaaaccaaatgttgtatcttctcactcataagtgggagctaagctatgaagatgcaaaggcataagaataatacaatggactttaggggcttgggggaaagggtgggaggcagtgaggcataaaagattacacactgggtacagtacacactgcttcagtgatgggtgcaccaaaatctcagaaatcaccactaaagaacttattcttgtaaccaaacgcgacttgttccctaaaaacctattgaaatttttttaaatgcaaaaaaaaaagaaagaaagaaaaggaaagaaaagaaaagaaaaggcatttatttcttacggttatggaggctgagaagtcccaggtcaaggggctgtatctggtgagggccttcttgctgttggggactctgtgcagagtcctgagatggtaaagaacatcacatagcaaggggactgagtgtgctagctcgggtctctcttcctcttcttacaaagctagaagtcccagtcccgtggtaattcattaacccgttaaactattaatccagtaatccataaatggattaatctattcattagtgcagagccctcttgactcaatcacctcttaaaggcaccacctctcaatactgccacattggggattaatttttaatatgagttttagaggggacaaacattcaaaccataatactgtctaaagacagaatggacacttataggcaggagatagtgttggttgctggaggtgtccaatcagatgacttttcatgttttttccaagcttaagaattattacctctccatttagtgggtacttataatcaagtttcagtgttagggggaacagagacatgaaacttgtgaaagatactgatgtttgtgacaacaggtgaatactagtgttttctctttaagctttgctctctatagtttgttcaaacggagttgttgtggaagttgcctaagtcagtgacagtcattttgcttgttaacagattccactctgtcctccccactctcgtatttcttaaagtaaaaaatgttaagtgcttacaaaagtaccagcactgtgtttagtactctatatgcgttatcttattatattttcataacaatattttgagaaacctaatactatcattttgcagatgaaaaacagagatgtaataattttcctgagctcacatgactagtatggttagcagaataatggtctccaaagatgtccatgtcctattctcagaacctgtgaatatgttacctttgcagatatgaagaagttaaagatttgagatgagaagacaattctggattatctgtgagtcaaatataatcacaagagtacttataagaagaaaacaggagagacagagcctgagaaggaagtgtaactacttaaagagtcagagagagatttgaagatgctactggtttaaagatggaggaagaggccatatctaagtaatgcaggtggcttctagaagctgaaaaagacaaggaaacagatactcccttagaacctccagaaggaacagagccctgccaacaccttaattttatcatagaaaactcatttcagacttttaactccagaattgaaaagtactaaatttgtagacttagggttgtctaaggcaggaggaaggagattgtgatttagataaaaaggggatagtaagtaagaattcacaaatggtggaaatggtatagggtgagtaagtggtagggattcaaagacaaacttcactcacttcacagttttacctggagtattagacccttggccaatgtggacatttcagctggaggcatcaaagcaacaaaactgttgcaaaatttgctagcaacaatgaggggtggctgaacctttcatggaaacatttattttcacagattctcatttgtctcaaaccaatttaaaagaagttggctcatgacttgaaccacgtgtaataaacatactgttctgattggcttgccactagtgggagttcatttcacactaaaactcaatatgcacttggacacaaccattgtctctagtcatgctctttcagtaatgttcctgactgtctcaaatatgctttagtgaatcttcccattaggcattcttaatcatgaaatactgactgctaccacatttgctatgatcacttgacaacgatgagtgaggcaaatcatttatatagtcatgaactagatttactcttgattgtgacccctacacaatcatgtttgttggaagcaccccaaattctgactaaggagcttgaatcaacaagttaatagtcacaaaatggtcttgaaccaatagactcaatagccttgatcaaactttcccttcttttggactcaggtaaagggaaaattacctaactccttttttgtccagtaataatttgtgattagctaaattaacagttatggtgaaaattatcagaaaatacccattatgcttacaataattcacaaatctaaaaatac

SEQ ID NO: 914224 - DNA, 4001 bp, Homo sapiens
caagttaggaaaagccaaagagtggaacataatactttcattaaaactgatgctaaacaaaaatactcaggttttaatctttattacaaaccagagaatcccaacaaggttttgaaaaaagcgatgtggtatttttcagcccagttttttttgtttgtttgtttgcttttttgagacagagtcctgccctgtttgttgcccaggctggagtgcgatggcatgatctcgactcaccgcaacctcctgcctcagcctcccaagtcgctgggactacaggtgcgcaccaccacacccggctaattttttgcatttttagtagagacggggtttcaccatgttggccaggctggtctcgaactcctgacctcttgatccacccccctcagcctcccaaagtgctgggattactggcgtgaaccaccgtgcccagcccagcccagtttttttggaaggaaaacgaacttgctctaacttgatttgaggttctcaaaacaatctttggatttaaaaaagcaaactgatttttacttactctgttgtcaacgcagcaaacaccctcctgagtcctcaagcgactctgtctgttcttgactctgccacaacaaaatgtgtcaatgtcatcagtaacttaacacgttaagctcgtttcctgtccaccccaccccatcccatcttttaaataaagcgtaaatagataacttacagacctttctcgcggctgtacctctgattctgtaagatcaagatgggggcatccgtacatctctagttgtgctgcagtgcgccagcagctcagcatctagaacgagcgagtaacgaatccaggcatggagggtgctgtcctccacttggctgctaagctcttccctccgcatgatgccttcacaactccccaagaagcggtgctgtctgctccttcggccttgccctcttctgcccccacatctgaatgggcacaaagctcccagcctgtgggggtctggaaaggacacaaatcgagcctctgctcctcccacccgtgctctagatctctagtgaggtgtcagcccaacgggttgggtgtcctcctaggagggcccctgggccctcgccccccacccttcccttcttaccccacaacagctgctttgctccaagacagctgggcctaagccctttggttcgaatcctcattcaagacagaaagctcctacatcttcctgtcacttgagccatgagctggaccctctgaaaatgcccactggtgctaatggggacacaggcgaggctggacagtgccggagggcctggggtgcctccctccgcgtgcgcggcctcacaggtcagtggaaacaagaaattccccaatccacagccacgatgacttcaaaatacttcccgaagacatcaggcaatgaagctgcgacctgcgaggacacagcaagccgagtgacgctggccagaggctgggtgtggagtccgcgcctgcagggtccctccccgccccgcgggcgcttccccccaccccattcgcctcggcatcgcagtgacaccgcggcgacgccgaccacaggtggttgtgaggacagcgagattctgaggggaaagaatgagagaagcgcgcatctattgggcagaaggcccgtttctgcgccgtcctgcggaggcctccgggcatccttcacctcagggaagagaaaatccaacctcacttgtcacaggcgcgggacttgcgcattccctttgggagcacaagaaccgaggcaggattcggacccaggccaggcggcaaaggcgttccctctctcccacccccaggccgcgcggaacccccagtccaccctcgcccctgccctcccttactcaccctccgcgtcctctacccggacgccaggagatgccgggagccctccccgtcagagtgccggggagaaaaacaaacctggagccatatggcagacatgcccagaaggcccgaagcggctcccgcgacgggggccgaaaagtgcacactacatctcccacaagtcctcgcgccgctcccttagaaagtgcacgcttcatttcccacaagccctcgcgccgctcccttagaaagtgcagactacatttcccacaagccctcgcgccactccttttgaaagggcatgaggtttcagccgcattgggcagttagttcccagatgcggcaagtgcagtactgcagttttattcgttagctgaaataaattatgagtatttaaattacacagctttctcatgaattacatccccctgatgatttggccgtcctcaacacttcctcatttggcagaattcacgagtggaatttctccagacgaggtcggttcctgtggccccgcgacgctgccgcagcaccacctacacttgcgccagtgtggagagcttcacttgctcctttctggtccattggacgctaaccgtgagaaaacacgctggacatgagcattaccagcctgtaagctgtcgtaaagataactcggaattgctcttcaaattttatttgttaaaccacgtaataccatcttgcatggcaaacatgcattttccattcttcaggagtatgcaggatctcttgatcacgataactttttaaagttcacaggcagaggtaatacaggagtggaaaaccaaaaaccgtaggttctcacttataagtgggagctaagctatgagtacgcagaggcatacagagtgatataatggactttagagactcagaaggggctggtaggaaggaggccggaggttaaaaaaactacacatggccaggcgcggtggctcacgcctgtagtctcagcactttgggaggcggaggcgggtggatcacgaagtcaggagttcaagaccagcctaggtaacacggtgaaaccccgtctccactaaaactacaaaattagctgggcgtggtggcacacacctgcagtcccagctatttgggaggctgaggcaggggaatcccttgaactcgagaggtggaggttgtagtgagctgaaatcgcgccattgcacttcagcttgggcaacaagagcaaaactccatctcaaaaatgaaaaaaaaaaaactatacattaggtacagtgtacactactcaggtgacaggtgcactaaaatctcagaatccaccactttataattcatccataaccaaaaaccacttgtactccaaaagctattgaagtttaagttaaaataaaaataaaaaataaatgtccactgaccaaaaaagaagcatttttctccatttctattcccttctttaccaccactgatgataatcccacttgttcccatgctggaaaagcatttagtaccatccatgtaaaagaatcaaattattcaagggttgagatgcatttcagaagacagtcatggtaagtacaacaatgattatcacttcgagacacaatttattttcctgctcataatgttttttttttttttttttttttttgagatggagtctggctctgtaacccaggctggagtgcagtgacatgatctcggctcaccgcaacctccgcctcctgggttcaagcgactctcctgcctcagcgtcccaagtagctgggactacaggcttgtgccaccacacccggctaatttttgtaattttagtagagatcgggtttcactgtgttggccaggctggtctcgaactcctgacctcgtgatccgcccgcttcggcctcccaaagtgctgggattacaggcatgagccactgcacccagcctaatgcttttgcattttaagaaacagtcttgacacttgtgaatattccattatttctttttttttttttttttagactggatctcattctgtcacctgggctgcagtgcagtgccaagacctcgggtcactgcaacctccgcctcccagattcaagtgattctcctgcctcagcctccccagtagctgggattacaggcacatgccaccacgcccagctaatttttcctgtttttagtagagactaggtttcaccatattgaccag

SEQ ID NO: 914225 - DNA, 4001 bp, Homo sapiens
agactgcccacgttcaaatagtctctaccacgttttagctgtgcaactttggcaaattcttaacctttctgtgtgtcagttgcctcatctatgaaagggagatactaggttacatcaaaagacttgtaaaaatttaatttagtgttcagaatagtgccttacatatggtaagctctactttttttaagtgttcattgctattaattattcctctctgaaatgttcttacctcaggctctttccctcacacttcaagtgtccctgcctttgaatggcttttcctgacagatcccaccaaaaacaaccttccctgttcccccactgtcctcctttcttccttcccttcactgcacttatgactacctgaaattacattatgcacgtattgttcgttgtctatttcccactgcaatatgagccctgctaggttggaggctgtcttctttgctgctctatttccagagatttctgactcacatctcatccaggctaggggaccaatgcgaatctcctaataacaatagcacacttagcctttcatttgcactctcgtgatctcatttgatcctggaaaaaccaacaaacagataaaccatcggctctcattttagataagaaaaacaaagttccaagtttgcgtgacttgtccttggacacgaagctagttaacgaatagaacaaaaattagaagccctgctttctgattcaaaggctcttcctacctggatgaaaagatatcacactcctgaaatgaatttacagaaatgtgaactctcgagctcctgtataaatacaccctgaagtgtgcacagtattcttcccttcaaagttcctgaagactactagtcccggagtttgagaggcattatagtctagtaataactaatcgataatgtagtaccccttgaccaaaatattcaagcagtcagatacgatgattggatattccaaatcgatacagcaatccttaaaactcagtgagtctgtgttgtctataatgtgctagttccagcacactgaaagcttcctctgcaaaacccagacaacgggggcattgtaattgccaagagtaccgtgctaacgatacctgttatttcttgggatccccattctatcaagtttagtgacaacagttcgatcacccaacaggctccagtgtggtatagaatcagatggagggaaggttgtcggggggaggcaaaacagtgaaaaagttccccttctacaagattcctggtcaaatagccagtggctaccacattcctcagaataaccaagtgtctgtgtataagctttctcctagcaaatttacacacttgtgttatctcacgtgttcctagtgctgtgggaacaaccattagggaggccagaggctgctgtacctcccttttacacaaaaaagaaaactgaggcagcaactggttatcttataaatgtgtccacgatgacttggtcacttgtgggatcccaacggccaggacataggattcctattctctgagaggaagcttccatcccctacttaacatgtcaaactccaaggctgagagggggaagaaaaggaatctaagtccctttatcacggaagaaaaaaagggactctccatttggactttccgccccttctaaggcctcgctcccaggctcggagacgcgccccgccccaggggaaaaggtgctggcccggccccacggggcgcggcctcgcctcccgcaccccaggtccctaccgcccagcagggcgcgctgccactctgagcagacacctgtcccttcgccacaatcggcgactccccaaggaactgacgcccccagagccaccaccaccgccgggactgccagctgccagcgggccccgcaagccctaggagctgcaggaatcctcgtaaacttacagttttcctacagcgtgcgcgtcacagcggggtgacgtcacgggcccagcagtcggggaggtcaagccacggggcgcgggccgctgggcccccaggctccgccctcgccccgccccggcgccgcggcgggagacacgcccccgagctccacgccctcgagctccacgcacctccccgtagcagacaccccgcgcaggcgcagacggcctctgcgcccgcatgcctgtgggcttcgccgaccggggcgcctgcggcggcgactgctctaccaaagcctcactcaaagcctgaagtcggggttagaggaggaggaggggccgacaaaaggggacggagaccttcagaaatactgtaaacaagctgtcgccctgggggctggagtaagacgcctgggttgtgaggtagtttttccacagacattgcccgccttcctcacgtgttcgttaaaagttctccacgtgtggaaacagccatttgctctccatcaggtgctggcgggtcctcagccctgaaaagacagctctcccagggtccctcgctcctccccggctcgacgcggctcccgctagactccgcccagaccccgagcagtccccgcccatctcttgactatgcccctcccacgcccacttaggccttgcccctgggtcccgcccttccggctcccgcccctggctcccggctcccgcgggcccccacctgcccttcttgccctggcgccgcctccagcccagcccgtttcttgcagattttagcttctcccttgcctgccgcctttcccgtttcggctcggtgaagctacctatgggttgctgttcatttaacaaacggtgatccggataaacatgttcacttcttcgcctgggcaaactttccagcccccgacccactcatgtcacgataccttcccgtgtccaagtccggctctctgctccccacttttttttttttttttttttgagacagagtgtttctctgtctcccaggctggagtgcagtggcgcgatctcaactcacagtaccccctgcctcccgggttcaaacgattttcttgcctcagcctcctgagtagctgggattacaggcgcgcgccaccacagccggctaatttttatgttttagtagagacagggtttcaccatgttggccaggatggtctccatctcttgacctcgtgatccgcccgcctcggcctctcaaggtgctgggattacaggtgtgagccgccgcgcccggcctctttgctcttttatactctcagaagcaatgagttctggttaaaaaaaagggctcgatagacggaaaaaatgaaggcttaaagaactgacaacaaaatattaacatttggcttgtggaattcttacactctcgtaagcagaaaaaacaaatgttatggcaaaaaagtgtctcagacaaatccgtcttggggggaaaaaaattaaaagaatgagaaaaacagacttcggaataaatagacccaaaggaggaagtattgaaaatggcaagattcacttttacaaacttatttggaaccacggcagatggccagggcagggattttgcaaggcagctccagttgtaagtaaaacctgaaacaatggtttatttccactctcattgaaagtgctgtcttatttttacaggaaagagtgatgatgggaatattaggctttaattcgagatctgagctggttaaaaataaaaacgtttattattccagaaaaatctacgtcagtgtttttaaatgttctgatttgaaaaaatatttgtatattttatctgaatattagttattatcaaatgatgtaaaagaaatttgtaaaggctgtaccataattgtaacaataaggtttttctgtagagcagaggtatagaaaaattaacattttttaaagtcctgcatatttttaaaacagtgatatttatgtttttccttgcaaaacaattttaagaaacctttaaattgttaatagtttacatgcttataaaatgttttatatatatcatttctaaaaatcgtaatttttttaagtgagtttctaggtataccttatgggagtgtttcacaggtacatgtcatctgttattttttggagtggaaatggg

SEQ ID NO: 914226 - DNA, 4001 bp, Homo sapiens
ggcagacactagtggttgcctacctagtcttcccttctttctgaataacaaaatcctattttttttttttttttaccttgggaggagtgaagggccatgaatcttgactagtctaagccaaacacaggacttccgtacccctcaccactgactggcttagaaacgggtataggatgcaattttagctaatgaggtcatgttttctaggaggcttctaagaaagttttcttcattttaaaaaaagacataagagagacaccttcttttcttacagtcatgggtgctttgatatgagtatgtcattcttggagttaaagctgccatcttgagatgaggaggggaaaagtctgaagacaaaagccaacttatcaggatggtagaatgaaaagacagagccagagagtctgatgataagagttagctgctatataagccaacaaaaaaactatctttcttccagatttctagttatatgagacaataaaatgcagttattacatacgatactttcagttgggtctctgtcacttaccagctgaaagcattctaactgatatagaaagaaagatactttcacaagacagatgtggatgaaattaactttgcatgttggagataagggaatttgagagtttcagcctaaagtttcatttattaaagaaaatgaaactcatatagatccattttacaaagggagtgaccttaacagctgctgtttcttgctttaaaatatcaagtattggctgggcgcagtggctcatgcctgtaatcctagcactttgggaggccgaggcgggtggatcatgaggtcaggagtttgagaccatcctggctaacacagtgaaaccccgtctctactaagaaaaatacaaaaaattagccgggcatggtggcgggcccctgtagtcccagctactcaggaggctgaggcaggagaatggcgtgaacccgagaggcggagcttgcagtgagccgagatcacgcccctgcactccagcctgggtgacagagagagactgtctcaaaaaaaaaaaaaaaaaaaaaaaaaaaaaaaaaaaaaaaaaaaaaaatcaagtattactaatgataacaatagctagtaatgaagacgattatgatcataagctcatggttattaaagtatttttaaagctaggtattttatcctttattgtttaccttctgcattctatttgacttcaatagtgaaaacacaccgatctcttttactttctgtttataacaattttcatggcagtttcatttttcatactttcatggtatataacacagtataccatgatatagtttacagagggaatccttaactttgaagaacaaacactttgaaaactaaacaatttataaaaagatttctctatttccatacactttctgaatctggtcaagaaaataaaacaacatttcaactgcatctgtgcaatgatagctttgattcatatcagaagacggaaaatcaacactgtagccacatagatacataccagagaaagcacacttttaacagaaataacaaaaaacactagaattgtgctcttatccaagcggttcccaaatggaaaaaaaaaaatctgaaagttaaattgtaagacagcttttgaagcccaaaacatttttcctatagaaacaacattactatgagtcatgtcattactaggccagtccataaaagccttgtaaaaccatatgcataagactgttgtttgaactataccaaagtagaataacagtttttccttgggaaaatacatcattttctccctcttctctctactaagtcccagaggagtgggcctcaccaggggctctgttcacctctcggagctcagcagtcatctccctcactctgacactccatggtgagccacactgaacttctccaacctgcagggcctctccactccaagtcattactgttatgaccttcccttcttcttcttgtaggtcaccaccactcagccttctggtctcagcttaatgctacttcctcaggaaggccatcccttgtctccacactgagtcatgtgttcctgatgtgtgtgctctcacatgacactatactttcctaacacagcatttgtcaatctcccccataagctccactgtttcagggattcatttcatttgctattaatgttaaggtcagaagactgcctggcattttgacgattctttacacatatttatttatatgaatgatttctcataagatactttaatcgtttttaacttgatctatggtcattaccaaggaaaagggggggtttccaaagaagacttctcctcccctcaatttacacctagagattgttcatagggaggaagctacctatccaatttctttcccattgctggtttatagtcacttaaatggacattaaaattttagcaaataggtatattttctttatttgtctttttagaagatgaggcctttgaatgatgaaggaataggtatattttctaatattaactttatctcttttttgtaggtaatgtcactcattctcatgacttttatgtcggcaacgaaatgcttattcccaaatttgtgtctctatgcttgatttttctctcaagcttagaatccaaactttcagctgtctacaatttttatacctgaatgtcccacaaaaacttcaccccatccccctgcccaagctttcttttctctggtattccccatttcaggtatttcagataatgacatcaccatctagccagcggagtctcacacccacgttatctcgtccttgttaattattcactggaccatggcctaacagtgttggcatcacttgggagcagaatctgaggccccactgccagacctattgaatcaaaatctaccttttaacaaaatccctagacaattcacatgcacattaaaatctgagaaacactgatgtataattcctttttctctctacccccacaaaactctgataccaagtctacataggcaaatatattccctcccatccatttctgttatcatggccctgattaagccatcacttcctgtggtgatgtggaacactgcaatggcttcttagctgacctcattcctgtagcccactgttcacccagacttttagaagggacactctgatgtacagctatgagagggcatatggttggctggccagaactgtgcataatgtaaagcctgtcctatctatgttacaatttaaaatctggggatgctcacaaaattgtcacatagaaaagcatgcaaaaaaaaaaaaaacttttcttgtgtttccttgttataatcactgatctcaattttctttccaaatacaaacctaatcatgtcatatccctctccaaaatcttttagtggcttctgaagacatcatgtatttctacacttctacctttctgttcatgcttttccccttttctcctatccatcttgcaaaaatcttgcccatcttctaaagtcctgttcgagagttatcttaccagagaacagtcatctcatctcaccagccctcttaagaaataactgcttctccattcactctacaacccattgcactcattacaacacgattacaacactcatcttgctgtatgaaaggcccatggatgtctgtctttcctgtcagacaaggacttccttaaaggaattctgtatttcagtcattggcagatggtagatactcaaaaaatgttttaaaaaaacaactaccatttatatttgacattattaaaagctgtagaactcatcgctgataatgtgaatgtatttacaaactataaaatactaagtaccatatctttcaagttatatgcacccaggcacagtaaaagctcaaaaaatgcttggggacctaattcagtcacataaatgcagctatccttaaaagcccacattctggggaggcccaccctatttcctgagagttcaatcagataattggacaggacacagagaggttaattctgatgagaagagagggaggtcaagtgtg

SEQ ID NO: 914227 - DNA, 4001 bp, Homo sapiens
ctagcctctgctcactccacccttcatgtcacctcatcaaaaaggtcttctatttctccaccccatcctctgccactcagtctcgaaacccatttcacttttcttcacaggatttctcaccacctggcaggagaggtttgcactgactgtcagcatcctctctaatgtgagctccagggggacagtgtgggtcactgctgcctcccagtcaaaaacactgcctgacacagaagtgttcaagctttattcaatcaacaaatgaatagaaactttgaaaagacatggaaagtgattagctttatccgagaatttacagggagtatgatctgactctggggcagaatatttttaaaaaagaaaaaaaaattgcttttcataagagtaacaacttactatgtaccagccacggtgctaaaccctgagatacatatcatctctctaaatttctgccgtaactatataaagtaaaatctatttcgtagctaaagacacaaaggttcagagagttggaagaacttgctcaaggtcccagggctggttgaaggcacagtataaaaggaagccacaaaaagtggtaatgaaactagaacaaattggaatggctatgaaatactaaaagaaaaaatgagtaagccttaaaaaaatgaaaagtgtgtttcaaatgaaattacttgacttagagcagtagaaatgtaggtgatctttaatttttttaattttatttgtataatagacactcaaatgtttatcacttcctttcaaaataccaattatttaatcagcttctcaaaatccttcaaaacctagttttctccaggataaaagcaaactccagtctgggattctagaccatgaatgtttccaactttctcagaccagtttgttcatggtcccgccataatgacttcattcaggcagcgctttcccctagtatcctctgcaattatgcaaatctcatttattcttcaggaagaactaaggcgcccactactccacccctcccaccctaccacacactaaaggtcaagagagcactgctatcaccctatgtctttatggcctacgtctttacatgctaacgtgtatttttttcatcgtctgccagtttgcaaagcacttttctgtttctagcactctagaaaacatgggtagcaataatctacttggtgaatgactacgtaatgggtagacaggacggaaatcgcgggacccatccaggattggttcgggtagctttgtccacacacagggcagggcattgtccgggcaagaggcataaaccccacctcgctgaaacacgtggtttctcaagaaatggaaaaatcaaacttgcctggatctgggctcttggggccatctgtctcctgaactgttctcccaggcaagggctgagaatcctgcgtaagtcaatctgggaaagaagagaggaaattgaggaagtccctccgtgccctagcctagctagaatctgccctctagaccaggtccccgcccgcccgttccctccacaggtgggcagacaggtccaggtgggtacgctcgggaagaaaggaaagggaacggctgctgggatccggcctggactgcagccagctccacgccaaacacttttggcagcaccgggggacggccttgtcagtggcccaatctgtcggccggggcgcaaggctggagcgctctgtgatgcaccagcctcgagcggtcgctccacacggcgcagccactgcgggtgggcactgcccaccgccgccttcccctcccaccccggctcgcccctcgacccgcccctgggaaaggcggggagcacccgccaggggctcgaggcttcagggacccagcctgaccccggccgctcacgaaccgaaccgagccggcagggctgcggagctgcacgcccagagagtcagcgaccacaccacgccgttcggacagtaaccaccagccaggggctggtgcagcgctcgcaccacgcggagacaggctggaccggaagcggaagtggctgaggccgcggaggcctctgggaaacgtagtctgggccgcttggggtcttaggggctccatccgcagagcaggttggcatcacctgggaatctttgaaaagtgaaggtgcgggaagtggagagcggctgatcgcagtcgggaggtgatacattatgactgacatgcaaaatctggtaaaaaattggacagggcagtgggccgcctggaggcagtatcccatacctctgacatgcaccgtggatatggagatagtccttcaaaagcaggagcagctccatatgcgcaggcatttgactcgctgcttgcctgccctgtggcagagtacttgaagatcagtaaagagattggggaagacgtgcagaaagatgtggagatggtacacacagttttgaagttggagtgagctctcttggttacagcttctcagtgtcaatagccggcaggtaataagctttccgatctgttggcacctatctcagagcagatcaaagaagtgataaccttttgggagaagaaccgaggcagcaagttgtttaatcagctgtcagctgtcagtgaaagtatccaggccctaggctgggtggctatggctcccaatcctggcccttatgtgaaagaaatgaatcatgctgctgtgttttatacaaactgagtccttaaagagtacaaagatgtggataagaagcatgtagactgagtcaaagcttatttaagtatatgcacagagctgcaggcttacattaaggagttccataccaccggactgcctggagcaaaacggggcctgtgacaaaagaactgagtggactgccatctggaccctctgctggatcagctactcctcccccaccaccaggcccccctcctccactagtctctgtcagttcaggctcagatgagtccgcttccctctcagcactgtttgcgcagattaatcagggggagagcatcacacatgccctgaaacgtgtatctgatgacatgaagactcacaagaaccctaccctgaaggctcagagtggtccagtacgcagtggccccaagccattctctgcacctaaaccccaaaccagccacaaagaaggagccagctgtacttgaactggagggcaagaagtggagagtggaaaatcaggaaaatgtttccaatctggtgattgatgacacagagctgaaacaggcggcttacatatacaagtgtgtcaacacgatgttgcaaatcaagggcaaaattaactccattacagtagataattgtaagaaacttggtctggtattcgatgatatggtgggcattgtggagataatcaacagtagggatgtcaaagttcaggtgatgagtaaagtgccaaccatttccatcaacaaaacagatggctgccatgcttacctgagcaagaattccctggattgtgaaatagccagtgccaaatcttctgagatgaatgtcctcattcctacagaaggcggtgactttaatgaattcccagttcctgagcagttcaagaccctctggaatgggcagaagtttgtcgccacagtgacagaaattgctggataagcgaagtgccactgggttctttgccctcccttcacaccatgggataaatctgtatcaagacggttcttttctagatttcctctacctttctgctcttaaaactgcttctctgctctgaaaagcacagctacctgccttcactgaaatatacctcagatgtgcagtgggatagcaggtcagttgatcttctgcaggaaggtgcagcttttccaaatcagctcaactgccgacgaggactaatgatgcattttagctttgagctttgggggttattctaccaacaaacagtccactgggaagaaaacagtcccaggaattaacagatcagaacgttcacactggttaatctttttctgacaatgagcatgaaggtagcagaagctggtgtgtttccagatggttcttctaaccaaactaatttttcactattgacaag

SEQ ID NO: 914228 - DNA, 4001 bp, Homo sapiens
cagccttcaggcaaaaagtccatgattttacctcagctattccttccgaccttcccaggttccaacaatagcatcatctaaggataaaaagacaatgatgttcttatagaggcacagaccactaatgaggaaaaataagtttaaaaatatttaagtttgtctttttttttaaataattggtgtgattatatgtttcaaacaaaagttgccacctcttggatgtctgaaaagaaatctgccaagcaaagcagacacgatgattctaaatcatttgcaaagtcttttatccctccccccagaatccgcatatgttggggatcagggattagatataaaggcaatttaactttttaaaccagaaaaaagcctcacaaatcacagttccatgcacatacctatgaatttgtccaaaatatctagcatatgcaaattctttcactgaacacactgcaatgcaccttcatcatacttaatttctgtttaattctgtgtgatttatctacggccaaatttccatttctgtatcaatcaaaagtaaattagttgaattttcattaaaggtcataataaactacaatatcatgttaacttatttccaagaagtgaaagcttcaacctttattggtaattaagatctttacaaacaaacaagggctcttttataacttagtgcatatatattatgtatttgtgtgtgtttgaacatataaatatgtatgtgtcataaaatatcattaaaaactaaatcacatatctctgataagattacattgtaaccaagaaacaaaaaattgcctcgatatagttctattttatccctcaaaaagaatgagacttgattttctagagttcgtcccttatgcatctacgacaatctttgatactaacaggaaatattttccccttggccctcctatctaatgtacataaaatcattactttcaaatgccataattactgccataaaatgtctaatgtctccctcaggagtaattaatttcatttctgtacatcagtggcattggcaactacatattttagaaatttactgttaatttcttatttccaggctccctcaaatgtttcaaagccctggcctcccactgtcttcctacaaccctgctctgaatcctgtcccctccctcccctgcacctggcattgcatagcctgcccagaaggcaggtgtgggtgggaacgccccctaaatgcttctgcaaggcttagcttcctgctgtgctgtctgtgtctattagtaaaggcaaaatgtcaaggaaaggattcaatcaaccccttgtctctaaaaccaggtatgttcttttagctcattctaaaaactcattataatgtgatcatttggtattgttttgtttcccaggaaaggcagtgaacaggatacatgtccagatctttggatataatctgttggagaaaggatctggggctgatgcatggttcttaccctactgcccagcgcaagcccgggctgagaataacagcaacacaggataaaccccgggagagacagtgggagggaggaaaacaactgcagcctgaaagtcaccctaggagaaaaattcataggcagaattcttgagtgctgaaaaaacaggggggagagggagaaggtaggggagaagaataaacaaagagaggaaaagagagagggagagagactgacacagaagaaaatgaaaacaggaagacaataaagaagagatagaggagaaaaagtgagagaagagaaagggaacagaaacggggatgggactcggagacgacgtgggagagagaggaagctggcgacattgggaaggaaaggaccccacagtcaaaggcaggactcaacaaccctgtcctggggaaaggctgatgtggaagtgagatggaccccgccgcccgcgcccgctcgcggctctgtccctgcagacaggagggtgcgcctcacctgggctctctggagatgtggagcaagaggtgctggtgcagcacagcctcctcccggccaagagcactgcgcgtggctctgaacttggcgccggagccctgagggcggccagatcccgcccccaagccgctcccgccttcggggcgtggtctcggcgtcgcccacccccagggaagctccagccttcggggcggggcttgcgggtgggcggccccggcaggggagggtgccgctggccaaagaactcacaaccccgggagaaaacccccttctgaccctctgggctgcccggcccttccccggctcagctccgcggagatgcccccagctggcttggtcagggccgggcgccatcgcctgcgggagggcgagggcgttctttggaggcggtgcctgctctcgcctacgccctctggtcctgggcgcccgacctctcgctcctgggcccgcggggcctcggcgatgcgggcgagggctgcgcgcggtgcctgcggctccagtctgcgccgaggacccccacggcctcctggccctccttcccccagcagcctggcggccgctcgatcggcacctccccccgccggaatcgcccagctccccccgggagcgcccgccgcctctgctccccagacctcagctgtgaccacgcaacgctctgccaggaaggcggactccgcgactcgggccatggtggaaaatgacagttaaagtgcgttaaaattaagaacttatactttgattaaaaaacaacaaacggagtgaaaaagcaagccacacactgaaagaagatacttgcagcaattgataaaggattagtatccaggatatatacttttaatgaattagtgtgaaagagaggaacacccaaagcaacgaatggacacagacatgaataggcacttcaaagaggaaccactaacgaccaaaatcatgtgaaaggacgaagtctctagagtaattagaaaatgcaaattaagaccacaaggagatgtttaatcattaggcataaatgttaaaatataataataccaactgtcatggaaggcatgaagcaagggaaccctaatatgctggggcgaagtacacccaatttcatttattataaaagaccactaatttaagatattctattatactaaatacagctccaaaagagggggaaaaaactgacaaccaaccaactcaaatgcttttcatcacttgtaatttttaagttatataaagaaagatctattttagactgtattaatccattctcacactgctataaagaattgcctgagactgggtaatttataaaggaaagaggtttaattgactcacagttcagcatggatgcagaggcctcgggaaacttacaatcatggtggaagtggaagcaaaacaggtccttcttcacagggtggctggaaggagaagaatgagagaagtgcagagtgaagggggtaaaagcccctcacaaacccattagattgcctgagaactcactcactatcatgagaacagcacagggcaaccaccgccatgattcaatcacctcccagtaagtccctccccctacatatgggcattacaataaggactataattcaagatgagatttgggtggggaaacagaggcaggccatattattccacccctggtccttctcaaatctcatgtcctcatatttcaaaacacaatcatgcctttcgaacagtctgccaacgtcttaactaattccatcattaacccaaaagtccaagttcaaagtctcatctgagacaaggcaagtcctttccacccatgaacctgtaaaatcaaaagaaagttatttcctagatataatgcaagtacaggcattgtgtaaatacacccattccaaatgggagaaattgaccaaaacaaagggactacaggccccatgcaagtttgaaacccaatagggcagtcattaaaccttaaagttccaaaatgacctcctttgactccatgtctcacacccaggtcatgctggtgcaagatgtggactcccacggccttgggcagctctggccctgtgactttacagggta

SEQ ID NO: 914229 - DNA, 4001 bp, Homo sapiens
cttgccaccgccgcccacgtcggtgtctttcttgtcgtccttgccctccggggcacccccggccgaggacagcatacctcccggcgagcaggccgaggcgctggagctcgggctgcctgtcctgggcgtgaatggctggcaggtggcgctcggtacccggaatcccgacttctccgacgaaacacccccgccgccgcccccgccaccgccaccgcctccaccgccgcctcccggctccttcttatccgagccgggtttggagtacggcttgaaactcgacttgtcctccacgccgatgtcgctcagcttcagggggcccgatttggtgtccttgtcgcccgcagcaccgccgccggcaccgcccgcgccgcccccgttggaggcaaccgaggagagtttggaggagggcgaggggtcgggcttcccgatctgcgaacatgtttgcgccaacagcgccagcgggctcttcttggcatcgagctgcggggtcagacgatggggggggagcgtcacacagagaaagaagtggaaaccctttagaatcctggcttctggggttcaaatgcctctccgcaacagcccacgaagatcctcccagccccaaggcgcaattctaggcggcaccccctcttcaacacccactcacaaacattctcgccgttgggaaaggcagcagattgctccccccgcccaaccaccacccccagcagcatctttcctgccctctctgagcgctaactagatttttaaagagcaaaatgttttggttttcggttcctagacccagaactgtaccccctccccacaaacactccttaattcttcagagtaagggctcgggcggctggcgcctcagaggctgtgtgcacacactggcttctgcggatacgaaggacggcgactttggaaccgtatttcagacctccgcctgccttcggtgccgagtgaaggggcctgggtcggggtaggggctttcatatcgaaaggagaaacaagtattggcagccttgctccctagcatgcacgccccattccacttcctcccccttttccgccctagttttgaggtacggaagcagtagcctcttcccccattcgggagctgaatcactccgacccccccacctccgcccagatcccgagaaaaagaaagccctagggtggcagccagggtagtggtcccagtgcgatccagagagagggtccttacctcgatggggctgaccggcgtggaaggcaggggctgcaggtactcggggtgcaaaatgtggccagttcgtgccgtcagcatcttcagcaccttgattggcaggcggttggcctggcgcagggggtcagaggggggcacggcgtgcacaaaaggcttggtgctgccggccggggacgagcctgggccggggccggagctatttccagagagcgcgctggtccaggcagggtctgcaccgccgcctccgcctccgccgccgccgccgccgctgtgcttactgcttcttagggcagaaagcgagggcgctgtgctcatgacccacccgcgcgcatgggagcagcgggggggagggctccgggaggcgcggggcgggctcggggctgcgcgctcgccccgggagcaggagcagcgggaggaggaggagctggcgcggcggccacgggcgcccagcgcgccttctcggcgcctggagccagacgcgagtaatcctgggtggcccgcagcggagccgtggccgggctagaggagccggctggactgcgggagtgccgggcggctcgcggtgtccgcctcgggctgctcccctgcgctgcgttctcgcggccccgcgccggcgctgcgctctgcgatgcgagccgctgcgtgtccagccggggctctggcgaggaaactcacttcaaaagcagctgcaccaagggggagattaaagcctttgccgccttccaatcaaatgggagcccgaggtgattggagggtcaaggggatgtgacgcgtcccgcgccgccgccgccgccgctgccaggactctcagtgccggttttaatgggcagctccctcttcgccgcccccctgtgtgtcccctccctcgatttcgctgggaggacgagatggacatttattctacgtttgccatccgccgcctccctcttttttcctcctcgtcgttcttcctttccccagctcgaaaataaactgaaaccttcttttgaaggggggtgcgcgtgaggaacagactgcggggggtgtccagaaggagcaccggtgggagtgtggacaccggccggactgtcaactccaggggcgaagggaacctgcacacccagtgttttttccttcgcagtaatcgagatcccgcgcggcgcagcgcagccaccagggtaagaaggcaaggtggggagccggagctggaagaagcccgcccgcccgctctaatttcctcagattccgcggcggagaaaccagaagctagatgggcagtcgcagcggcggcggctcaacaccgcgaggagcgctgggctctccgcccttcccggccacgtgacgcccggggacgcgtagattggggcagcagcgggggtcacatgtttcctctgtttcaccctcagtctgtcccccaaccccccattcttactctcccaccctgttttcctccctcccccccttctttgggcatctccacccctccatcaattgtcaatgttcctcgaccgcaatcaatcagttatttgtcagctcttgtcaatcctcccgtgatttatgtcagcttttgttgctgattacaaggcgggtgcgacttgaagggaaaaagagagagggagagagagacggagaggaaggaggagattgagagggaactggaggaggggaaaagaggagcggcctcctgggatgggggtggggtgggggctctaagaaaaagaatgaaagaggcgcacggtgtcaggaaaatgaatagcgagagtaaagtgcgcaggtgcgcccagggcgccgagaggggcgcgcaggcctggagtgtgcgcctgccctctcggtgtcggagagacgcccttccacctctgggagcctcggtctgttggggtcgcggagttcgggcgcggctccgggtacccgagaccagcggcggcaacttctaacacgggagatttcccgccaccccaccccgccgccgcgagtcctcgcggggcgtgttgcgtgcggaggtcaggctgccaccctctgtagttccctaaccccaaactcggagacttctaagagccacaccaccaaggaacttctagtcctggaggtcaatggtggggcaaacctcgcctcaattctttgaccccctcgggtcgtaagcagggctaagaggctgcgaagaagaggcctggccatgggtgtatgggggaagaaacatctcaggctcactcatgccccctccccgaccttctcccacctgccgccatccccgcaggctggggagccagggtaactcggggctgctctctcgaatttattggaacgccgagtcggaatgagctgcgctaggagagccgagggaaggagcgagagagggagggggcggctgcctgtgggaacgcgggttcttccagggaagcggagcgggactgccgcgttcccctcgatttgcaccgtcactcgggttgtttgggaagaaaaggggaggcgctgtgcgtgccaccgggtacctggacctggatgcccagtgtgtatgcatgcctgtggcgctgcgtgagttatcggggctctgatagcgtccggagcgggttcgagggtctcctccaggaactcgcagaaattagagggggtggggaggaggacacacccccttcctcggaacgacttagaagactttgaatctcccctcctccgcttttccgccccggctcttcttttgttgtcaagtccttttgataaatggtggggctgggagctctgggagtcgggagccagtctgtgcccgcgtggggggcgggggccgagcctggagacccggtttcgaccggcgcgc

SEQ ID NO: 914230 - DNA, 4001 bp, Homo sapiens
tgaagtgggagaatcgcttgagcctgagaagtggaggttgcagtgaacctacatcacaccactacactccagcctgggtgtcagagcaagaccctgtctcaaaaaaaaaaaaagattgttcctggaagtatttcccagagtgcactctaggcaggaacatgttaatcaacagctttgtcatcaagttcatatgcgcacaaccaaccaggacaaaaggaaagccagggctgcatgatgtgtgagcacggccgacggctgcaggaggtacagacacggccccgaggggtgtgagtgcggatgaccacggccgactgctgcaggaggtacaggcatggcccagaggggtgtgagtgcggaggcgctgcgcccgctcattcccacaccccctctgctgcctccaccggcacagagctgggcagccaggggctcccctccagcctcccttcggcagggtggccgctggcacaaccacctgtagctgtgttgccagggcttcaggtacctgcaggtgaacaccccattaggtgacacacaagtgcttaataagtctgaccgtctatgcattccggctagttggaaaccttttcctaaaatcaaaagcagacacgtgctgagcctggcggctccctaccttctgcttttctttggcttatcaaaccggaagtccgcggggtacaggtgcatcctcaccatgtgatccttccggtctctgctggtcttgaacttctctgtgcagccttctaccaagcactgatactgaaatggagaccgtgtcacctccctctgacccctggccctcccccaccgccatgcccccgtagcagagctgccaagggcggaaaggtgtccccggccttgcccgagcacccgagagctgggggcagcactctgagcccatcaccaatggggggtggcctcggcggctgtgcagttgtcacccaccatgtcctgcctctcagacaggatctggaagagcgaatcgtgccactccaggatgtgggcgtccagcaggtgtccggaagggaaggcccgcttgcaaaaggagcaaacatttccgtgcagcgtgtggtagtggtgctcgtagtcgtccagggcatcgaacacctggcagcagccggccacctggcaggcaaacgcgggcaccctgccaaggagacgtgcttcaggagcccttcctccggtgcgaggaaccaagctggactttctgcacagtttccctttgagacgtccaataaagcccctatgcatcttttgcaatcccaaaccctctttttatgaattaagtttcacaaacaggctaggtggtggaagagtcggccacgccaaagctggacaggcacagcgcctcggtggggcggccgcacatggaagagcggcagcacagccccagggaccaggcaccggtcagggaggcggcgcaggagtagcactggctaggcactgcccattcgcttacctgggcttctcaggcacgtcggccacctgcatgatcacgtcctggaggtagaggtggcgctgcacgtccccatcctgcaggaaaagtgcgccgtgggcggggccaggtgactcgcggcacgcccaccgcgtcaggcctcgcccacacccgtggccccagtcatcccgcgctccggtcccgccccacagcctcaggccccgcccactccacgttccggccccgccccaccacctcaggtcccgcctgtcccaggctccggccccgccccgcagtcgtaggcccctcccactccaggctccggccccgcctcgccgccgtaggccccactggatcctacaactactttttccctcttttgctcacgcacctcgaagaactggtgctcccgcgggaagcgcacggggcgcgcaacgaagcgaaagggcgcggccccagccgcgggatcccgctctacaggcagcggctccgccgccccgggccccgcagcgaggcgggcgcacagcgcggggggcaactgcatcaccccgggcgcgggcgggcgcagcctgtcggccaccgtccgcgagccgagccggacgtgacgtcacgctcacttccgccgccgtcgggggctgcgcgggggctgtggctccgggactgcggtgagtcctggccgaacgcgggcgcgggcgtgatgagggggttgggggactgccaggcccgggggggcccacgaggcgacggggctggcgggacgcggctcttcccgcgcgctccctctggctgtgcagcggtccccgaactctggggccgaagcccttcgggcctgcaccggccaggccagcgtcttgccccgcggcccgacactcagccggggcggggcggagcgggcctccgggtcgtcccgggtgtcccctcccagccctgggaagccgggtcgcaggtccccctctcgcacgccctctcccgtccgccttgccccgcctgtcgtctcccgctgcagtccctggatcttgttccctctaaaccagtcgcgaactggagccaaagtgactccagttttattgtaaccgtttttaatttaaagcccttgggtgacttcccgttactttagttcaaaggccctttcctggtttgtcggggtcctgtcgacctctccagtccccgcagctcccgtgaaacacaggacctgtgctaggtgctcagggcgtgtgggggaaggcatcacaggagggcgcggcagccttgtaggagagacagacgtcagagtaaagagtcacctaattaaaatggtgaatgacaacacacgcgggaagcagtggacgcttcagatctactgcagagaatgggcccagtggcggatagaggctttagctttctcgtctgtcacccaggctggagtgcaatggtgcgatcatagctgatagatcgctgcggcctcaaattcttgggctcaagtggtcctgctgcctcagcgttccaaagagctgtaactgcaggcgtgagccaccatgcctgcccctgtactttttccatgtttagatacacaaatatctctgtgttacagttgtctagtgttcagcaccgccacctgctgggcaggtttgtagcccacgagcaagaggctcctctaggtggtttaggtgcattgtaggccgtacaccatccaggtctgcgagtgactctgatgatcgcacagaaggaaatcatgtaaccatacgtttctctttttttcttttggagatagtgtctctctctgtcgctcaggctggagtgcagtggcgcgatctgggctcactgcaacctctgcctgctgggttcaagcgattctcgtgcctcagcttcccaagtagctgggattacaagtgtgcgccaccaggcttggccaatttttgtatttttggtagagactggttttcaccatgttggccaggcatttctcagaatgttgagtgatgcatgactgtactttctgtctctgtaaaagcctttgggctcttgacattttccacaagttgtaaaataacatttttcaaaccaatttgtacagttagctttgagctctcaacagagactctttttcacgtccctctgtgttttaatcacttggagtgtgtgctcactaggagtgtgtgccccgcttgtccgtggtggagtgtgacatgcgtgcattgcttccctcagcacgcgtccctgcggtagctcacagcctctgtgaggaggacgtcagtccctcccagtcacagttgctgggcctgtcagtttgtgtgattaatagtaagaattcaggagcatcaagaaggccaagtcagcggccatggctagacgttcctccaagaagcagccacggctagatgttcctcagagctgtgttttcagtgggacgctgtgcatttctggcgggacagctctgttgatgattagcatcccccgcccttgccctctaagtagcgagagcacccttccatgaccgtgacaccccagagttgccctaggacttttccaaaggtcttctggggggagggactctgtgcgagtacgggctgccctcttggaggcccggtcc

SEQ ID NO: 914231 - DNA, 4001 bp, Homo sapiens
tgttcattgtggttactgtcttttgtccttccataaaaccagatataaaacgttttatttggtaattatacttattttcacgcaacaaacaggaaacatttggttgtgtaacatacctacattttattctccccttttgttggcaattttctgtatctagggatgatctaatttacagtttctatggcaaaaatcaacatcgtttactatgcttaccttccccaggaaatcccaacaccctcaaagtgttaacagaacgcaatgtctctttataaatttcagaaaagacaattttgctgaaagatagtgaatgcatttctataaatttgcagttaaactcaaaaaatgttaggaaatttcactgaatcaatttaaatgttttaaattaaacctgaggatatcaaccttagagtacactcaaatcagaccccttgctgcagaaaaagcaattcaacaattaccagtaactagatctaacatgcacactttcaagttaatagaattcctatcctgacagtttggtgtcttcatgttttatcactgcgacaactgtacaaattccaacattcttatgaattccttgaacattgacttattttatttttctagggttttttagacgtttgacaacatactcaacaatgtttgcactaaaacagctcacatacactacttgctctcaaatttaaacctaaaaagaaaactgagtcttaactgttgtattctgaactttaaagctacatctgtttgatcggtccacttaagagttaaaacatttttccttatatacatttcgctctatgtacttttcaattaccacagccacctaggaagagactgtctacttgacaaagaggacaccatgtaacgaatagagtcaaaatgaaccctacatgtgagaaagccagttacaaagaaatccaactgccactgggtgtggttagggtctgcggggaagagcacctttggccaactctggagaagagcgagcgcgtcagggagcagggcatctctgcaagaaatggcccccaatgaccatacgctgggccagcaatagggacgccgtcgagtcgggcctgcgaacctatagctcgaggggtgcggtctgcggggcgcccttgctgtctccaccaaccacgaaacccgccgagtgagtgcttcgagcgccgcgcgcccagcttcgccccaaacaccgcgcccgatccgccccttcctccggggttcggctgccccgcggggagcgcggaggcacaccgtctcctactcccacccagctcctagaatgtaggagagtgtagagttcaaaaagcccggaagtaaaacaaccccaggttaagaaagtaagggtaagctctagcagtcggcaaaagcgctcggcaaaaaaaccccgacttctccagaaaaactttgcggcaagttaagcggaagcgctgaatggccgggactatttaactcgcgcttcctctcacaagaggcggatccctggacctgtttgggggaccctgacggtccacaaactcgccgtttgcctgctgggtggccctctagaagttctgacatcctaaaaggtctgggcagtcccgctgacggggaatacctgtcgtagtacccattgcctgcgagtccctgatggcggccattacacttccatccgggtattgccgaaaagctgatcgcagcgctaccgggagcgcacgctgcggcggagggatctgcgctttacctgagacaagcggaagagaacggaggccggcagggtccgcgctcggtctgacgagactaggccatggagctgggttcgccgctgacctctccatctagcgcgcggccccggcgcccaccagtccagtgacccactactacctctttgctcaccagcagctgctgatcttactgccggtgaaatggcagacaaacgtctactctgtgctcttcagagtagacaccaggagcaggaactgtatgcacttcccaagcccttgctgactgggaatggtctccaccctgagattttaaccagttccggtttagcaaatggcgcctccccacctctggcttctggcacgcaggttttagcaaccattgtagcccacgtcaacgaaagaagctgccgccagtagttctagaagacatactgaactccaaacctgtatatattgaataattgatcaaaaactatcttcacaatgagggaggctcacatctccctcaaacgaatacttcctctacctgacaacagggctggacagttaatatggttggctttaccccaaaggccagtgtggctcctcttctgttctttataaatccaacctactaattgatacctcactttctacataattctacataaattatcttccttttaaaatgtggggagggaataagtggcggcaaacgtttaagcaacaacaaaaaaccttggcgcagaaggatataccaataaattgaaagtgaaactatgatcagatttttcattttttaatgttccgtgttttcttaagtagcatgtatgacatttataatttttaaaaattttttaaaatatgtgtatgatacatatttttcattgtcttagggcaggcttttgaaaatgtcagcctgtagccaaatgcaagattttctccatcctttaataaaaagcacactgagaaatcctcactttgtctttaggaagccttctttattattgtgtttactgggctacacaattccacctagaaaaggcgaatgagcggaaattcacattagtcatatttatgcttgtgtaaaacacacaaggagaaatcttctgtaaataccaaaggggatgccattatggaatgaagaacatgtttacaaagtggattttattccgcatcgtacatcacccatctctcttcaggtcctcatttctgtgcaagccagacatgcacacacatcacagcagaaagagagagaacgagatttttcttttaataacaaaaaacgatgttagtttggaaaaatggacagagttttttgttctgtgttttgatgtagtttttgttttttcgattaagatattgcatccccccccacagtattcacattataactttatttttacttctacatatacattcacctacaaaaccttgcaaacctgcatttatgttatagaagaattggagaaagttaaaataaattaaaatattagtcagacttaccttatctcttcccctttctcttccaccattcatatcacctcttccaccattcatatcaccttttttttcttgctaacctctatgttcaaaacctgaaaggtttctcttgatctcctttcaggttttgaacatattggttagcaagaaaaaaaaaagtggaagtggggtggtgagggaggagaggagagaggagagtgaatcaagaaggaagggaagatgattaaaagggagaaaaagatacaaaggggagaaggctaaatcatagcttaggaaaggattctggaatacttttttacttgagaaggatagttatggggataggacatctagattaatgctttaaatagttgatccctctgaagaccttactactgcttactagctgacagcatttaacctctgagcttctcagagctgtgcaacatataactaacacgttatatattgtttgatagactgaagagagtactcaacgccattgcaccaagagtgtaatggaaatgataaaagtgatgatggtggtgatagtaatgaagtttccatcttgattgcaaacctctttctgcttttcaatatacaactgatgccaggtgcagtggcttgtgcctataatcccagcgattcaggaggctgaggtggaaggattaaaaaaaatatgcgtacgattcatggactctgtgtcataaagcagctcactttaagacagtgaaattttctcctaaaaataatatataaatggaaattcatttctctctaaggattctcacctgtaaatcatacttaaatcaaacttatatttgttcttacaacaat

SEQ ID NO: 914232 - DNA, 4001 bp, Homo sapiens
gggcaagattcaagtctcctatcatttaaagaaaaaaaaaaaaagtagtattaagtgctctaaagtatgcaatgtcacaatgcctcaatgagaacaattctaaacaactataaacagaaaagtaaacaacaaaaatacacttaaagggcatttaaagcatatcctgaagtcaaattatagatctaggctaaagtatagtccctctgtaatatttcaaaatatagaaacttctgggattacagcatactattaccagagagactagaacagaatccgaagtgtgaccatggcaaaaaattgaagcatttaaaagttcatacattatcaatgcacacagtgggtgttcattgtggttactgtcttttgtccttccataaaaccagatataaaacgttttatttggtaattatacttattttcacgcaacaaacaggaaacatttggttgtgtaacatacctacattttattctccccttttgttggcaattttctgtatctagggatgatctaatttacagtttctatggcaaaaatcaacatcgtttactatgcttaccttccccaggaaatcccaacaccctcaaagtgttaacagaacgcaatgtctctttataaatttcagaaaagacaattttgctgaaagatagtgaatgcatttctataaatttgcagttaaactcaaaaaatgttaggaaatttcactgaatcaatttaaatgttttaaattaaacctgaggatatcaaccttagagtacactcaaatcagaccccttgctgcagaaaaagcaattcaacaattaccagtaactagatctaacatgcacactttcaagttaatagaattcctatcctgacagtttggtgtcttcatgttttatcactgcgacaactgtacaaattccaacattcttatgaattccttgaacattgacttattttatttttctagggttttttagacgtttgacaacatactcaacaatgtttgcactaaaacagctcacatacactacttgctctcaaatttaaacctaaaaagaaaactgagtcttaactgttgtattctgaactttaaagctacatctgtttgatcggtccacttaagagttaaaacatttttccttatatacatttcgctctatgtacttttcaattaccacagccacctaggaagagactgtctacttgacaaagaggacaccatgtaacgaatagagtcaaaatgaaccctacatgtgagaaagccagttacaaagaaatccaactgccactgggtgtggttagggtctgcggggaagagcacctttggccaactctggagaagagcgagcgcgtcagggagcagggcatctctgcaagaaatggcccccaatgaccatacgctgggccagcaatagggacgccgtcgagtcgggcctgcgaacctatagctcgaggggtgcggtctgcggggcgcccttgctgtctccaccaaccacgaaacccgccgagtgagtgcttcgagcgccgcgcgcccagcttcgccccaaacaccgcgcccgatccgccccttcctccggggttcggctgccccgcggggagcgcggaggcacaccgtctcctactcccacccagctcctagaatgtaggagagtgtagagttcaaaaagcccggaagtaaaacaaccccaggttaagaaagtaagggtaagctctagcagtcggcaaaagcgctcggcaaaaaaaccccgacttctccagaaaaactttgcggcaagttaagcggaagcgctgaatggccgggactatttaactcgcgcttcctctcacaagaggcggatccctggacctgtttgggggaccctgacggtccacaaactcgccgtttgcctgctgggtggccctctagaagttctgacatcctaaaaggtctgggcagtcccgctgacggggaatacctgtcgtagtacccattgcctgcgagtccctgatggcggccattacacttccatccgggtattgccgaaaagctgatcgcagcgctaccgggagcgcacgctgcggcggagggatctgcgctttacctgagacaagcggaagagaacggaggccggcagggtccgcgctcggtctgacgagactaggccatggagctgggttcgccgctgacctctccatctagcgcgcggccccggcgcccaccagtccagtgacccactactacctctttgctcaccagcagctgctgatcttactgccggtgaaatggcagacaaacgtctactctgtgctcttcagagtagacaccaggagcaggaactgtatgcacttcccaagcccttgctgactgggaatggtctccaccctgagattttaaccagttccggtttagcaaatggcgcctccccacctctggcttctggcacgcaggttttagcaaccattgtagcccacgtcaacgaaagaagctgccgccagtagttctagaagacatactgaactccaaacctgtatatattgaataattgatcaaaaactatcttcacaatgagggaggctcacatctccctcaaacgaatacttcctctacctgacaacagggctggacagttaatatggttggctttaccccaaaggccagtgtggctcctcttctgttctttataaatccaacctactaattgatacctcactttctacataattctacataaattatcttccttttaaaatgtggggagggaataagtggcggcaaacgtttaagcaacaacaaaaaaccttggcgcagaaggatataccaataaattgaaagtgaaactatgatcagatttttcattttttaatgttccgtgttttcttaagtagcatgtatgacatttataatttttaaaaattttttaaaatatgtgtatgatacatatttttcattgtcttagggcaggcttttgaaaatgtcagcctgtagccaaatgcaagattttctccatcctttaataaaaagcacactgagaaatcctcactttgtctttaggaagccttctttattattgtgtttactgggctacacaattccacctagaaaaggcgaatgagcggaaattcacattagtcatatttatgcttgtgtaaaacacacaaggagaaatcttctgtaaataccaaaggggatgccattatggaatgaagaacatgtttacaaagtggattttattccgcatcgtacatcacccatctctcttcaggtcctcatttctgtgcaagccagacatgcacacacatcacagcagaaagagagagaacgagatttttcttttaataacaaaaaacgatgttagtttggaaaaatggacagagttttttgttctgtgttttgatgtagtttttgttttttcgattaagatattgcatccccccccacagtattcacattataactttatttttacttctacatatacattcacctacaaaaccttgcaaacctgcatttatgttatagaagaattggagaaagttaaaataaattaaaatattagtcagacttaccttatctcttcccctttctcttccaccattcatatcacctcttccaccattcatatcaccttttttttcttgctaacctctatgttcaaaacctgaaaggtttctcttgatctcctttcaggttttgaacatattggttagcaagaaaaaaaaaagtggaagtggggtggtgagggaggagaggagagaggagagtgaatcaagaaggaagggaagatgattaaaagggagaaaaagatacaaaggggagaaggctaaatcatagcttaggaaaggattctggaatacttttttacttgagaaggatagttatggggataggacatctagattaatgctttaaatagttgatccctctgaagaccttactactgcttactagctgacagcatttaacctctgagcttctcagagctgtgcaacatataactaacacgttatatattgtttgatagactgaagagagtactca

SEQ ID NO: 914233 - DNA, 4001 bp, Homo sapiens
actgaagaaaaactctgctctcctatgtctctgtcctttaacagcatttcctgaggaaaatgtcacaatacatatgaaccataacttgaagtatggaatcagctggctacatgtaatcagttccataaagtttgcaaacatttactacatgacattcatgttaaattaacaccagtattttcaaggtcaatatgtttgttcaacttcttggagtcacacatttttgtggtatttttaacatctgactaaagcttctatcatcacaagatgctcacactgtttacaaatacttggaaacagcagctggtgttcctcagttacatcttgttacaataaacagagtagcagttttaaagtccaggtatatattttactgctgatgtgtaaaaactttgctttaacttaaacgtttccactgcccccagtaatggagagacatgaacacaattaattgtgggcaatttagtacaaagttacgacaagatcacaaatacacaaatttttatgtatgcatacttgaaagtacagctatcgtgctgaatgaatcaaatgctagtgactttgcgcatatatatatacacacacacacacacactcacatttttgcatgtgcgtggagacacagtctcactatgttacccaagctggagtgcaagtgctattcacagaccgatcatggcatactacagcctcaaactcctggtttcaagcaagtggctaagaccacaaacgtgtgtcagcgcacccagctcttttcatatcatttttactaccttttcccatcccacgcaaaaaatgcagaatacagaaacttacccacacaagcattgaggaagagccaatcagtctttttcatcctgtttttaatttgctttagttttttaaagtctacttcaagttcctccttgcttcccacagcaccagccaattcaatcctctgaaaatccattttcacttcagagtcccgcttcgtagcaggaggtgatctcctttggctattaccactactgcaacttcccctccatcgagctctgtcttgctcatttattattgaagaagcctcttcagtctctgccaattctattgcttcaatgttattaggtctgggatgatcacaaacaacacatcttttagccttggcccagttttcatatgtgcaaacagagcaagtccagtgctgtgtcctagtgttcagtttatttctatcattgtattcctcacaaggatcaacagaaaaagcaactggtcttgagccagatcctgaggactgaggagattctgtaggactcctggtcctacgttgggataagcactgggtacatctgattgctcttggccagttcaaatatgtacacatgtggcatgaccacttatttgcattttccatgctatacgaagatttcacccttggtcttgcactagagtctggacatatcaaaggactacttcctccttcggtgctggaaggatcccaatctctaccaacatcacttgaaccacttttaaatggatcttctgtaataattgttccactaggtctttgggcacgacacatagtacacttgattgcagatggccagttttcatacgtacaatattcacaagcccacttaattccacgttctgacattgtgcacttcttgaagtgagctgtgtcaggcaggaagctataaataattaggacatggttattaaaataactacattccacctccaaaaatacgctgcccaaaaagcaagtccttcaacctacaaaatataaatttctcaaaagatgcatgcaacatttcgacattgaattatcctaattttcttttttaatttccatagaaacactggagataaattctcaaagaaaaaatcttagaccctgggatttaataaaactgaactttggaatgcaaaagagataggcaggagatataacgaggtttgatctaagaaggatgagattaacgggaagccactaatagaaatgtttaatttcagggaggccatcacatcaatttagaaaagtaaccaatagtttaaagagacaaaggtagaggaaacaacacaaactaaaaaatagcttaaacacataaccattctcaaattatgaacacagattatgattcatgaattcagaagatcaagcaacgtctattttatcattctcgctaagggagaaaagcaacttaaaatgctaattatccactgttcttaattagcacaggtagtaaagaaacatgttgagaagtaatggctacaattaacaaagtaacattatgaaataggtagttccttgataatctgtagcctcaaaatctagttctatctggagtaaaaaaaagaagactgtactggggaaaattaaatctgtggaaggtcactgaaataaccagtagcataatcattccaatataattgtgaatgttcataattaaaatattttaaattttgaatatttaaaatatactcaaaatctaattcatggccgggggcagtagctcaagcctataatcccagcattttgggaggctgaggcgggtagatcacaaggtcaggagttcaagaccagcctggccaagatggtaaagccccgtctctataaaaatacaaaaattagccgtgcatggtggtaggtgcctgtaatcccagctactcaggaggctgaggcagagaactgcttgaacccggcaggcagaggttgcagtgagctaagatcgcaccactgcactctagcctgggtgacagagtgagactccatcccctgccccccaaaaaatccaattcatatttaaaagatattcacactacttaaaagatttctaggattcaacaatgggctaacactacactataatgaagaaagacttcataatttaatggcaactaattcataaatgaagcaacttacataacaaatttaatttttttttttttaatggcttgaatttagacactggccacttttcctaaatacttttatcaactcagtatcatcccaacacctatttttcacccggaaagagaaagaaatcctaggcagagtatagaagctttgctctctctttctcagggatttttcctgaacctagagggttaaatcttttgtttgtttgtttttttgttgttgttgttttcatttttgtttttttgagatggagtcttgctatgttttgcccaggctggaatgcagtggagtggtgcaatctaagctcactgcaacctccacctcccaggttcaagcgattctcctgcctcagcctcccaagtagccgagattacaggtgcatgccaccatgcccggctaatttttgtatttttagtagagatagggtttcagcatcttggccgggcttctcttgatgaactcctgacctcgtgatccacccacctcgacctcccaaagtgctaggattacaggcatgaaccaccacgcctggcctaaatctttcacttttgaagtatactgtattatgttcctgcctgccaagtccatacaccatttatagtgtgaactctgctaagaagaaaaaaaaatcactataagaaagtatactacttaatagctaaaataaaaaccacacttactaagattttagttcccacgctataacctccaccttgcacatgattagaataaaagtacggtttgcaaatcagatcaaagacaagattccgtcttcatgctggctcagaattctgacttcctcaggagatactgcaaaacgtgataagtggttctgtctgactgaatagctattcctgtaaaggagaccaaaactgaatttcacttgaagcctgctactttagctaaaagatttttaaggctttatttttatcaattctctattttaaccctactcacttattttaacaatggacaactatatttagaattttaatttaacaaaacaataaaattggctaatcaactgggctggtcagccaaattaaacatggatgagacatttttctatataaccttaaccctgtgctgtgtacacagttctaat

SEQ ID NO: 914234 - DNA, 4001 bp, Homo sapiens
ccgactcggcctcccaaagtactgggattacaggcacgagccaccgcacctggccaacccctttattttacaagtcagtgactgaagtcgggggactggggtaatatggcatgttttcccagattttaacctgaccaggaagataccaatatgttaacaatcttcatcgctatgacttcagttacttccctcaaagtgagggagcactaagccccaagaccacccacatactcaaatatgaaagaagccagaaggccacagaagacccacggtaaaactgcctatgatctgtgtgtgtttgtgtgtgtgtacacaggccatatcctctctccaactgaagctgaatgccaccagtccgccactcctaaaaagtgatatatatgccgggagcggtggctcacgcctgtaatcccagcacttcgggaggccgaggcgcgcagatcacctaaggtcgggagttcaagaccagcctgaccaacatggagaaacccggtctccactaaaaatacaaaaattagccgggcatggtgacacatgcctgtaatcccagctactcaggaggctgaggcaggagaatcgcttgaactggggaggcggaggttgcggtgagccgagatcgtgccattgcactccagcctgggcaacaagagcaaaactccgtctcaaaaaaaaaaaaaaaaagtgatatatgtaaatttctctctgtcccaaaggagcaccagaaatctccacaagccagtttggaaaacaggactcttggaaaggcctgagtagaatcacacaaattaaacatctcaactgctgaaaaaagccagcttccactgaggaccaggacaaaaactgtgccatgaggaaggcacagcaggcaagtcccagccttggcttctgacagatatttgacatggccagaagcaaagtctatgatctaaacctatgaactatggactctctggcaggccagttcacctctattttcctctgggtaggatcccttcttggtgcttctgggatcagagatcatcaccccgaagcaagaagctcccaatgcactttgcaatgcggtgacaagccacaagtggtcacttcttcacaatcagccccctacccacattctcttcctctactttccggtatgcctcagactgaactcacttaagtattcccaagtcaaagacaagattcttctcccttatcccctctctaaggcaaaggagtgacgaaagatttactttctgtccacaggatctccctgtcacagcgcgcgcacgcgcgcgcgcgcacacacacacacacacacccacacacacacaggtgtggagaagccagcccaccccaggaaggccggaaaagcgagttctgaagtctgttctaagcttgggacagctcccagtcggggacagctcccggccggggacagctcccctttcttcccctggttgaagagagctcttggtcggggacagctcctggtcccggacagctcccgagcgaggcccaagcagggcctgccgctcctcttccccccagctcactctcacctcgcattctggtaccgccactgccacctccgccaccgccgccagtgggggaattgggccccgctgactgtttgcgccatccccgccagttctggcagaggctctcggcctcggagatgaaggaacagagtgaatcctcctcaaaacggtccgaatcctcgaatgagaagcgctctccgtcctcccactctgcaaacatcagctccatggggcccgcaccccccggggccgggtccccccccgcggatccggggcctgggccgccggccgggggttgaggggaggcccggggcctgaggggcgagccggggctgggggtggccggggcgctcagggcggccgtgccgggcgagaatctcaggcctgggaaagagacgggaccgggcctcgcccaacagcgcggtgcaagcggtgatcttggccagtctccgagacttagggccgggacgaagcgctcggcggctggggcctctaggcggctgcggagccgcctcccccatcagctgatctggacttccggccgcgcgggccaccaccacttccgccctcgcgcgctcgggatccggatcgggtacgggcggatgtaggggacatttttatttaatggctgcatttgctttttttccctcgagcccaccctcagacatcataagaggaagccaactcccaacgttatacgaagcaactacagatcccagcaacaactcggagtccataatgtccccaaggcataaacagccgccatgcatgttgggaattgtaggctgtcaggagaggacagcaactattggatggagttattgtcttaactctggataggccccagggccgcaccaccttctgggaatcgtagtccagaagtctgcaatccagccgacctttttatagggtctaactggggaaacatcagaaaagaatgcatttgatttcaggaaatggttgtactgtttgtccatacggcctttggatctagtaactcaacctttttttgtgccatggaccctttagcagtctaggtaggtttctggacccccttctcagatcgtttacaaatgcacaaaataccaagaattacaaaggaaaccagttgtttaaatacaattattaaactattaatagaacaaatctgtaacgtaatagtgctcctttatttacacattaaatgacaagatctaggaggaagcgtagtaactatcataattttgaagctagtgatgagtataaatgctttttgagatatttgtaaccaactgtaacatggtatgaaaataccatgatttcatataggttttgataatgttactgtggtttgttttccatagccctgactgaaatgctaaatttcagttggagttaaaaatataaattatcccccaagttcacagacgtcttaactggagtctattgacctaggttaagaactcctaaggccaggcgcggtggcttacgcctgtaatcctagcactttgggaggctgaggcgggcaaatcacgaggtcaggagatcgagaccatcctggctaacacggtgaaaccccgtctctactgaaaatgcaaagaattagccaggcgtggtggtgggcgcctgtagtcccagctactcgggaggctgaggcaggagaatggcgtgaacccgggaaacggagcttgcagtgagccaagatcgtgccactgcactagcgcgggcgacagagcgagactccatctcaaaaaaaaaaaaaaagctaactgaattatgcctgaaagggcagagtatacataaaatgctatgcaatttttcctagtatcaggggaatcacaaaagcgaatgccttcagcaactaggcagctaacttgagagaaggaaacaggtaataaacaaagtagacatttgttaattctgtttcaccattttgtagagtccagtggtgaggtcactggagaatgcagacaaatgataatcagctctacctaattactgccaggtggaaataagaaaataaggctgccagagcttttaattttttttattaaaaaaaataagtggctgggcacagtggctcatgcctgtaatcccagcactttgggaggccaaggcgggtggtccacttgaggtcaggagttcgagaccagcctggccaacatggtgaaaccccgtctctactgaaaatagaaaaattagcccgtcatgatggtgggtgcctgtaatcccagctactcagaaagctgaggcaggagaatcacttgaaccttggaggcggaggttgcagtgagctgagatagtgccattgcactccagcctgggcaacagagcgagactgcgtcttaaacaaataaataaatacagctaaaatgtgaaattttaatgactttttttcctatttttgaacgtgaccagctaattttaaaactttttttaactgcgtggatcaaataaaacatatctgcagaacctctaggtcaccagtttgttaactttattatt

SEQ ID NO: 914235 - DNA, 4001 bp, Homo sapiens
attttaaataaagaaacagaaagttaggtgacctgcccaagatcatgcagtggtaagtggtgacactgagattcaagcccatgttggtatttatattatagtgcctcaaaggaggaagcaaaacggttttctagacaggggacacagccgatacaatggcatggtggtgggaagggatattctcctagggggacgaacctacctgttgtagctgccactggttctggactgctctgcgtttctccatggccatttgtttctacagataagcaagggagaaagaccaagagaagtctattttttctggctagaattttgggagattgcaagctggcacaactcagcttgctcactctttccctcttcctttctaactgcccttccctccctgtactcaagacccctgggtgtaccttggcctggagctgctcaaaggcttcccggagttgtgtccgtttcctctgggcttcctccatctgagtcagggccttggtgaggccaattttgatggcctctacgtgctccctgtaggtggccttcagctctttccattgttccttagctgcaattgccttctgtcctgagatgagccaccaggaatgagtacatgagtgagggtggcctgctagcctgcctccctgcaacactgggcctccttcccatcagccaaatgggagacctaactgaaatcctccttccttccccactcaggtcagctgctactacaatcccctgcctactcacggctcgtgtcttcagaagccaaggggtcgagacccttagcagtgtcctcctgagccaggatgttctgcaggaaatccgctacctgaagctggctgcagagcagcttgtctttcttctgagagtcctgctcagagggagggcagagacagggaacatccttacctccttacaggtttccttaagtctgctctctgccagtgctgccctgtatctcagtaagaggagccaggaccagaccctggcttctgaaaggctcgctctcatcttgtacataccaccacaaactcaaccaggatcttggctggcagttctgcctcctcctgcaggcctacaggttccaagatgcctgccacctcagccaggaccctggaggggcaaggaaacacaggaaattgcagtttcttgtggtgctagttctacagttcgtgtgtgtacacaaacaaatgtggatgtgtatatcagtatatatagtattgagagtcttgccttgaccagagtttacacaagggcctgaagggtccacagcctgcaaccaggaatggcgtgcatggagggcacacggtggtaatacgtgccaaaaggaaaatcagcagggctagtggataaggagtttgagaaaagagctgaaattttaaatagggagtgtctcactgaagagaaatcatttgagtcaagatgtgaaggaagccagggagatatgcaaggaaggggaagaatgctgggccttgggatccctcctggcgctgagcaccagccttggggcagagtcttggaatagctgagaaaggactcagggcagagggctggatgcctcggtctactctagggtttttcattattagggactggagcaatctacgaaggggcagggatggggatgagaagtgactgggaatgtgtcgtgttgggacaagaagacagaagtgaaaccgtctcctagagcacatcctgtggattatgtggatgtggggagcggcgaacggtcccccaaaggctgtactcctggagcaggcaacagacacctcaggaacctaagacgggactgcggtgaggatcacttcacggcagggtcgaacctcaacagctgtacagggtcgagggcaccaatcattacacataggggcccacaaggtcctcccaggcccggccccagctgccacttagccgcaaacacttactctagggctgcagcttccgcctctgtctccgctgcctccatctttccaggcgccgagttcagctgccttcccacaatccctaagattactttgaagtcacagtcgacttcgcgccggggcaggcgattggctgcagaggttagtgggcgggcatcaaggaccattgtgcgctctaattggcaggcgcggattcgctcgttggcgggcctcgctgcttggcgcaagcgcggttatggctaggcgcgcacgggctctgcgcctgcgcgctagtccttacgcggtgccagagactataagtgggcttgagctcgaccgcgcgcctgtggaagttctttctctactcgaaaaagggaaagcatttccttgagtttgcgttttaagggaaacttacagcattgacactttatttaaaatattcactactgctgtagaaaaaaaaaaacaaaaccccgaaaaacagtggggctgtttctaagacgctgggaatcagtaaagaatagtgatccgggagatacaggaagcaaatgatctgcgctcaaaaagcgagctgctttcaaagatattagtattttatagatgcgatgcaggagagtgaactcaagcagagcccagccgattgcctgcgttggcaaaatagaacagatattctggggagaccaaggtaggtaatgttctttgcagagtacaggagaaagataactgctgagagagaacttggtattcattcagctgagtactgagcagtatgtgtctcaagaaactagctaaaagatttttaaagataccaggacatggccggtcgcggtggctcacgtctgtaatcccagcactttgtgagtctgaggcaggtgaattacgaggtcaggagtttgagaccagcctggccaacatggtgaaacccccgtctctactaaaagtacaaaaaaaattagttgggcgtggtggtgggcgcttgtaatcccagctattcgggaggctgaggcaggagaattgcttgaaccagggaggctgaggttgcagttagccgaaattgcgccacagcactacagccctggtgacagtgcgagactccgtctcacaaaaaaaaaaaaatacatatatatatatatataaatatatatatatggacattacagagggtcagaaatagtctctatttccactaaccaggctggaaaacttcatagtccgtaggacactggacagagtacacacaaaaaagtcttgatttgatagttgtttactaattatttagtaggcagtaattagtcctagctgatcagtgctgtagtgccatctaactcttaaaagtaagacccaaatggatcaaacttaacaaaccatgacagatgacaagaccaaacttcagcagtatttatagaaatagaaaaatgttcaccaaaggtgcaatttacatatgtcatacaaagaaaaattaccaagcttgcaaaaagaaaaaaaaaaacacataatgaggagaaaaatcaattgctgatcagaactgaagtaatgttagaatcaacaggcaaggacattaaaacagttattgtaactatatcccatatcttcaaaaagatatcagaactataatgaaaaaggtaagtggtgctaaggatgtaaagaaagtggaattctcatgttgatggaaatgtaaactggtgcataggctttgaacgtagggttaccatatgagtcacaatttcattcctagttatatatccaagacaaataaaaacatggggacacaaaagtacacaaacctctatagcagcattattcacaaaagctgaaaggtaaaaacaacccaaaggcccattagctggtgagtgaaaatgcatactttcattcaatgaagtattaatcagtagtaaagagaactttattacatgctaaataatggttactacatgctaaaatatgaaccttgaaaatatactaagtgaaagaagctaattacaaaagaccacataatatattatttcatttatgtgaaatgtctagatttgacaaatctatagcaacagaaagtaaatttatatagtgcttgtccagggctggggattggtgggaatgagaggt

SEQ ID NO: 914236 - DNA, 4001 bp, Homo sapiens
gctcactgcaagctccgcctcccgggtccatgccattctcctgcctcagcctcccgagtagctgtctacaggggcccgccgccaccacgcccggctaattttttgtatttttagtagagacgggtttcaccgcgttagccaggatggtcttgatctcctgacctcgtgacccgcccgtctcgacctcccaaagtgctgggattacaggcgtgagccacagcgcccggcggattttaatttcttaaaagcttttttattgtcgtaaaatacatgtaacataaaatatgccattttaaccactttaagtgtatacttcagtggcattaagtacatttacagtgttctttagactttgatttcttacatcagtatttcttacagtgaaattttcaaaagtatttgccaagtttcaaaagaacttttttcctttaaaaacggtttgtataccactcaagactatgaatcactattcaaggcaataaattcttcttacaatatagaatttttctcttgataaattgagtattctttctttagataatgggaataatacacacccttatggtttttcccctttttaaaacctggaaatgaagaaaaaaattcggtgtttgtgtgaccattttccctgttactcatataattatttgcccatctatttcttatctttctataattacagatttctcttttttacatggtttgtgttgtaccttgcttcaaattctttttttttttttttttttttgaggtggagtcttgctctgtcgctcaggctggagtgcagtggcgcgacctcgactcactgcaaccttcgcctccccggttcaaggggttctcctgcatcagcctcccaaggattcccggctaattttcgttatttttactagagacggggtttcaccatgttgcccaggctggtctggaactgcagagctcaggtgatgcacccacctcggtttcccaaagtgttgggattacaggcatgagccaccgcgcccggccaaattctttttaggaattaggtactacattgagttttaaatgcactcagaaaattctcaaagtaataaattatagactaaataaatatagcggaattcagtctaaattataggaactccttttttgataactaatatttttaaagtactcactatgtgctacggcactgtgctaatcactttactgtgatttatctagtaataccgtatgatgtaggtactattatcaccccactctaaggagttcaaagaaataaagaaacctccacagtgtcatgaagtagccccgctaggactcaggcctggctgaatccaaagctcaggcttctaagcataacgtgtactgctgcttctcaggctgcacattctattttacattattggtagtttctctctggcgttctttgtgggaatgttcactgcccccgccccgccccgaagtggaaccctgtcttctaacaaacttttcgctgctccaccgtctcctgtcatgttccgcctctcaatggagtcccagcccacactccgattctggtccctgaacagagccccttcccctcacaccatggccccctagcagagcctggtctcctcagatcctcttctcccagcagggccccaactcctcactccgacgattcccccagagttccgttccctcagatcctgcttttccagcaaagctgcgattcctgtaccccagcagagagcaataccccgtcggcaaacttccacagagacatcttaccgaggtcccagcccagcccctaattaagggcacacctctacctttccccttcccaaccttctcccacaactgtgctttcccccgccctattccctttttctgtttattaattctcctcaacctctccaccatctcgtggcccagtttcaggattcccccgcaaactcacccaccgcactgtctcctcaaagttgcgttcccaaacggcgcagtgctctgcccgcacttacgctcccagcgctgcttcgggatctgcgctccccaactgccctccgggaatacgccctgcagttgaacagcgcccgaggccccgccccctctgcgtccattggccattgttctcgagaagtcccgcccctcccgcttccagcccgcctccccgccccgcttcccttgttttcattccccctgtcacacgaggcagtggcaagcccgaaggggaggagagaagggggcggaaagagggcggaaagtgaaaggcgccgagggccgctctgtctcccgtctgactcggttctcgactgctccgggccgccgatgtattgtgggatcgcggagccgtccctgagacgctgggatccgcagaggagcccacttgagagcgcctcctgtcgtctgtaaggttgccttgccatccctcggcaccacaacttcccccgcccccccatcgcctcctcctccatcctccagttcaaaatggcgacggcggcggcagcggcggcggtgatggctcctccgggctgcccgggttcgtgccccaacttcgccgtagtctgctccttcttggagcgctacgggccgctgctagacctgcctgagttgccgttccctgagctggagcgggtgctgcaggcgccgccgccggacgtcggcaacggagaaggtaagcgaggggcccgaacgcccggcgggaagcggccctggcgctctgctactctccgctcttcacaggcgccccggttcttcgcggctcgggcctccgcggctctgtcttccccctgggacgcaactccgccgggctggtcttctccgcccagcccccggggtcttgggcagtggggaggcggggcggaggccccctagggccactcggccgggcggggagctgaggtggaggcgttgcgggctaggtgtgggctggaggcggggaggggtcattgtgccggtcggcagccccggggactgcttctccgcggcggagggcggccccccaccccgtctcccccttggcggcgggggaaggggagcgcaggttccggccagctttgcgcttttctcctcctccccacccttactccctcccctcctcccaccagtcttcccgaccatctcggggaaggctgggctcggctgctccggacacctccttatctcccttcacctgggtgggcgggggccagcggacactcaactctccctccctctgttgggaactcccctgagagatttgtcccttttcccttcccctcgagggctgctttaacccctaaaactccttccttgaagtggggaggtctgctcctcccccacgggagggggttcttctccattctcggtaggggggcgaagtcggttcagctccactgtggagaggagagggttaattcctcctccatagttctccttcctctccccacctcccccaaaataataggcgagcatctccccacttttccaatcccttcccccttcatcttggcagccgggcttaggcgaagaagtcgtctccctcccatttgcacggtagggtggggtggttagtatgtaagctggaggaggggctctgacggagggggaaacagttgaagaaggtgcttgttgctcatgtttctctctctggtgccgctggtctattattggtgttcgcaagtggtgctccttccacataaggccaccgcgcgggtgcagggcgcatgctctgcccggccccattgaaacttcctgctgctgctgctggttcttttgctggagcatctcagcgctgcgcctgctgcctccagccttcacactgagtgcttatactcacccccatttattcccgatccctgcctctccttttctggcacttttctttcctcagagaaggcttttttgttatactctgagcattgcctttatctggaaacagcccttggctggagaagaaacgttttccaaataggtctctttttttgtccatattagctggccaaagtggattggttattgtacaagacagatagctgtttcctttccaagaaagcagggtc

SEQ ID NO: 914237 - DNA, 4001 bp, Homo sapiens
aagaactggttttccttttgcagttctttgcaaacgaatatgattccaagggatattcaatttctctgcaactaatttccttatcatcagacgaccagcctgttaagtacataaaacatttggtatgtactgatgtctactaaagatacaagcacactgtatgcaatagtacttttttttggtttctaaaattttcatttttaaaacttttcaaaatacttaagtattaaacacacgttaattaagacttaagcaatgcttaagtagataaaaagttaaagcccgccttagcaattccctctcctttgctagtgaccaaagttaacagctggcatcctgtcagtcttttctgtatttaaatatatgtgcatttacatgtttttgctaactctacatataaacacaaacatgagattatacttatgcagtattctaccacatataagctttaaatttataagtattgggaagtattttatgtctgtacacacacgtctggtccatgcagttttaactgtagcatatttcataatattatttcccctttattggacattttaggctggctctagacttgctgtcaaaaacaactctgcagtgagcaaccctactgtacctacatctgtgcatatgtatttctagatcccatatattgatcacccagcttcaacaattagcaaggcatgacctatcttgttctgctctctcccacctccaattattattttttaaataattactaaaaacacacacacaaaaaaacaagaatataagatgacaaagtatatatttttaaaaatatctttcaggtttttttcttcttcaattctaacactgacttttaaaaactgcaggcttttaaatgtagcttattttacaattccttacaaatgagtaaaaaattttcaccaatgtgccttaaaaattatcaactagtctacatttcaaacagaaagtgtttcaatatgggacatttttaagaaaggactgtcttttaaatgatggtaattcacggttgtttcaaattgcaccatattgtacagattacttgttttgaaatccagttttccatttgttgcttcaaaatacatagctaaaataaataaatctacgtaaaatactgtttcccatggcatctagtgaggaaggtatcctctctggcttcaatttcattggcttcaatcccggggagcgcagggctacaaactaaatcatactgtcaataatttctagggcctaccacgtgcagggagtccttggagaatgatgggatatttaacaggcagaataagcataggctatgaacgcacacaaacaaaaaaaaataacatttaaagataaagacataaaaacattcattacagaaaaacccaattttgtcggccttccctacacttatttcatggtttaggagggtctccatttgaaataacaaggggaaagagataatgtttacagccatcgcggcctccaaggcggttacaaaggccgtggaaaccaggccgtgcgtcgcccacaactccgcagcgccggctgctgtcgcccgggccggccacaggctccacagcgagagggtcgcggccagcgcgggagtgtcgggtctccacagcccggcccgcctcccccaagatctgcttcctaggctctaaataccaaaaaagacctgtagtaccatggctgccttagcgtcccgggcaaagacgaactggccaatgcgctccttctcctcgggctgaatcgatcgcactgccagcagccattcggctcggctcggcagccaagtgccgcaggaaaaggcccagcgcacgccctccatggatggcaccaagcagaaccgtttggcagggaaaaccatacactgaaagcggacctcgccgctatctcgggcctgatggcgcggacgcaaacgtggccccacccccttcttcccggcgtccgtgcgcaggggacgggccgtcgctacgcagactggcccaccgacagccctcccagcccgcccccgactcagccacctcctctcggagaaagcagctgggggcggagacggagatcagccctgcgctttgcggcattgtatgacgtcaagtaggcgaggcttcggaggcgagcgaagggcgggaccaaggccaagagcccgacagttacgccactcacacttgcggaagagttaacgggacagcggtgcaggccaatcgcaaccagtcctctggaggcagggagactggggtggagacttcggagactgcagttgcaggtgggtgagctccggggtctgagggaggagtgggatggtagcccttattctcagggtctgagttggcccctgtgacccacagagaagagaatgtccttggcttcagctgcttcgtgtacggggcacgagaggtttccatctctaggagggggtctgcagtggtgccccctgcagttgtgcaacgcatcagccctgagttccttctttccctgcccccatccgcatcagcctaagacccaccctcacacagtacgctcccgacccttagcagcagcctacctgaaaccctccctccgaaggccgagcagaggcactatccccagtgcgcaacactgaccccgcctggatccgaggctgccagcgagcagctgagctaatgctggctgtttatttggggcgatgaagcgacccaggtgctgttttgctattgccaagcctgggctagagcactagcgagaaaacaggattccattgttgaggtatcagtgtttccatcatgacagaggtccttgctctaacagcaacagaaacaagtaaataactttgctcagttattttctcagactttgcgaagggtcatattgatgtatgtctgtttccttagttgttccgtgtaggctgttgttgactctcgtatgaaagcccacgcgatccaagtgccctgcaggttttggtccagggaaaagttggtctctgcagatgactgtaaatgactacctggaggtcgattaaagtgcggtactgcgggattcagccgatttccttcttcctctgactgcccggaaatatcagccaaaggccagcggtagtaattaacacaattacctgcctatgatttctgtcctatttaagatgggttctattatgtttttatctatacttgtcttcattaacttttcgtgatatcataagccccccgaatccctcgaaagtagatgggattctgagcacacacacacacaaattcagatccccaaaggacagtaaaacgaattattggcttaatatatcatcttagctaaccaaaagcctgtgtcagctgccatgttgaaaatctgcttaccagctgcagggagcttacaatctggtaaggcaaataaatcatacgcataaaaagtacaataagagacagtgtaaagatacgtaagtgatactaatacccatatcagcaatgatcataactcacttctccatttttaactaagaatcatataacctttccttcttgtcgttttaaactgatttttataactttgatacattacgtttctgtttccaaaacacttctgtgtacgttattgcacatgttctgtgcactagttattactgatggagacaatgagctcagaaagagaatttgtttaaattcaggaattcatatcccattattttaccatcgagcaagatctctgtgtattagatctatggagcctaatacacagacagtaacgtagggattatttgtacttggtctagaatctagaatattctccccttctcccattatcacattccttgtttcctctgtatcattcaggcccaaatctcataccaaacagaatgtctctgttcacctagtctaaaatagcttactctctccacttccaaacctcagccccaaacctatcaccctgtgaacatattttataggtttgtttaatccccttccctgtgtggttttacaaattctccagagcttagcttaaaccttctcttagggcctacttcagagtacctttttccaaaa

SEQ ID NO: 914238 - DNA, 4001 bp, Homo sapiens
gagcagattcactttcctgagtcctcagacagtcactcacccatcagacaggatgccctctgcaatctcacacaccaggacgaagagcagcatgaaggtcaggatccaccgcaggttgtgcccagggaaatgaagccatgtgctgtggtggatgtgcaccttggagctctgacttccccatcctgcagggagagacagtcagaggcaggatgcctgcccacttggaggaggaagagggtgcatgaaccccagaaaggtgcttgggcattgggtccatggtgagggtgacacctacacatgaggatccccaaggctggtacacacaaactaaacgtccaactcattcagcctggtcctatgctggtacctcccccaccacacctttttactgagacagggtcttgctctgttgcctctgctggagtgcagtgccacgatcacggctcactacagccttgatctcctaggctcaagtgatcctcccgcctcagcctcctgagtagctgggactacaggcgcacatcaccatgctcagctaatttttaattttttgtagaaagggcggggggggtctcactatgttgcccaggctggtctcgaactcctggactcaagcagtcttcctgtcacagcccaccaaaatgctgagattacagatgtaagccactgtgccctgccaaggtaccccattatacatactaacttcttgtgtgacaagtcatcaggttaataaaccgtttggctgagaacagaagtgtaaatgctgttcttttttgatttttgatgcacatatgagcacatattttgtatgttttatttctatttctatctaactgtctttgttaataactagcaactctgcttctgcagcaacctcttgtaaatctaattttgtgacaatctttcctttcttccccaaagctgtatatgaattttaagatttgcttgttttcttaaagtgaatgaacacgttttggggatgcaggggacaccctatgagttgatagacttgactggtctggaagagtcaaggtcttggagagagatgggggggacctcagtggagaggcacgcacgattgtcccggccgtggcgcccaactttgcaagcaagggcgccggggtcgctgcgtcggcgagtcggagctactttgcgcagagcctgagaagttgcgctctggagacacatgcccgggtggggtggcgggggaagggaatccaagtccctagctctcgcctctcctcgcccagggcgcgggcctgggactgtcagagatcacggaccactgcgcggctcagcccggtgaaagcataggggttagctgggcctccatcccagactccaaagcacaggcttccctcttccctaggcccagctgcggctgacagggaggctgccttgcgggaggggtgacccggctccctaagctgcgccacggagggtgaggcccgacccctctccagtttcccactgcgtgctgagacctcctctttcccttttccccatcccagctcttggccctgcagaagcaaaacttggtgatcccatgggtcacaaacgtccgctgtgtttggcgcgggatcgggggcaccgggggagtgaagggatgagctggtgtgcgagtgcggggaccggcgggcaggacacagggcaggggaccccgggaacgaggcggacggcggtcgcgggccggaaggggacgccgagcggtgcggcgcgcagcgcctcctcctccctccctgctctcccgtcccctcctccgcggctcgctgcgcgcactcaccaatgaagaggatggggaaggtgatgaagagtaggaagacgtgcggcaccacgttgagcgcgtccacaaagcagccgttgttgaggaccccctggtccacccggtaggcggccgagtggttctcgctgccgcagaaggccaggggcatggcggcgcgggcgcgggctgggctcgggctcagctggctccgctggctccgcgcgcctgccgcgcctctgtcccttgcagctccgccgcccggcccggccgtcaggcccccgccccccgggccccgcccagccccgctggcctccccctccctcaccccgccctgctccaccacctgcggggccggggggcggcgaggaacccgaccggccctgctacgcttgcgcccaccttccagatgtggaggcgcgtgctcccagatgttgccggggtggcttcgtgagtgccctgatgcacgcgtgcgctgggggagaggggaaaggcaggctaagatggggagtggggtgtgggcacactggagtctgggtgggaaaggagggtggggcgtgcagaagaggagagaagggcccgcaaggcctggagtgggcgggttcagggtcccgagtgtgagttcacctgggcgtggtgcggatggatgtagagagccgagggatggcgcaagtctccacccaacatggatgagaaaagtggggcagaacgttaccttgtggtggtggtggtggtggggtggggcttggacattttcaaaagtggtcccaggtggggcactcctaggtactgctttacagcgtatctggcactttcacacaagggatgtcccagaactcttgctaagtacaggttctaatcgcttccaattttctgatggggaaacccaagctgcgagggagctgaagggaggccagtaacatgacttcccccaaggtctcagtgccagcaagcagggaagcatagcttgaacccagctcctcaggtcccccgtccccacccccatcatttgtactcatgcctctggtacatgacaaccttacagcgactggcagaccaatgggtagaatgggtgacagccccaggctgataaagaggagtttaagaaacgcatctggccagatggatgtgaggcagtggagagggactgaaattcttaacctcacctgggacaggcttaacagttggaggacaccgtgcaattgtaaagacaacattatgtcttcctatacgttttggagagattctcacaagactgtggcccaaagaagtttatattgtatgtagaaagaacagaagatgggatttgggggttagatttaaggagaactttcctagttagggtatgaagcataaatgcacatgttcttaggaacagtcaggggaacacaaaagaaagaccccttcagcccctttgcctacaagcttcactgagcctgccctgaggctgctgagcctggtgagcctctccagcacgctgtcagcaaggccgaggctctgcccaggccctgaggcagagggcagatggggttgggtgaaaagccttgggaaagcaggagttcagggtctgaatgcctcagtctctgactttggagaatttctcagaagccaaaagatgtttcttgcagcatcagccaaaatagtgaaaacttggtggcaagaaatatccagcaccagggacaggggttaatcaaccttgaaaaatgcaactgctgggacggtgctagctgagtctgtgtagtcaatagaaaaactttacaagatagtgtcaggtgaaaaacggcaaacaaaattgtgcttcccatgattatagccgtacgaaatatgtatacttgcatgaagcctgcagggaaaggtcagacttggaaatttggtaaggcggtgctcagtatgtactggctgccgtcgctgtgcttatcctcattccctttctttaaaaatgagacaactgaggttcagagagatgagatgacaggtccatggtcacccagtaagattttttcttttagtttgtttttcttgctttcaaggtttttttttttcatattttctgcaatgttgttattttcttttgtagttacaatttcagttttttcacactttcagcaatgctatctttctttttagcagtaataatatatttacttttaaagaacagggctcctagtcctggctctactactactagttgtgtgatttgggggcaggttaccattctgcacttcagtttccttatttctaa

SEQ ID NO: 914239 - DNA, 4001 bp, Homo sapiens
cataattaggggagatgataacaaatccttacttgggaaaggtagaactctccctctctccatcctccttgctttctttcctttctgcctacccttaattgctttctgtcctctggagaaggggagagggattcaatggaaaacagaagtcatcgaggggagggcagggggcagagaaagggacaacggatgaaagaaatggcaaaatggccagtacagcagaatgaggctggcaaggtcaaaaggagggaagggccaggtgagggatatcaatctgtggctggcacatggaagcaactggagagctggcccgtctagacacattttaaaaaaaaatcttagtttcttaaaattatgaggaaatgagagggctaaagaaataacaactgcctcatgattttgcccagagctggtctcaggaccgaaagaggttgcttagggacagggcccactgggcaggaagcccagatgcctcagtttccattggttcagccatgtgaccttttggtcactcatgggagtgagggtttggagagtgcagaggcagatcatgctcagccctgctctgaagcaccccaaacctatttgttgaacctcagagaacaatgtcccagccccacccctggcccacacccaggctctgggaaacagcctcagcttccctactagcagctaaagctgctcagggtaggggctgcaggggctagtcagggttcaggggaacctgtcctcatgggcgggaagagggaagtgatgggactgctgtacagggaagagagagaaaggaacaatgcatggagagctgggaaaccgggcttctggtctcagctctaccacttactagctgtgtgacattggtcaagttactcaacttccctgggcctcagtttccttattagtaacatggagatgacatctatcctgccaaaccgccaccctccctgcttctgagcactgtggtaagaatggaataagatgacaggaatgagaacgtctttataattaggtccaagggtattgctcaaccctgcagacacagccccctactttttcataccagccctcacaggtaggaatcctccataaacaaaagaaggaaaactcatcaaggaccactcaaggaccagaggtcacgggatctctttagaagatacagcttcaataaccaattgcacctagtatcccatggtgctcacaggtgtgggggagcgtagatcctgacaccccaagagtgcacagtgagcaacgggctggggcccagattttagtgtttccacagagcccactggtgcaggactttccgaacatgggacacccaggcctcatgcttctggagaggcaactcagagagggcccacggactccccctaccaggctgttccctaccccttttgcgccagcagggcccctcccgcacggaataggacagctccacgaactcgatgtccacggctgagcgcttgggtaggtgggagaagcgctgggcttcagtgatgtggttctccaccttcttcaggtgcgtggtcagcacagggggttccgccccgtcctccagcgtcacggccatggccacagcccccggccctagtccacagcccacggcctccagcgccttctccgccatcacgccgccgacctgcaaggggagggcctgctcagtttggggcagaccaccgagcccggctcaaagctccctggcgttctaatgcttcccccgcccccactgcccacctccttctcggggcagatccgcgactgttagccccgcactctgcccccgccccccactctccgcacggagacgctcagtcccgggcagcccagctccagcctgaccccagcccgtccccttgaagccctcaatcgctccttcctcccggcggcttctctaatctccttaccccgcaggccagcagcccctggggactgaaggaatagggggcgggggagaagaggcagccggcagaggctgcccgctctaggaggtcggggtagcagggtgagtgcagggcggaccaggggaaggcggagaggaggaggcttcaggcctccggctgcgtcccactccccatcccttggcgcgacgcccaggccggcccctcccgccggcacccccgggcccgcgtgccccgggctgtccccaaagccaggcgcaccacccggactcaaaactaagcgccccacggcagctcaagcccccgccccatctcccgcatgcctagtcaccttgacgcgcccccgggccggtgcggggccgggatgctcagcgctgccacggaccggggacggagagccggggctccccttacctgcctcgggctgcggcacccgcgtcccggctcccggtcccggcggcccgggccggggcggggccggggcggggcaggcgaggcaggagggccggccctcggctcggaggagacggcaaggatggtgagaggcggttggggtcgcgccctgactctgctgggctgtgcacacccgcttcccagagcctggtcccggacgctgtgtcctccgagcccgcggggcgactgcgctctcctaccagctactgctcgccggtcccgccgttcttaaagggcccgcgccgcccggcagcccgcggggggcgaggacggcaaaggagagagcagcgcttgcggcgcgggggccggaggaggtgcaggggtgaactcaggactgggggttgatggcaaagggccgacttggaggcagtgaggaaaggagagctggagtcactccgtggggacaagtccctggaagacagattaggcaagggtgttgggggtgggggaaagtggagggattgtaaaggtgtcagtctgtcttcacacacgataccagtcccccaacaatttccctcagttccagcccatgaatgagcgcaggcctccctccaggaatccccaaacgaggtgcaaaggctttcaaaaacgcaggagccttgggacattggaacatcctcctgtctccccattcacactttctctgagttaggacactaataaagaagggaaaatggcagcagctttgggagagcctgcagtagctccagagttaaactggaacccagtgctcagcctgctccgactgtagtcacctagccagatacaggccttcaagacaggcacatgccatatcctggagggacctgtgtgccagggcatgcacagggctcgcagacatgccctgggcatctcatgcacctgcacattctctcccttgcccccaaagccttcaaatgtaggtccccagaacacacttggggctttcccctgctctgcccctttctcagccaattcctcttggcccttgcctgtcccagccactatgtcttcaaggggtaagtaggttagctagccaagacacgtgatctgagcttttaagttcccacctgtcacacagcagagacgatggggagggaaggctctgaggctgctggtgtgactgccaccgctgaggcttctccttactgcagcagttgagggttactagcagtcaaacctctcccctgctggcccccctcccaaccacctctccacagccctaaaagctggcgatccctggaggatttctctaggccccgccctgttactctgaggtttgtgtggggtttggatccagtctttcctatcttcccccaactccatgccccacatcaccaccattcctcaggaccaacctcctgttctccagatggaccctccattctccaagtcaacttctcatcagctactatagacctccccatcccccaacagttgcatttattaactactttgtaccaggcattatgttatttaatcttcacaatatccctatgcgacaggttttacaacccccctttagagatgaaaaactgaggcatagggaggttaagcaatagttggtggcaaagcagggcttgaatcccaaagtccctgattttaccctgctaattgggcctctcagaaccttattcccaaatggactgtctccctctattttctagacaggct

SEQ ID NO: 914240 - DNA, 4001 bp, Homo sapiens
catgctcagccctgctctgaagcaccccaaacctatttgttgaacctcagagaacaatgtcccagccccacccctggcccacacccaggctctgggaaacagcctcagcttccctactagcagctaaagctgctcagggtaggggctgcaggggctagtcagggttcaggggaacctgtcctcatgggcgggaagagggaagtgatgggactgctgtacagggaagagagagaaaggaacaatgcatggagagctgggaaaccgggcttctggtctcagctctaccacttactagctgtgtgacattggtcaagttactcaacttccctgggcctcagtttccttattagtaacatggagatgacatctatcctgccaaaccgccaccctccctgcttctgagcactgtggtaagaatggaataagatgacaggaatgagaacgtctttataattaggtccaagggtattgctcaaccctgcagacacagccccctactttttcataccagccctcacaggtaggaatcctccataaacaaaagaaggaaaactcatcaaggaccactcaaggaccagaggtcacgggatctctttagaagatacagcttcaataaccaattgcacctagtatcccatggtgctcacaggtgtgggggagcgtagatcctgacaccccaagagtgcacagtgagcaacgggctggggcccagattttagtgtttccacagagcccactggtgcaggactttccgaacatgggacacccaggcctcatgcttctggagaggcaactcagagagggcccacggactccccctaccaggctgttccctaccccttttgcgccagcagggcccctcccgcacggaataggacagctccacgaactcgatgtccacggctgagcgcttgggtaggtgggagaagcgctgggcttcagtgatgtggttctccaccttcttcaggtgcgtggtcagcacagggggttccgccccgtcctccagcgtcacggccatggccacagcccccggccctagtccacagcccacggcctccagcgccttctccgccatcacgccgccgacctgcaaggggagggcctgctcagtttggggcagaccaccgagcccggctcaaagctccctggcgttctaatgcttcccccgcccccactgcccacctccttctcggggcagatccgcgactgttagccccgcactctgcccccgccccccactctccgcacggagacgctcagtcccgggcagcccagctccagcctgaccccagcccgtccccttgaagccctcaatcgctccttcctcccggcggcttctctaatctccttaccccgcaggccagcagcccctggggactgaaggaatagggggcgggggagaagaggcagccggcagaggctgcccgctctaggaggtcggggtagcagggtgagtgcagggcggaccaggggaaggcggagaggaggaggcttcaggcctccggctgcgtcccactccccatcccttggcgcgacgcccaggccggcccctcccgccggcacccccgggcccgcgtgccccgggctgtccccaaagccaggcgcaccacccggactcaaaactaagcgccccacggcagctcaagcccccgccccatctcccgcatgcctagtcaccttgacgcgcccccgggccggtgcggggccgggatgctcagcgctgccacggaccggggacggagagccggggctccccttacctgcctcgggctgcggcacccgcgtcccggctcccggtcccggcggcccgggccggggcggggccggggcggggcaggcgaggcaggagggccggccctcggctcggaggagacggcaaggatggtgagaggcggttggggtcgcgccctgactctgctgggctgtgcacacccgcttcccagagcctggtcccggacgctgtgtcctccgagcccgcggggcgactgcgctctcctaccagctactgctcgccggtcccgccgttcttaaagggcccgcgccgcccggcagcccgcggggggcgaggacggcaaaggagagagcagcgcttgcggcgcgggggccggaggaggtgcaggggtgaactcaggactgggggttgatggcaaagggccgacttggaggcagtgaggaaaggagagctggagtcactccgtggggacaagtccctggaagacagattaggcaagggtgttgggggtgggggaaagtggagggattgtaaaggtgtcagtctgtcttcacacacgataccagtcccccaacaatttccctcagttccagcccatgaatgagcgcaggcctccctccaggaatccccaaacgaggtgcaaaggctttcaaaaacgcaggagccttgggacattggaacatcctcctgtctccccattcacactttctctgagttaggacactaataaagaagggaaaatggcagcagctttgggagagcctgcagtagctccagagttaaactggaacccagtgctcagcctgctccgactgtagtcacctagccagatacaggccttcaagacaggcacatgccatatcctggagggacctgtgtgccagggcatgcacagggctcgcagacatgccctgggcatctcatgcacctgcacattctctcccttgcccccaaagccttcaaatgtaggtccccagaacacacttggggctttcccctgctctgcccctttctcagccaattcctcttggcccttgcctgtcccagccactatgtcttcaaggggtaagtaggttagctagccaagacacgtgatctgagcttttaagttcccacctgtcacacagcagagacgatggggagggaaggctctgaggctgctggtgtgactgccaccgctgaggcttctccttactgcagcagttgagggttactagcagtcaaacctctcccctgctggcccccctcccaaccacctctccacagccctaaaagctggcgatccctggaggatttctctaggccccgccctgttactctgaggtttgtgtggggtttggatccagtctttcctatcttcccccaactccatgccccacatcaccaccattcctcaggaccaacctcctgttctccagatggaccctccattctccaagtcaacttctcatcagctactatagacctccccatcccccaacagttgcatttattaactactttgtaccaggcattatgttatttaatcttcacaatatccctatgcgacaggttttacaacccccctttagagatgaaaaactgaggcatagggaggttaagcaatagttggtggcaaagcagggcttgaatcccaaagtccctgattttaccctgctaattgggcctctcagaaccttattcccaaatggactgtctccctctattttctagacaggctcttcatcctcctgagataacctccatgtcttaatgccacccagctttattctttggcacacaactttctttctttctttctttctttctttctttctttctttctttctttctttctttctttcctttctttctttctctttctttctttctctctctctctttctctctttctttgcttctttctttctttctgatatagtctcgttctgtcacccaggctggagagcagtggtgagatctcagctcactgcagcctctgcctcccaggttgaaacgattctcctgcctcggcctcctgagtagctggaactacaggcacacaccaccacacccggctaatttttgtattttttgtagagatggggtttcaccatgttgaccaggctggtctcgaattcctgacctcaagtgatcctcccgcctcagcctcccaaagtgctgtgattacaggcatgagccaccacactcagcagattaagattttttattctcaagagtagactataggccaggcatggtggctcacacctgtaatcccagcactttg

SEQ ID NO: 914241 - DNA, 4001 bp, Homo sapiens
gacagcttggaaaaatcaggtctcaggagacaatctgtggttacttttctgggaaggggagtcggggtccccaggtttcatcattcctgggcacatataggtaagagcgaaccactacccctccatcccccaagagagcgcctgacagcatccttcagcccagcaaagcacaaggcgcagcaccagatcttgggcttcccacttccctccgcccatcttacttatccaaggttcaggtctttaagttgggaccctttggttgctgctattgagctggggaaaactagggggcagaatcagtcaatctaaccagctgttggggaaagacagcagctagagacctagtcaatcacggtaaagagccacggggcagtaagtttcatttcaagagaggttcaggaatggcttggtcaagagattcaatctcacccaatcaatgaacagcccgcagatagtaacaatgccacgcagaacaggatggagatcattcacaagtttaccctccaaaagtcagacacccttagaacaatctctggcaagtgccatgtaatgaaccctatcctcagaccaaacgttttctcccaaagaactggcacagccaccagctttgtctcaggaaattcactcccccagtagcccagggcgggatttcttgcctacccagtctgccagtccgaggcccgcgcgcttaccattggcgttcttgccgcagatgagatgctcatagggctgcaagacgccccagagctcggcgtcgttgttgatgaccatctccagggcctcagcagacacctccccgcctccggcccctccgccatcagggctgtggctggccatcaccctggcccggatctcctccaccaggttctccatgcaggcggtgagggagatggctgcgtactcgtggatgcgcacggagattcgggtgtccaccatccagcggaaaaagcgacccactgagaaggtgaggccgcagcgcgcggacttgccccggcgcagcccgtcgccggcgctcatgctgtacagggacagcgccttgacggctgccagcgcgcagctctcggccagcgcccagctgtgcaccaggcgcacggcgctctgcacctcaaagcgggtgcacttggcgtgcagcacgctcaggcgctgcgcctcgcgggccacgcggatcagtgccctgcggagcagcccggccaggcgcctcaccgcctcggcggagaactggggcagccgccggccgccagcgcctttgcggagcacccgggccacgtctccttcggtccaggggaactcctccagctcggggagccgcggacagcgcgagaagaggtcggccacttcggggtcctcgggcagcaccgtgttcaccgtgtcccagctgttgtggcggctgttcatggagccggagtagcaccaccaggccgccccgcggtgctgctgcgccgaagagttgagcgcctgcgagttggacttggaggacgagaggctgagcgagcggcacgagtccccggccccatacccggagtccaaggtcaagtcctccagcgtcttcagagtcgagctgtacgtcccggccatggggagcctgccgagggcggcgtcgccgagcgaggggcactcacaactccatgccctctttcccaagtgggcagaaacaagctctaggccctccgggccaccctccttcctctctgcgtcgcggggctcggcggccgcattgcctgcccggaggccgcgggaaggtggccgagatccgtggccagcaggagccccacgctcccggcgtcccgactcgcagctgccactggaaagaaccccgtcgctaccccccggcactcccccttgtccacctctaattcccacaagcagagagtcagtcctccacagagaaggaatcccgggagaacagggcggcggcggcagaaggaggaggcggcggcgcagggcgcagggcgcagcgcgagtccgggaccagccggcgagaaagcgctctgcaaacttctgcgctgcgccggccggcagcacagctgggtacccggctgcgtccgacatgcaaataaccccgggcggcttaccaatcaccggccgcgatgggcggggctgcaccaatgatctccgagggggcggtcactatgcagatttcactctgcctcgggttaaaccccgcggcgaaggaggcggggctggaggccgagggtcgggcacgcggctgggatgggggtggggatggggggggatgggggggatgggggggtgggggaagggcgagccagccaactgggaggtggaggtggagaccggaaagcagcggtcgaaacgatagctccggagctcacgatttaaagaaaaatgcaaaggaaaagctacagggcgctgccaccttcccgccacccaggctttgggcgttcgctgctcgctttcgagccctccgcagccaggcgtcctggggttggggccaggagaatggggagggccccatccaggcgctccacctctcctccaccttccgccaggcccctcccgcaatccgagatgaaacgctggctgtgtttggagggaggagggagtccctgcctctctttccaagtccgtctggttcctttgcgctgccgtctaggctccaataaggacagaatttcttaacctggtatctgatcaatggacgggccccaggaagcctgtgagtgcctccgcccatttgtggtttcacctgcagttttctgagtgccactatggggaaggggcaccaacttttgtcagattctcaagaggatccgtgacttccctgttacctctgtgtgacgataccacttgctgtcaggtgggtcctttttgtccgagatagacagtgttcttacaggaagaatgagaagaaggtggcagagcagtccctcgccctgggctgagctcggaacacctagctggatgcaggtgttcgcctcctaacgcgtgccggtgggcgagccgtatgcccccgcgggacccagttcctccggggtacaatgagtggctgacctccaggcagcgccagtgccaacctgcctccgggcgggtgtcccaaacggtccgccagagcgctgttggttcagcagtcccatgcccggtgcaggcatgtcccgccgctgccctgtggctactcacacgcacgtgcgcaaacggacctgtgccccctccagtggaaccgcaggctcaaggcggggattgtgcattcgctctccccaagtcagcctcccccactcctgaatggctcctttgtgttgcattttacacagttctgaccttgggccgtgagttggatatgaactagaaatgtctggtttgtctctttccttcttaaattaatggcctttacccccggtgaaactgctttttatttggcagtttcgcttaattttgcctttccgcgggtctttatttatgcaacatcgccgcccgatggttagaattgggaacagagtcaaagatggaagtactgtaataccaaagacgcaagtcagcagagatcaaactaacaaaggagaatgcagtcacactttacagacgtgagattagaaattaaagtaggcaatgaggtccaacttgtcaaaaatacaaaagtaaattttatgcaatttaaaactttattggggaaatataatattaaaggcaatgtcgccctctaatggatatattcaaaggaaatgaatttcagaaaggtttccctgtccccccttttcttcgttgtgcgcacccatcaaacctaaagagaattacttaactggaaatttacaacggggaacttactgaatgaaaggttattggaggaatcatctggagtgggaaaaagagcctatgggatttatattaatatattcaaattacttgatgacttaaagtgtagataatcaaacatgcctccaactgaatctgagaatcctgtgaatgttgacctgcaacatgaagatatattatgcaaaattcagccatgggaaatgcttctgaacaaacaactgagtttctttaat

SEQ ID NO: 914242 - DNA, 4001 bp, Homo sapiens
gggttgctgttactgtagaccatggctcaaagatcatttccaaaagaatgtttattgggtgtttactaggtagcagtgctggggttacaaaaataaatatgatccagccaggcgcagtggctcatgcctgtaatcccagactttggggaggccaaggcaggtggatcacttgaggtcaggagttcaagtccagcttgtccaacatggtgaaaccccgtctctactaaaaatataaaaattagctgggcatggtggcatgtgctgtaatcccagctacttgggaggctgaggcacaagaattgcttgaacccgtggggcagaggttgcggtgagttgagatcgcaccactgtactccagcctgggcaacagaaagagactccatctcaaaaaaataaataaataagatccattcacacaaaggatgactatttcaatcctagcaagagctcattaaatgttaacaaatcttcttcttctgtaaatggctacttcctaaaacaaatagttcaaggaaccacaggcttaagaaataaatctgagttgcattctaatggaaggaaatagttttatgcaaatcatatgcataagtaaacacaagttcccagaaggaaatacagtataaaaacaaaacaaataccaccactcatgaactttgccagttactagcagagttcaagatgccaatacatagttactagcagagctcaagatgccaatacatatacactaaaaaggtaaagctaaatagaaaaacactccaaatgaaatgggaaaagcctttgactgcagagccactcaagtgtaagcaagatgcaaacaataacaaaacccacctctaaataattccttatctgcttcggtatcaaccagggtaatctgggttatcaaattctaagcgctaggccagggcagcacctcttgaatgagttttaggacattcagaagaaaacagtattctatgccttactgtactttatagatctgatatctaagggacttattctgttgtaaagaaaactgccatttatttaaaataaatttaaaaatatttcagaagaaaaaagtgtttataaacattcttggcagagaagtcacaaactggccgggtctccaccactcctcgctacattcaaattactgttcagagcctaaagacactcaagtttgtcagctctggtagagtttcccactggcaataataattatttttcctgcatgagtttcaacactaaaagtgtcttatagccagaggtgttaagataccaaatctttgtgtgtgagcaaatcttgtatgacctggagttcttgtgcagttgtcaccatcagcacccagccagcttcttatattctcactgcttttatgacctactgttatgattaaaaaccaaccaacccaacaacaaccaagccccaagtttcttcacttctctaagcatccgagggtgaccggccgcaggaggacccgggccggaggggaacctgcggggggatgaccggccggaggggaacctgcggggggtgaccggccggaggaggaccggggcgggggtgaccggccggaggaggaccggggcgggggtgaccggccggaggaggacccgggcaggggtgacgggccagatggggacccggatggtggtgaccgaccggagggggcagccaggccgggggtgaccggccggagtagggagccaggccgggggggtgactggccggaaggggagctgacgccggggtgactggatggaacggggagactgcagcccctcgcggacatatgtccgccggggttctggacacctgtcctactgcccgccaggagatccttacggtcgatgcaggaggtcaagctccggtggccggtctggacgaggacccggagaccgccgggcaggcagccgaggcgcgccccgaaacgccggcagccgctccacagcatagccgccgcagctccgcgttcagctaagagtctgaacgccttcgacctccgttgcgctcgcactggcgggacctgcgacccggcaacgcctgtcccactgcaccctgggggttgtagtcctcccacgagccctaacaacccaggtgccaggcgggctcccaaggggacaggactacaattcccagaagtcctcggggcctcggcgccgcagagatgcaccgcccaccaagcgccgcgggggtcgcgctgcacagcctgcggcgcagcggaggcggaccgcagtcgagtctgcagagtgttgggtctgtagccagcaaattacttcatcatctagattatccattcagttgatcctaattagcaaggataacaaggtaacacaaggcttacttatattcacccaacaaaagtgtctctgtggagccacttcccagtgaactacatactgagataggggttcctggatgagaaggaccaaggacagaaccgagaagagtttaggggcaggttatgcgagatggaaatggcgcagataacggagggaaggatttgagggctcaaacgtaggcgtctgtgtttcgcaaaagttggagacgttctaggctgcctctcgttgcctccatctcgctctgcgcgggttttggaggacattagcattctttcttgtatctccgttgattccagaatcgtccgcactaaagtcccctgcagcgtgaccatgtcgagaccccggaagaggctggctgggacttctggttcaggtgagctgcccctaggctgcacaaaggcagcccaagaaaaaacttttctcgaagagcctgtttagtactcatttttcactccctgctttttgagaaccctttgtgatatttttactccattatccttaatcactctccatcttctttacttgtctcaccaagctcctacctacagttcctttttcttgtttattcaggcaatggttgttgtgcacaaagactctttgagataccaggtggcgtgctaaagaatataaagcgcctgcttgcgggtgaactgcaaacagatgtgatggggttcaggaaaatggattgttaagtttatggagggaggaatcacggggaaggcctcgagaaggatgtggaatttgagcccagccttgaagaatgggagactttccacgggcaaagtttagtactaagaaaacgtgatgtcgtttttataatcacaaagatggatggcattctaagtggatggaggaggaggaacattggaaggtacagaaagtacctcttttgggaatgacaggggttccagatatactacagcacattgcagttatttatcaatatgtggtgtttgcagtgggcctgttaactcctaaggggccattaggaaactaggttaggaaggtatgctgggttcagagcattagacagccataaatggtatttaatgacaattgatgtagggactttgactaaattcagaggcagtatagtcattaagtagcttcagatagacctcagtgacaggtgctgacctcatatcttgattccaccattactggatgtgtgatctggagcatgcttcccagatgaagagtagaacatctcacaggttatgtagattaaccgagttagggttagggtaacacatagaccttgggccctgtcatatagtaatttaacaacttagctactgaatgcctactgtgttccaggcacattctgattgtcttgggatgaaatcgaatcatcaccatttttctacaatgtcctgaatgaactgtttctttcaacttttattggcaccttcaaggagcagaaaggagatgggccaggagccacagtgagcaagaaggaaagacgtatgagatgagaataataatgcttttattatgcacttattgtaatgccaggcattgtctaggccctttgtattacctcatttaagcttcaaaatagttgcaagtaggtgctcagtttcctctttcctatgcaaaggcatagaagagagagtgaggaaaggaaaacatgtattgactactgtccggacctttaatcctgaacaaccctg

SEQ ID NO: 914243 - DNA, 4001 bp, Homo sapiens
agaaaggcaatgtgctccaataaagtccataaagatttgttgaccataaaagagacctggtaagcaaagggaaaagagccaatgtaatgagaggtcaaattccattctacaaaatagcacagaaaactggaaatcctgtttatagttcagtaaatgaccatttaattcaagtgtccaatacaactgcttcctagagttcagtaatatgaatgtcacatatcatacattacagcatgtacaggcttatttttttcatgaggagtatttgtgtttcattttaagatctttttttttaagacggagtctcactctgttgcccaggctggagtgcagtggcatgatctcagctcactgcaaccttcccctcctcccgggttcaagcgattctcctgcctcagcctcccaagtagctgggattacaggcgcctgccaccacacccagctaatttttgtgtgtgtgtgtatttttaatagaggtggggcttcaccacgttggccaggctggtcttgaactcttgacctcaaatgatctacccaccccggcctcccaaagtgctgggattactggcataagccacctcaaccaacctgattgtaagatcttaattaaaccataaattaagaaggttctgaactttttttttttacatctctagagtacctagttcacctatgtcacctagtcaatactgactgaaacccaagataacctaattactttcttgtgatttcttcactcatcccatgagactaacaaataggctaaaaactcatcttccctggaaacctacgccttgtgacttttctattatctcagtcacccaggatcaattttagactctttcttttcccttggcttcgcaccctcactccctaattgtcaagtcctagactggttcttttacaatctcttgcaaagctcctaccgccagcacccttgtgcaagtaatgttattctacgcccagacgtaagaactagagtgacctaccattgcaacaaaaacaaacatatcaacaatccctacttaactagggtcaagtccatactcacaacataactggatctccaagcttattgcccccatcgacctagaaaactcaagcttcaccaaccacaccctgaaggtctctacctattcctgaggctttgcctgacaatctgtggtgcgtactcccttgcttacgcatgtggagaataaattctttgagactctgcccctgctgtgttccctaaacacaacggtcagaagagcgacagcccttggaacgccctcagtatgtgagctttgctcatatgtcaagtataatttattgtattatctgagtagtcatttgttttccctgataaatttcaggctgctccaaaaaacatctgttatgatcacatggtgccctctccccttgtatgcccaatgattatctattgtattaaaaaagaaaaggaacctctcctgacaataacgcacacaaatatgttttaaagaaaatctcgggagcagctgcacaggcctgcaaagagactctccccgatcccaccgctcaggccgggccagcgccaatcctggcggtcctgcccgcccagacacgtgcccttgtttgacacaccagtaacgctcattaagatgattacgccgagaccttggaagtagaaacgcgctgtaaaaataggcgagtccctgggtgttatcggagcacttaggcggtttttggaccagaacccgtcgcgtgactgtcctggggcctaagccgcgcgcccgggccgcgggagccgcaacggccgcgggctggaagcttccgaggcggggactcctcgcatcccgggtctgagtgctgtggggacgaaccccgctcacctgcaccagcctccggagcagggggctgcggctgcgggcgccgctgcgcagaagtgccgccagcacagccatggtcgcagagggctgagtatcggctccacaggcgtagactagcggcctcctccccaaccccgcacccctagcggcccggcgcgggcaccgcccatcccgcttcctccaatagtcgcctctcagtcggcggcgattggccggcagccaagggcggggcggagcctggcgctgggacaccgcagcctgggccaggaaaggttgacgagtgaaggacgtggatggagacactggcgctggggtcaacgagcacctgacacgctgctggctcccgtgtccaccaagtctaacctgccggggccggtggtttatgtgtaatccgagatttttcgatttactgagcatgtttcccttaggcctacccagcacaaactcatgaaaatattttaggatttttttttttttttttgagacaaggtctcactctgtcacccaagctggagtgcagtgacgtgaccacagctcactgtaatctcgaccatcagggctcaagcgatcctccctccccagccatcccagtagctgagactacaggcgaaagcctccacaaccagataatttttgtattttttgtggagacggggtttcaccatgttggccagactggtcttgaactcctggactcaagtgagcctccctcctcggcctcccaaagtgctgggattacaggcgcaggcgaccacgcccagcaaattgttgtatttttttttttttgtagagactaggtctccctatgttgcctaggctggttgctgactcctgggctcaagcagacggccagactcagcctctcaaagtgctgggattacaggcgtgagccatcacacccagccgtgaaaatattttgaagcaatcaaattccaggctcagtccagatacaaatatgggtaaaaaggcctcaggtgattccagtccccaaccttcaaccactccagctgagaccccagacatcatggagcagagacaagccatacccaccatgctgtctgaattcatggtccacagaaacgagagaaaacaaatggttgttattttaggccattatgttttggagtattttttttttttaagatagggtctcgctcttgtcacccagtctggagtacagtggtgcaatcatatctcactgcagcctcaaactcctggtctcaggggatcctcctgtctctgcctcccaagtagctaggggatcctcctgtctctgcttcccaagtagctacgtagctaggactacaggcatgctccaccatgctaatttttttaatttttattttatatagagaaggggtcttgctatgttgcccaggctggtctcaaactcctggccttaagagatcttctggccttggcctcccaaagcacagatattataggcataagccacctaaataggtctgtttgggggtaatttttttttttgagacagtctcgcacttgtcacccaggcgcgatcttgactcactgcaacctctgcctcctgagttcgcctcagcctcacgagtagctgggattacaggcgcacgctgccaagcctggctaatcttttgtattttagtagagacgggttttcaccatgttgcccagaggctggtctcaaactcctgagctcacgcaatccgcccccactaggcctcccaaagtactgggattacaggcgtgagccactgcacgcggccagggtaattttttaatatagcaccctgtctttaatttccccatcactccaggtttgtcccttaaagtcccctgtgattcctgcaccgaagaacctctctattcaacagctcaccaaggcctacctccttccttggaatgtcacactcacacctttcccttctaccagaggccaaagacaaatatttttcatactgggctgcttcgagaattattgaaaggaagtcattacattgtatgtcagtgtttaaactttgtgtgtgtgtgtgtgtgagagagagagagagagagagaaacagatatttctaactgaaaaagttgaattgttaaagaaatgactcagaaaactaaaggtctggcctcatagagattaccagttgtgagaggccaaagctgatgactagg

SEQ ID NO: 914244 - DNA, 4001 bp, Homo sapiens
tcgtgggtcagaatccatagaacatcatatggttcttgaattcctccctcagaaatcaaggtcccctatattctaaatggaccatttcctgatccaggcagtacactggggcctctctaagctacatcagaagccctcttggaggtcagagtaccataactccaacctcataagagcaggctggatgctgccttattggtcaaggtagggtaccccaccctgcagttctctcttgggtcccagtgggaggggagcttcactcacactggggttcttgtcctcatcatactcatccatgtggtaggtcctgtagccctcctcagctgaatcccagaaccatttaatcattcttcctctagaggacaggtaggaggtatcagaggagatcatggcaggatcacccactccacggagctctggcagcttctggtccagttttctggagcattctccttccagatcttccccatggctactgcccaggtcctgcatgcaggtggggcccagacaggtggtgggagccctgaagtccttttgaggaagggtgaacatctgcaaaaagacaaaacgcacaggcctgctcaagggatttccatagcaccaagcatcagaaaggagttggagtcatgggagtcccctttctcttatctgccccttcctttaggtttatgcactcatcacttcctgtgtcccttagctgtaaccatatgtgcaacgacttcaacaagaaaaatctgttaaggacctagtacgtgccagggactgcacttgccacattgacgtgactttaatgtattgctgctttagcgtgttctacttctgcaaaagtttttcactctccagcctaaggggtcatcaacattctttttccacccttgctcacctcaattaccaaatgccaggttaaaatttcctgagttaaagcagagtattgcctgggagtcctgggggtcttgtggtgtaaagggtaggatgagattatgtggtgttctgaggcagatggcgggtaggaactgagggaagggaggaatgggaacctccacaagtgcaggcaacccaggcagagctccagggcctgcctcttcagtcctgaagaaacgaggtgtggacaccaaggagagggtggtctactcctgcccgcgggtgtgaactccttcacttctctaagccagtttagtttcctcatctgcacagtggatataacagtaaccacctcggggtggccgtgaagacataaatatatatgttagtgacaataaagtacttagaacaaatcctggctgatgaccaaagttcaataaaatatgagtcattatagcgtaactccttgccaattttcccagtcctgatgcacaacacaagctctggtaacactgggcgcaccataaactcagcgggtacccgcagttaaattttcctccgcaaagtcttctcaggggtactctttaaattggctgggctctcccaagagcgctcacctccagctctcccgacagcccaggtccgaggaagggcagcacagtgggcggaagccggggtgggagtaaagcctggggtaggggggcggcggggttcgagcctccaggcgtccagcaggacggcggcgaatccacagccagatacccgcactcgatgaggccttggaatcccgcaagtggggcggctaccgcgcacgaagaaccgaaacggccttctacagggcggaggacgtctcgcgagagacggctccaggtttccaggcagaggaagtgtgatcggcgccaagggattcgagatggaagggcagaggcttttgcaaagtgcacagagggaggcctgaacggcttcctcctctgcaaagtagtggatcccacctacttggcggagctggaggaggcggtgctggcactcggtgggcgcccatcacgtgtaggttttctccgcccggaaacgccctgcggcgacttacgcgtgggtgaggacagcgcccccctgcgctcagcgcgcccggactaggagactgagggcggtccgcaccgggttgggcttccaggcctgttcagggcgcagttcgtccccttgccactcaggcgggggcggtctcggcggggactacgctttaagggtggcacacgaggtagcaccgcgggaccaggaaaagggaaaggggcgtaatgccgtttcccacctccactctgggtggcctgcgcgtgctgggccgccgccgggccgggtctgccacctccttctgcctcctggccttggttctccagttttcaaaggaggttagagccacagaaatttcttgccaaagtatgcttggctgcggcccacacaaagggctttttagattcgggtgtgagcatccttatggcctttcatcgcagtttgtcatttctgcccctttcatttgtaggggattttctgtagccctcataggttcttagttgggggagactcctgttacaaaagacaaattaacaagagaaaaacagacagaaatttactgacatgtgtatttcatttatacatgagaaatctggagggaatgagtcgttctggaagaggtgactttgaattccagtttttatagcatcttcaacaaagaacagtaatttttttaagttacaagacaaagaaatagggctttgagtctctccaggaggcaacttgtgagaaggcaaaaaaaaaaaaaaaaaaaaaagacaaaggccagttagtcaagcttgttaatgtaaattcctctggtaccatctccaggccataggggtctaaagttgtctttgttctcctaggtagacagagggacaggataccttttgtctttgtaaacctgtgtcctacttttaggcaaatagggccagggtagagagctttcctgaatgtgctgctgcttgtctttagcacaatccttcatgttttggggaggcatgtcctggtctcccacacgtgcctgcaatatttgttgaactctggctaggtgtggcggcccacgcctgtaatgccaacactttgagaggacaaggtgggagcatcccttgaacccaggagtttgaaaccagcctgggcaacatagagagaccgtgtctctaccaaaaaaaggtttttatgtttttttgtttttttgagacggagtctcgctctgtcatccaggctggagtgcagtggcacaatctctgctcactgcaacctccgcctcccgggttcaagcaattcttttgtctcagcctccccagtagctgggactacaggcacgcaccaccacgcctggctaatttttgtatttttagtagagatggagtttcaccatattgtcccgactggtcttgaactcctgacctcgtgatctgcccgcctcggcctcccaagtgctgggatggcaggcgtgagccactgcactcagccaaaatgtttttgtaaattagccagacttgatgacatgtgcctgtggtttcagctacttgggaggctgaggtgggaggatcacttgagcccagaaggtagaggctgcagtgaatttgatcgtgccactgcactcccacctgggtgtttgcgagactctatctaaaaaaaaaaaaaaaaaaaaaaaaaaattacatacacacacacacacacacacacacacacacacacacatataatttcaaaagtatttttcaaactctgccctaagctctacatattctggcaatgggtacagtgggcacccaggtcccaggtagagctgcagtctctgaggtgccttgaatgggaaagtcttctttccccatgaaaggaaataagcagaatctctcaatacaggtatggctgggaagacatggctgtcttctggccattccacttcttgtcttcacttttgccttgcactagctaacactgtgaccttgagcaactctcatgacttttttggcccttactgttttcttctgtaagataaggaagcgattattttcctctatttaaatcttaattctatgtaattcacatctcagtgaatgcctgttatgtgccaggtctctgta

SEQ ID NO: 914245 - DNA, 4001 bp, Homo sapiens
tcagcaacacacaacctataagtaaaacagttgcaacctgaaccttagttctgccctagctctaaagttggatagtcgacaggtcgtgggtcagaatccatagaacatcatatggttcttgaattcctccctcagaaatcaaggtcccctatattctaaatggaccatttcctgatccaggcagtacactggggcctctctaagctacatcagaagccctcttggaggtcagagtaccataactccaacctcataagagcaggctggatgctgccttattggtcaaggtagggtaccccaccctgcagttctctcttgggtcccagtgggaggggagcttcactcacactggggttcttgtcctcatcatactcatccatgtggtaggtcctgtagccctcctcagctgaatcccagaaccatttaatcattcttcctctagaggacaggtaggaggtatcagaggagatcatggcaggatcacccactccacggagctctggcagcttctggtccagttttctggagcattctccttccagatcttccccatggctactgcccaggtcctgcatgcaggtggggcccagacaggtggtgggagccctgaagtccttttgaggaagggtgaacatctgcaaaaagacaaaacgcacaggcctgctcaagggatttccatagcaccaagcatcagaaaggagttggagtcatgggagtcccctttctcttatctgccccttcctttaggtttatgcactcatcacttcctgtgtcccttagctgtaaccatatgtgcaacgacttcaacaagaaaaatctgttaaggacctagtacgtgccagggactgcacttgccacattgacgtgactttaatgtattgctgctttagcgtgttctacttctgcaaaagtttttcactctccagcctaaggggtcatcaacattctttttccacccttgctcacctcaattaccaaatgccaggttaaaatttcctgagttaaagcagagtattgcctgggagtcctgggggtcttgtggtgtaaagggtaggatgagattatgtggtgttctgaggcagatggcgggtaggaactgagggaagggaggaatgggaacctccacaagtgcaggcaacccaggcagagctccagggcctgcctcttcagtcctgaagaaacgaggtgtggacaccaaggagagggtggtctactcctgcccgcgggtgtgaactccttcacttctctaagccagtttagtttcctcatctgcacagtggatataacagtaaccacctcggggtggccgtgaagacataaatatatatgttagtgacaataaagtacttagaacaaatcctggctgatgaccaaagttcaataaaatatgagtcattatagcgtaactccttgccaattttcccagtcctgatgcacaacacaagctctggtaacactgggcgcaccataaactcagcgggtacccgcagttaaattttcctccgcaaagtcttctcaggggtactctttaaattggctgggctctcccaagagcgctcacctccagctctcccgacagcccaggtccgaggaagggcagcacagtgggcggaagccggggtgggagtaaagcctggggtaggggggcggcggggttcgagcctccaggcgtccagcaggacggcggcgaatccacagccagatacccgcactcgatgaggccttggaatcccgcaagtggggcggctaccgcgcacgaagaaccgaaacggccttctacagggcggaggacgtctcgcgagagacggctccaggtttccaggcagaggaagtgtgatcggcgccaagggattcgagatggaagggcagaggcttttgcaaagtgcacagagggaggcctgaacggcttcctcctctgcaaagtagtggatcccacctacttggcggagctggaggaggcggtgctggcactcggtgggcgcccatcacgtgtaggttttctccgcccggaaacgccctgcggcgacttacgcgtgggtgaggacagcgcccccctgcgctcagcgcgcccggactaggagactgagggcggtccgcaccgggttgggcttccaggcctgttcagggcgcagttcgtccccttgccactcaggcgggggcggtctcggcggggactacgctttaagggtggcacacgaggtagcaccgcgggaccaggaaaagggaaaggggcgtaatgccgtttcccacctccactctgggtggcctgcgcgtgctgggccgccgccgggccgggtctgccacctccttctgcctcctggccttggttctccagttttcaaaggaggttagagccacagaaatttcttgccaaagtatgcttggctgcggcccacacaaagggctttttagattcgggtgtgagcatccttatggcctttcatcgcagtttgtcatttctgcccctttcatttgtaggggattttctgtagccctcataggttcttagttgggggagactcctgttacaaaagacaaattaacaagagaaaaacagacagaaatttactgacatgtgtatttcatttatacatgagaaatctggagggaatgagtcgttctggaagaggtgactttgaattccagtttttatagcatcttcaacaaagaacagtaatttttttaagttacaagacaaagaaatagggctttgagtctctccaggaggcaacttgtgagaaggcaaaaaaaaaaaaaaaaaaaaaagacaaaggccagttagtcaagcttgttaatgtaaattcctctggtaccatctccaggccataggggtctaaagttgtctttgttctcctaggtagacagagggacaggataccttttgtctttgtaaacctgtgtcctacttttaggcaaatagggccagggtagagagctttcctgaatgtgctgctgcttgtctttagcacaatccttcatgttttggggaggcatgtcctggtctcccacacgtgcctgcaatatttgttgaactctggctaggtgtggcggcccacgcctgtaatgccaacactttgagaggacaaggtgggagcatcccttgaacccaggagtttgaaaccagcctgggcaacatagagagaccgtgtctctaccaaaaaaaggtttttatgtttttttgtttttttgagacggagtctcgctctgtcatccaggctggagtgcagtggcacaatctctgctcactgcaacctccgcctcccgggttcaagcaattcttttgtctcagcctccccagtagctgggactacaggcacgcaccaccacgcctggctaatttttgtatttttagtagagatggagtttcaccatattgtcccgactggtcttgaactcctgacctcgtgatctgcccgcctcggcctcccaagtgctgggatggcaggcgtgagccactgcactcagccaaaatgtttttgtaaattagccagacttgatgacatgtgcctgtggtttcagctacttgggaggctgaggtgggaggatcacttgagcccagaaggtagaggctgcagtgaatttgatcgtgccactgcactcccacctgggtgtttgcgagactctatctaaaaaaaaaaaaaaaaaaaaaaaaaaattacatacacacacacacacacacacacacacacacacacacatataatttcaaaagtatttttcaaactctgccctaagctctacatattctggcaatgggtacagtgggcacccaggtcccaggtagagctgcagtctctgaggtgccttgaatgggaaagtcttctttccccatgaaaggaaataagcagaatctctcaatacaggtatggctgggaagacatggctgtcttctggccattccacttcttgtcttcacttttgccttgcactagctaacactgtgaccttgagcaactctcatgacttttttggcccttactgttttcttctgtaagataagg

SEQ ID NO: 914246 - DNA, 4001 bp, Homo sapiens
gagatctcactgcctatgaggcaattcaatccaaatttgacaactttacacgttaggaaagctttccatgaacccaaaatagtacagcttgcaaatttccccattagagccacataaataagttatgtcctatcgaccagtcattgagttcttattatgtaccagatactagaccaagtgcttcttgtgagttgtcttaattcctgaaaagaaggttctatataatccagtttaaagagtgaagtttagaaaagttgaatagcctactagccatgtgaccttgggtgaaaagtagaactctacctacctgacgcctgagcctggacccttaatccccaaggccccatctggcacctacctctgctacttctccttacacattagggccttctaagttattagaggagaacagagataggaacagaaggggaaggtatagctaatgtcaccctccaccctctggctggagagctgctaaggaccccctttcctggaagcctttcatcagttccccatcgcccttagggtaacattccttttttttttttttttttttttttttgagacagggtcccactctgtcacccaggctggagtgcagtggcgcgatctcagctcactgcaacctccagctgccggggtcaagtgatcctcccaccttagcttcccagatagttgggactataggtgtgtgccaccacgcctggctagtttttgtattttttgtagagatgaggtttcaccatgttgccctggctggtctcgaattcctggacttgagcgatccaccaaccttggcctcccaaagtgctgggattacaggcatgagccaccacgcccagcctcttagggtaacatcttaacacctcccatccacctctgttcacacctcctgccacagcaccagtggtccctactctggccattggacctcctttcccaatcactcctagcccttcgcatcttgaaggtttcacgtgtgctgttcctcctgcctggagggtcatggccatggccatcaccacatggctggctgattcagcctttaagacctcttcccagaccacctgaagtgggcatccctttcacgttcttgggaagattattaatgcctgtgccccagtggctgactccattcatcactacgctaagttctttaacggcaggctcatttgtccctgtgaccacaggggccaactcctaataattaagagctgggattagggagagggagggatgtgggggtggatggagttctctaactttctggggcatgtcactttatttctgtaattattcccttatctgcaagatgacaagagtgcccgtttcataaggctataaagaatgagagcatatatagcacttggcccaggactcagtaaatccaagtgactggagcccgtgaggatgctgcccaccccccaccccaaattctcaccaaggtgttcttgtccttatgatatttatctttttggtaggcattgtagtcctggaagctcgactgataaaagacagagatgtcaatcccacggatggataggtcgcggttgacaaaggcagcttcacaatcactcagttggggaactggatcaggctgcccagagagttgggccctctgcccatatctgacatcacccctagagtcctcagaaggaagaggcacttggagctccaggccactcgcggccccagactgtaggaggttgatcatccggcatattaagcgactcagaagggcttcatgctcacagatggcctcagtgtgcctcctttcctccagcgacaggccctgtctgctcgtcagctgcacgaagtgctccgtcatggcctgctgcaagtgcagcgttatctccaacagctgggtatagatgctgtggtctctggggacccggcctctcctctgaccagagggcacaggaagggtgtctgaccgatgactcatactccgggtatctttactggcctctgaaggctgcctggcacctatggagaaagagaccattgacaatggagcaaaggaggatctcctggaccctcaggtccaggaatggatggagacagaacagatctcagatctgttcttctcacttccatgccttggttatatgaccagattggttcatgaagagttacctactctttagggcaatgagtacatggcctcaagcctagacactgagtgctctatttaaatggcattaggatgtgttctgaggaagagcagggggatatgaacaaggaggctctggattttccaccccgttcttcaacctgagcacttcctgctttgtttggttaaataggaaaaaagggtttctactgctcaaaaacaatcaccatcactacccactgagtaaaacattctgctagaataaactaatgcctgagggccaaatctggcctgccacttatttttgtagatagttttattggaacacagccccattcatttatttatgtcttgattatggctgcttttgtgttacaatggcagagtttaatagtcatgacagagaccacgtgacagagaccatgtggtccacgaagcctaaaatattaactgtctggccctttacataaaaggtttgccaagccctgttgaagaacatcagcccttctttttgccttttcttctccaggttggccataccagatactcaaagcctttagattcctcagttcctctatcctcacttggcttcctgcaaatgccttccacctactcactgtgacagctgccttaggcttccatcacttgtaactatgggctaggtacatggctctcaaactttgaagtccatcagaatcacctggagggcgtggtaggaaacagatggtgagacctcacccctgaattttgagtcagtatgtctggggtgagacctgagaatcctcatttctagcaagttcctgggactatacttagcaattttgttttgttttgtttttgtttttttttggagggactgggtcttgctctatcactcagactgaattgcagtggcatgattatggcttactgcaacaaacttccaacgattaggattaaccttccttttgaaaacaagttaaatactgaacgagaccaaaaaataccttttaaagcctcaaagaatcaataaatcagatagcaagatcccagaaggtaggaaagcttgaggccaacagctgccactacttctttaagacaatccttatatcccaagatatcaagacccttttttctaaaaatctagacctatgcccattccaccaaatgctacaattccaagtttttccccctaagtaacatccccctacacacacacaaacacaaaaaaaaacctcgttgcttcttttataaatttagggcaccagtacttcagagtaccaaacactctgtccaacttcttcaaaccatgttcagtttgcctgtgatgttcccattgcaacctatacctcaccttagtgacatttaatattgttacttgttcagtgtctgcccaggtcagccttcagtattacattcttagcacagtaccttggcacatgggcaactaacatagttaatgagtaggagaggcataaccacaaggatgttgccaagtcagggaagagatgagccataaatgaagactttggccatggaagatggagcaatagacagagaaagccacagaacaaagctgtatcaagtcttgacttacgatcccaacctttaatcataatgcaaaaactttattcagtgttaggaacatactgatgagaaagaaattgaacaaatataagtgtttatgcctagagaaaccgtctcttccacaagcaagaactttgccctggcccaaattccctgtcctagaagagattcattttaatggggctctcaactctgtaggtaagtcacactatctttccaaatacttgattatcatagagcattgcaagggccaggtgagattcctttggttttgccttccaaaaggtggtgcctatcatccctgttggtcctgcggagtgct

SEQ ID NO: 914247 - DNA, 4001 bp, Homo sapiens
agccccttttctctattaaataattttttccttcgaaaatattgagttcattgaacaatgtctgatttaacactttcagtgacagaaagtcctctgtcccccaagtcaacctttcccatatcattggtgagaaggtttttccttatattgaagcaaacttttccccattacagttagtttctgcccatatgccctaattccagattccaaataaattaaaaaaaaattattctatatgatagcccatccaatatttgaagactcttgaattcctcttttccatgttacacatttccagcgcagagtgcatggttttacatctctttcctcgtggtcatggttctctggaccaggcatgggcttgccaaagtgatctaacaacaaactggtaaagcgcttcctttgccaacatgtgggttcccaagtaattgtattacaaatgatccctttgccaatatttctccatgattatgtaaaaattattaatttaatagttgaagaaaagtgactcttagcctaaatcatggtcataagagaatagtactaaagtcctgaaaactgcaaaaagtgttctttttttttttttttgaaacttagccaattaccagaacagaataaagtgggaccatttgtcatgatatgcttgcctctttcctacaaagccatgcacagatgcctgagaacaggactcaacaatgagaaggttagctaagaagagtttcacttcacgtcctgagaagtagatccaactaaaagaaggcagtaatcattagccaaaggatagtctttgcactttgccagaagcaggtacctaaaagaaggatcaaatattgtgctctcaaaacctgattaaatgatagaaaaagaagtggcagatttctcctagcctggcaggaaaaatcgtctaggaaaacagacagacacccacataggcacacagaacaagcccaacctgaccagcagtgcctgacagagcagccgctaaagaagaatgcttaaatcctcagaaggtgcagtcggtggaagtagtgtcctcagatgacccctaactcctagatagttggataggacagaatggagcagggacttggtcctctgtgctcttgggagcctggcaggggcagaaggtacaggctaggtgcaagatgccttcgactcctggtgcaagatgacagttgaataatcatactcagagagcagatgacctctggtacttgaagacatcctgggggataggggtgggatggttcagatctcagactagtgaaactgttccctggaggtgagcaaggaggtctaatattccagtgaaaagggaagggaaagacggtagaattctcacggattgggggaaagacgaagctaggaactgtacccttctggtggtggcaacagcagagcaggtgtcctgggccctcattccaaggggcagggtcctccactctcccagcctggccccactccgctctcgggcaggaattcccattcccaacccggctcttcaggctttcccccttaggtccagcaggggctccccacttcccactgctcttctgcccccccaatcctcaggcccccttcctccctcccagaccccggtactcctccctctacacactggactcccggcccgctcctctcagcctcccgctggcccagggcgccgcattccagctcccggggccaggcctggcacctcccttcgcggccaggttcgctctttgccttcctcacacggcgtctcctcagcccggtgccctctcgcccccactcccctcctcaggccacactcacagaactcggcgatgtaccaggtcacggagtagttctcctcgcaccagtccagcgtggaggtcgtggggccccagtagccctctcggtccgcggccggagccatcacgccgccgccgccgccgcccaggcgctccgctcactgtgccgggttaggctggcgaccaggccggctccggcccagcccgcgcgctcgctcgcgccccgcccggccctgcctccccgaggggcggggcctggcgccgttactgacactgccctgacggaggccccgcccaccggcgccgctgggccgcggggccgggccaggcccgacctggtgtaaggcccactcggagggcgccggctggccccgcccctcttcacccttgggcggggcaggggcgtgatccaggaaggagccgggggcctgggcttcctggccggtgcagacacgccaatggccgtaggttgggggttcctgacatcccagaggctatattctgtcaggatgtgccagagcctctatttgtgtgcgtgtggtttgatttaatcggggcgggggtgggatgaatacttctatcaagcccttgcttgattaaacctgtgcggcgaagcgcctctatgtcttccattgagccacaggcctcaaatggagccccaaaacagagtacccccaaccaatccccgtgattctcaggaaataaaccgtgattttctgataaaggtgtaagtgtctcttcggtacaaagggaaagggtgaacaacccaggaccgaaaaaaaaaaagtaggttctgagatcctaaaaaaaaagaatgctgctagctagagcactaaagcaaagtttccctgcttcgtttgggcctccaagcacagaggtttccacgttctaactataattgtgccctgctcttcaggcaaccaacagcctacccctacttccaacttcaagtctaatactcccagcccccgtctgggagtatcgtagacggcaaaaccccgtgtctacgaaaaatacaaaaattagctgggcgcggtggctcagacgtgtggtcccagctacttgagaagctgaggtgggaggatcacttgagcccccgcggtggagattgcatgcagtgagctgagactgtgccaatccagcctgggagaacagagcgagaccctgtctctaaataaataaataaataaataaataaataaataaataaaaagtctagtactccacaggtctgccagagagctcttcctaaaacagatgcaaccacccttgcccctagtgttcagctacaccaaactcaaactttcccctctcctagaatgcgctgggtcacctgcctttgctcccacagttcaactgggacagcctaactctcttctccgtttgaccaactccccactcttcttttaaaatccagctctctgaagccatcccagatgtttacaccctagagcttccttgccctttgttcacatcctactgtgctacatcctgatcagagaccttgctttcccttctttatggtcttagtattaggactctgcctgaatacacagtaagaaatgaagagtaaaaatgaaggatgatacaactgctattttctaaataaataagtcagatgtggtgcaagtcaaaggtaaaagagaggacaaggagagatgaagagcccacagcctttctacaaaataaccatagccaattagcaggaaatagatgcagaacttttatttgctaggtgcaaaacctagggaagcagtgtatctttttttttttttttttttttttttgagacagtcttgctctgtcggccaggctggaatgcactggcatgatctcagctcaccgcaacttccgccccctgggtttaagcgattctcctgtctcagcctccagagtagctgggactacaggtgtgcaccaccacgcccagctaatttttgtatttttagtagagacagggtttcaccttgttggccaggctggcctcgatctcttgacctcgtgattcacccgcctcggcctcccaaagtgctgggattacaggcgtgagccatcgcacccggccggaagcagtgtattttaatacgaatagtagcctctctgaaatttttcttttttgagacagaatctcgatctgtcgcccaggctggagtgcagtggtgccatcttggctcgctgcaacttctgccttccgggaatcgtgcctcagtaccccctcatccccatagc

SEQ ID NO: 914248 - DNA, 4001 bp, Homo sapiens
actttaggaggccgaggcaggcggatcagctgaggtcaggagttcaagaccagcctggccaacatgatgaaatcctgtctctactaaaaatacaaaaattagccaggcatggtggcacacacctgtaatcccagctacttgggaggctgagacaggagaatcgcttgaacctaggaggtggaggttgcagtgagccaagaccatgtcactgcactccagcctgagcaacacagcaagactctgtctcaaaaaaaaaaattttttttgaagagcttattcagagatagtggctcatgaaaagggaggaggaaactggggaaggacaagctcaggacagagctgggccttaagagaacaataacaatgtctatggattcttgatacggctgaggctgacagtggtaatcagaggaacagcttcccccattcctggggtggggcgaagactcaaggagcaggcacactcaccagtcctccctgatgtgccctaggaatatagcacgacctggcgcagcagacagggctcaaaaacctcatcttgatcaagaaaagacaagccctctctacgcatgtcttccccgctgtctttcatcttggccctgtctggtttatcattagatacccccacaacattctaagctccatgaagacagagatcatatctgtatggtgcacaactgaatgcaaagtgctagcacagtccttggcctttaataggtactcaatgtcttggatggaaagcctgtgatttcacagtcagaaaccactttgccaggcccgcccttaagtccgaatttggatgcttaatcaaatttgcctcatcccagccaagcaggggcaactcagctcctagggctttgttccagacagctctcagatgtcttttcctgtagttgtgaccaaaaatacaagaaggaggccaaagtgcccagcctcagccttaggctccctgagggcaaaagatgagggcagcataccttgttccccttgcctctggagctcccaaccttacctcttgccggtgataagaggtgtttaggaagccgtgatagcgctgccgcagggcctggcccagttcccagtgctgtagcatcccctcctgtgggcaaacccaagggttaagagggtctagagggaaggggtggcttcaagccccatggggtttaggccctgttgctttccaggttcacgctttgctggagtcaattaatctgatcccagaagtctttcattaagtggccagtcatgcacagcaatatcatgggcacagagattaaggttatgaaatctggtcaaagtcagcacccatatgggaaaaggcagtttagtaggaccccaagttttgtagactgctctagacgtcgctcattctgcagctcatcctgaggaaaggctggcttctgacccaccttggttaactgaccaaacccctggggccattcttcttcctgataggggtccttgggatatgtcttcactggtgaacggtctccatggcggtacagctgagagaataaaatggtttgcctataggtcagaagcatccccttgatagggacccagagcctaccttttgccccatgttagggaaggaagtctcattccctctgggaagcctactggctgcaaaagaccccagctaggagtcagtcacttcttccagattccagagattctaacttagctaagcaatgctactggagaccataggcaaagccaaggtacaggtaggaagggaaaagagaagtgaaagcaacgtatgtggtggggacaactggggaaaaaagataaccaaaggcttctttagggatgagtcttaaccattcaaccacttccctgtctcaaggcagactcaccccgacgtattcggtcatcctgactcccataagccagggctccaggtcaatcctgaatccagcctcccaactacccaggccagtcgtcccctcctaaaccagctgttccttcccgagatcctcgacctccaccagctggcctttgcccttttagcttcagggaagtctttggtgagcccatctctcattaccaaggtaacgaagcgcagactccgggcccgggtgggcggcatcaccaccaggttcacgccgagaaggagctggaggagagccgcccggctccagccggaccgcttgcccgccatcaccgttgtaatctatgcagcaaacaagctggaacccgctgggtggcacctgcaagcagccgcccggacgcacccgtaaggacacacgccggaagtgcgttcgccgccatcttacttagggacctgctggggtgcggggaaaaggcgcagtctcggtgggattgcgtgcaggagggtcgtggtctggctgtggcggaggagcataagaaggtaacgcgacctggcgcggcagacagggctcgaagacctcatcttgattaagaaggccacaaattcgcgtttgcctctgctcggagaaatcccttaccaaggtggcacttgcagtgggcgggaccatgtctggagaaccagcgtcccctccaggcttgaccccatagctagatcgggtgcagaattgaggcgagggatgggaaagtagaggtcgcttctctccacgcccctgcctttgtggggagattgagccctggccctgttctccaggagatgttttgcttggggtgcaggacacagtatgtaaacaaccctttggactccgtgtgtccttgaggttgccccagtctggcctaccgttcctgccctgcacaaagcttcagtagccctctcactttcccttccagtcctttccctgtcctccctcccctccacttccaagttttagttaattagagtcaagacgtcatgtcatgcctcttcccaaaggagttgggttgcacaggatgttcagactttacaaacccaaagcactgaatccctgggggaggaatttcagaccagtggggaggtattttgaggtaagggacaggcgcatatcataaagtgggagtaggtggggtttccacagaatcaatggccctcttggcattgaccattaggattcaggtgcagccagtttggcctcaggactttgtgactcctgtgacggttgcaggtcagatcataggtcctggggatgctttgattcagatctgcctactggaagcaaatctcctcagatctttgggaaacaaaactgatcaggcttggcctgggcgccgtggctcacctgtaataccagcactttgagaggccgaagcaggcagatcacctgaggtcaggagttcgagaccagcctggccaacgtggcgaaaccccgtctctactaaaaatacaaaaaaaaaaaaattagccgggtgcagtggcgtgctcctgtaatcccagctactctggaggctgaggcaggagaatcgcttgaactcggaaagcggaggttgcagtgagctgagatcacgccactgcactccagcctgcgcgacagagtgagactgtctcaaaacaacaacaacaaaaacctgattaggcttggtgtggtggctcacgtttctaatcccagcactttgggaggccagggtgggaagattgcttgagcccaggagttggagaccagcctgagcagcttaggaagatctcctctctacaaaaaaaagtttaaaaattagctgggtgtggtggcacacacctgtggtcctagctcctcgggaggctgaggtgggaggatcaccttcagcccaggaggttgaggctgcagtgagccatgatggtgcaactgcactccagtctagatgacagagcaagactgtgtctcaaaaagaagaaaagaaaaaaaaagatcaggattatctgtctttattttgtcctaggactccagattcaattatttatatatacttcaggatttaaactttgcttccagagttgtcatggaggaggccaagaagcaaatagagtaagagccaaagcctgggtagccaaacagttcttaaccttcttatttaatcacaagcccctttatgaatcacatgaa

SEQ ID NO: 914249 - DNA, 4001 bp, Homo sapiens
cctgagcaacacagcaagactctgtctcaaaaaaaaaaattttttttgaagagcttattcagagatagtggctcatgaaaagggaggaggaaactggggaaggacaagctcaggacagagctgggccttaagagaacaataacaatgtctatggattcttgatacggctgaggctgacagtggtaatcagaggaacagcttcccccattcctggggtggggcgaagactcaaggagcaggcacactcaccagtcctccctgatgtgccctaggaatatagcacgacctggcgcagcagacagggctcaaaaacctcatcttgatcaagaaaagacaagccctctctacgcatgtcttccccgctgtctttcatcttggccctgtctggtttatcattagatacccccacaacattctaagctccatgaagacagagatcatatctgtatggtgcacaactgaatgcaaagtgctagcacagtccttggcctttaataggtactcaatgtcttggatggaaagcctgtgatttcacagtcagaaaccactttgccaggcccgcccttaagtccgaatttggatgcttaatcaaatttgcctcatcccagccaagcaggggcaactcagctcctagggctttgttccagacagctctcagatgtcttttcctgtagttgtgaccaaaaatacaagaaggaggccaaagtgcccagcctcagccttaggctccctgagggcaaaagatgagggcagcataccttgttccccttgcctctggagctcccaaccttacctcttgccggtgataagaggtgtttaggaagccgtgatagcgctgccgcagggcctggcccagttcccagtgctgtagcatcccctcctgtgggcaaacccaagggttaagagggtctagagggaaggggtggcttcaagccccatggggtttaggccctgttgctttccaggttcacgctttgctggagtcaattaatctgatcccagaagtctttcattaagtggccagtcatgcacagcaatatcatgggcacagagattaaggttatgaaatctggtcaaagtcagcacccatatgggaaaaggcagtttagtaggaccccaagttttgtagactgctctagacgtcgctcattctgcagctcatcctgaggaaaggctggcttctgacccaccttggttaactgaccaaacccctggggccattcttcttcctgataggggtccttgggatatgtcttcactggtgaacggtctccatggcggtacagctgagagaataaaatggtttgcctataggtcagaagcatccccttgatagggacccagagcctaccttttgccccatgttagggaaggaagtctcattccctctgggaagcctactggctgcaaaagaccccagctaggagtcagtcacttcttccagattccagagattctaacttagctaagcaatgctactggagaccataggcaaagccaaggtacaggtaggaagggaaaagagaagtgaaagcaacgtatgtggtggggacaactggggaaaaaagataaccaaaggcttctttagggatgagtcttaaccattcaaccacttccctgtctcaaggcagactcaccccgacgtattcggtcatcctgactcccataagccagggctccaggtcaatcctgaatccagcctcccaactacccaggccagtcgtcccctcctaaaccagctgttccttcccgagatcctcgacctccaccagctggcctttgcccttttagcttcagggaagtctttggtgagcccatctctcattaccaaggtaacgaagcgcagactccgggcccgggtgggcggcatcaccaccaggttcacgccgagaaggagctggaggagagccgcccggctccagccggaccgcttgcccgccatcaccgttgtaatctatgcagcaaacaagctggaacccgctgggtggcacctgcaagcagccgcccggacgcacccgtaaggacacacgccggaagtgcgttcgccgccatcttacttagggacctgctggggtgcggggaaaaggcgcagtctcggtgggattgcgtgcaggagggtcgtggtctggctgtggcggaggagcataagaaggtaacgcgacctggcgcggcagacagggctcgaagacctcatcttgattaagaaggccacaaattcgcgtttgcctctgctcggagaaatcccttaccaaggtggcacttgcagtgggcgggaccatgtctggagaaccagcgtcccctccaggcttgaccccatagctagatcgggtgcagaattgaggcgagggatgggaaagtagaggtcgcttctctccacgcccctgcctttgtggggagattgagccctggccctgttctccaggagatgttttgcttggggtgcaggacacagtatgtaaacaaccctttggactccgtgtgtccttgaggttgccccagtctggcctaccgttcctgccctgcacaaagcttcagtagccctctcactttcccttccagtcctttccctgtcctccctcccctccacttccaagttttagttaattagagtcaagacgtcatgtcatgcctcttcccaaaggagttgggttgcacaggatgttcagactttacaaacccaaagcactgaatccctgggggaggaatttcagaccagtggggaggtattttgaggtaagggacaggcgcatatcataaagtgggagtaggtggggtttccacagaatcaatggccctcttggcattgaccattaggattcaggtgcagccagtttggcctcaggactttgtgactcctgtgacggttgcaggtcagatcataggtcctggggatgctttgattcagatctgcctactggaagcaaatctcctcagatctttgggaaacaaaactgatcaggcttggcctgggcgccgtggctcacctgtaataccagcactttgagaggccgaagcaggcagatcacctgaggtcaggagttcgagaccagcctggccaacgtggcgaaaccccgtctctactaaaaatacaaaaaaaaaaaaattagccgggtgcagtggcgtgctcctgtaatcccagctactctggaggctgaggcaggagaatcgcttgaactcggaaagcggaggttgcagtgagctgagatcacgccactgcactccagcctgcgcgacagagtgagactgtctcaaaacaacaacaacaaaaacctgattaggcttggtgtggtggctcacgtttctaatcccagcactttgggaggccagggtgggaagattgcttgagcccaggagttggagaccagcctgagcagcttaggaagatctcctctctacaaaaaaaagtttaaaaattagctgggtgtggtggcacacacctgtggtcctagctcctcgggaggctgaggtgggaggatcaccttcagcccaggaggttgaggctgcagtgagccatgatggtgcaactgcactccagtctagatgacagagcaagactgtgtctcaaaaagaagaaaagaaaaaaaaagatcaggattatctgtctttattttgtcctaggactccagattcaattatttatatatacttcaggatttaaactttgcttccagagttgtcatggaggaggccaagaagcaaatagagtaagagccaaagcctgggtagccaaacagttcttaaccttcttatttaatcacaagcccctttatgaatcacatgaaaattttgcacctctcctccagaaaaatgttcacacatataaacacacacatggaattttgcatataatcccaaatggttcacaaagaccatttattacaggtttcataaatcagcatctctgaatacctgatttaacctagtcctcttactttacagcttaggaaacaaacctaaagagaggaagtgacttgcccaaattcacagtttgggcatgggca

SEQ ID NO: 914250 - DNA, 4001 bp, Homo sapiens
cccaatccatgtgggttggggattcagagagcaaagttgctataagctattaaggtaaaaaaaaaaaagtctaggcatattatatatatatatatatatagacacacacacatatatgaattgtatccttgtgacataccatttacattcacttcatggagttgtcctgagtacttaataagataaattgtgaagtgcaccattgcctagtactcaattttatttttcttttcttcccaccttacactgggaattacaaaactcttacatggttatttttttctggccagtctcttctacctttaatccgtctctttctttttttttttttgtttcaaagatagagtctcgctctgttgcccaggctggagtacagtggcacaatcttggctcactgcaacctccgcctcccgggttcaagtgatcctcctgcctctgcctcccgagtagctgggattacaggtgcatgccaccatacctggctaatttttgtatttttagtagagacagggtctcgccatgttggccaggctggtcttgaactcctgacctcaagtgatccgcccgcctcagcctcccaaaatgctgggattacaggcatgagccactgtgtctggccaatccatctcatcattgactgtcagacaaatattccttaagtatattttaagtgaacagaagcacaaaacagataatttgattattactctttgattaaactgagccacctagaggaagacaagtagactacaacaaccaagttatttaattctagccaaaagctgagaggaattattggatctttgaggctgaggtagtctaaaaccccagagtactcaaaactctaagaatcttgcgatagatatattttcttggcacagtgcagtacttacaatcagtgactttctaaatgactagggtgagaatatgttgataaaggaaaggtaagatttagtaaagcttttaggaggtttttattttttaaacttattacataaatactatctacttgactggtttttcaataattaacacaagttttgataaagagatgtttctgatatagaaaggagacataaaaagcatgctaatttcttgatcttatagtttatgactcgtgtcaccatgtgactggcacatactatcacctggtggctgtgtatctacatttttgagtcaacttttgaaggtctaacaaagcaaaaagcaaaacctctgacagtcgacattatagaaaatacattgttttttcactgaaagctcagagctcatggcctctttctgctgtaggaggcaggagggaacacagcacaccatgaatgggggatcccaaaagaagagatgatacagaaaacctgattgatataacacagccatgaagaagaggcttatgaagtctctggcctatagctctgtcgtgttctgaggttgttttctgaacacattacatcttcccatctcccatctttccttggcacattaaccacacaaggatccctcacatttaattggtgggacaaaccttcattgggcttctacagaacccctaagcctactttttcatctcatgcagcatcaggtataaatgttgagtggctaaaataagtagaaaccagactgtgccaagccagtgggaccctctgactgtaaagctatgactagagaaatcaactggttcaggagctctccgagttggacttgtttagctgctcttgattctgactcagattggtttgggtgactgagagactggtcttccttcttcaaggcctgaaatgtcttaagggagaccccttttgtatttacctgaagcctagatcaaacactcacctctggcagatccaagcagataaagactcattagcaagagaaacctgttcatctggatttaggaaaagaggggaccccagtgtgggccacagcttcttcacagagctatgaagcaaactgcgagcaaaagcttccagtgctgaagcagagcttctgggaattctagaacctcagaagtaacccatgtttcttcacaatgggttgggctctgaggttcttgtgtagcctgttcaggcaagttggcccttagcaacccactgcttatttcactagtgaagaccaatgattattttctgtgtgcagggtagtgtgttggggctatctgccctatctttaaaaaaaaaaaaaaagtattaccaaaaagcacatattttttgtaataaagtttaaaagatatctactgtcttttaaaagtgtttttgacaatgagatgtaattgttgattgttttctgtttggctttctaaatcagcctttcttggctctgatctgtaccctggaaggttgacctctgttgactttatcacctgaatgctggctggatttggcttcagattgggtttatacaggattggaggggagaagagagaaagagagagaggaagagggaagggaggaatggggagaaagagagcgagactggaatatttgttcttcctattcccttcctgccacagttgacactggctgagtctacatgacagagcttctgttgggtgtcctctcttccatggctccagctctcatccatgctatggtaatatgtttttctccccctgccctcttaggcctagggatgataatggtttcctgctgttactaaaatctggatgcccaaacttatctctttttttgtttgtttgtttccttaaccttgcccacttctgtaaatagtcttttcatacagacctttatcaacatggttttagcaggaaacaggtggcaaactcaaatgggtaactgaggagagtttacacagatatgggcagagtaaagagatcaagagacagtagaaagctgcgttttgagctgcaacttggtagcaagggggtggccaagctgagaagatggatgcagtgaggcatccacctgatataaaactagaacttatggaggattgagtggcaaagatctggtagcttccatttctcgctgcttctctgctcagctctcttgaacaactttgttttatataccactgaatgctaaatctagaatagatgtacttattgttacattttgaaaggaaggtgagggttaaagaaagagagagtggcggctctacatcaaatccaggctttctgtctagcataagacctacagaggtgggggactagcttaatgccagtgcccactgcttcgtacaggttggggtacttgtaggtatgagcaggacgggtctgggcagtatggcttgctgcctgggaagatgttcccataatgaggcattttggcccttgttcccgcagaatgtgatgctgatgttccttggactttttcccagcagagtgtgataaagtcagggaggcagttggacaggctgtttctaagggcccaaacccccgtggaatgcttcactttagccaaggtctgcaaaatggcgggggtcggtgggggttacgaaatggtgcagtttggactaacactttatcactgttataattatttgtttcatgtttgtactccccgttggactctaagcttgaatgcagagaccctgtcttgactattgttgtagtcccagtacctagcagcatgcctaagcttttcctgaaggaaggaaggaatgagttaccttttggggcctctctctgcctcatagaggagaatttatagagaatcatgtaagagaatctatagaagagaatctggattaaggttctgggttagttgaagacagcaagatcaccagggatcaaaagttacttgacttgagttagaggataaagctaggatttctgagcctcaggcaggttcctttacagtagagaaaggtatgaaagagcatgctatcaataattcttttcctccaggatgagtttggaagaacagctatgagccttgggtctgacttttgttgatagaagcagtggaaattagtagaagggaagaggtgctatctattccaccctaacttagaacatagaaagacagacagtgggctctggagag

SEQ ID NO: 914251 - DNA, 4001 bp, Homo sapiens
aatgttggaatgtaagctcccatggcaggggctttattttgtctgctgccgaattccagcacctgaaacagcgctggcacatggtaagacatcaggtgggaggaggcagcgtgctgctccaagactgtgtgaaggaagcccttggatggaggagtcactggggagaaagggagcatagagcaacagggaggggtcagggctaaagctgagcacaaggatgtttattaccaccttgcaataaacaacgctggacaagaaagaaatgagccaaatgtccaactacaagggatgctgattgattttcagatcctctatgctgtgccagccattgaatgagtagatgatgagatggtgactgcaagttgggatgaacagatgttcctgataatttgttaggtgacaaaggcaagttacagactggcacgtgtcatatggggggcacgcagacctggatctcggagaggcccgggtgggtgggggtagggataggagatgttgcagaacaggtggcagctggagccaaggacagggatgacaccaccgggaaattgccaaacctgggactgcagccgtgcttggagacaggtgcagggggagcctaaggggaggcctgtcacccggggcaccccagccgagtcagcggagcctctcggcccttggggtcatctcctgtcatctaacccagcagaagtactctgattctaaattctgggactctcaggtcatttaaattccactgagtaccccagtaccctgccctctcctggagtcatacagtgttggcacacgctgagcagggtccaatggcctcatagtgccctcctggttacccctggcctgccactctccaaagtattctccctctggcctggatcattttccctttgggaacccaggtgtcctgccccctctacttgggaaagtctgggagtgaaaatagctcagggagggaggggccctgagtgcccaacgggctgggcctgggtagcagctgcccctgtgcccctctttggcgcccccgaggtgctgcctcagcactaagtgtccatctggctggagagtcaggttacagcgtaaggggacccaggtctcccctcctccccgacctatggccttttcagcagactcagggccccatgcctggggtatcttgggaaagaatgggggtagggaaaagggtaaagatcctcaggttgcgggggtcctgatgtctgacagtctgtgatgtggggcctgtctgtgctctttctgggcttcagtttcttcaattgttaaatgagatacagcgactatggaccccaccctggagacgaggtggggtggggtctgagaggacccttctcactacccccacactcccaagtccactagttgcctgactgcaagccttcagggtggggtctgggaatatttaactagaagaagattcttctttctgaaccccccctaacttggatctcctggggtttgcccagcctgttttcagcagcagaagtggggcagtgggcccaggggaatgaaccctggtgggggtggggagcccagaaactctcttgtcattttaaacccctcttgagggctcccagccctctcctccagccctggggacagcaggcagctgatgggcagagcctgggctggggattagcactctaggttaaagacaagctctgcccctgcactgctgagatgcccaggacaaacagcccggcctctcaggcctcggttttgctgtcaggaaatgggcgagcactcactttccgctgctgcttctcccaggccgggtccagcagcaggtcgcggtcccagtcctcctcctgttccatgtactcgccgcccccgccgccgcccgcaaagcgcccctccccggcccccagaccctcgggctgcataaccatcatcatctcgatcgggctcctggcttcgctccgctcggcacgctctcggacacccgggccccattaagtagggcccagcccagccccagatcgaattcgcactaaatatgggggaggagggaggggccggatgggggtgaaggagctcgggttggacctggcaaggggttgtcctgaagccgggaactgcgggactcgggggcgccggggtggatctcgcggcggagatcctgggtttgcattcctgctccgctgctggggcgctgtgtgaccttgagaaatccacgggacctctctgagtctgtttactcctctccacaatagaaaggccgataataatagtggccgcgggccgctctagaggctgccctctggagctcctcgtgagcctcttccagcacctcgctggtgggacacagagccctatccccatttcacagtcaggaacacagaggcgccgagctgttttgcatgttttctggggtgatggagacacccgggcatggggaacggctctgagccagctggatgggctgcggcagggctattaatatcggggcggctgtggggagtaggggagaatgtgctgagccgggaaaccccgacaccaccccggctgcaactcaatcccccgggcactcctggcccccgcgccagcgggcggggctccgacgggatgggaggagcctccagggtgggcgggtcaatcactccgcggcgttatccgggctccagcgccgcgggattccgagcgcctccactgctggtccgttggccagatcaactcgccgcgtgggccggccgttccctgagagtctgagcgctcgccgcacccccttccgagcttctattggccgtagcagacgtccgtctgccgctatctccgccccaatacggaagcggcctagtcctccggctccgacagctgggtgtccaggccatggggcagccctgggcggctgggagcacggacggggcgcccgcgcagctgcctctcgtgctcaccgcgctgtgggccgcggccgtgggcctggagctggcttacgtgctggtgctcggtcccgggccgccgccgctgggacccctggcccgggccttgcagctggcgctggccgccttccagctgctcaacctgctgggcaacgtggggctcttcctgcgctcggatcccagcatccgtggcgtgatgctggccggccgcggtctgggccagggctgggcgtgagtggggtgcgggatcgggcggggagaagtgggagccttggacaggggggaggggccccaagacctgagatgttagaaccgggttacattaggatccaggttgttagaatcagacatttttttagaacctgggatggaagagctagaattgagtgttatttatttactcgcaaatacttattgggagcctactaggtgcaaggttttgttacagggacgaagggtacaatagaacaaattcctgatttgaggggggtgcagatgagaaactagaggaataataagcaaatcatatagaatgctagaaggtgatagtagtttggaaacaagaagtagagcagggtaaaggggttgcaagtttcaatattaaataggtggttaggccgggtgcgttggctcacatctgtaatcccagcactttgggaggccgaggccggcggatcacttaaggtcagaagtttaccagcctagccaacgtggtgaaaccccgtctctactaaaaatataaaaaaattagtcgggcatggcggcacgtgcctgtaatctcagctactggggaggctgaggcaagagaattgtttgaacctgggaggcggaggttgcagtgagccgagatcgagccactgcactccagcctgggtgacagagcaagactccctccgtctcaaataaataaatacataaataaacaggtggtaaattctcatcacaaaaatatgagtgtttgaggtaatggctatcctaattagcttgatttattccaagctgtactgataaatcataacatcacttggtatcccataagtatatacaactggaatttgtcaatttataattagaaaaaaaaattacaccaggtacaggctctacacacacatt

SEQ ID NO: 914252 - DNA, 4001 bp, Homo sapiens
acctggatctcggagaggcccgggtgggtgggggtagggataggagatgttgcagaacaggtggcagctggagccaaggacagggatgacaccaccgggaaattgccaaacctgggactgcagccgtgcttggagacaggtgcagggggagcctaaggggaggcctgtcacccggggcaccccagccgagtcagcggagcctctcggcccttggggtcatctcctgtcatctaacccagcagaagtactctgattctaaattctgggactctcaggtcatttaaattccactgagtaccccagtaccctgccctctcctggagtcatacagtgttggcacacgctgagcagggtccaatggcctcatagtgccctcctggttacccctggcctgccactctccaaagtattctccctctggcctggatcattttccctttgggaacccaggtgtcctgccccctctacttgggaaagtctgggagtgaaaatagctcagggagggaggggccctgagtgcccaacgggctgggcctgggtagcagctgcccctgtgcccctctttggcgcccccgaggtgctgcctcagcactaagtgtccatctggctggagagtcaggttacagcgtaaggggacccaggtctcccctcctccccgacctatggccttttcagcagactcagggccccatgcctggggtatcttgggaaagaatgggggtagggaaaagggtaaagatcctcaggttgcgggggtcctgatgtctgacagtctgtgatgtggggcctgtctgtgctctttctgggcttcagtttcttcaattgttaaatgagatacagcgactatggaccccaccctggagacgaggtggggtggggtctgagaggacccttctcactacccccacactcccaagtccactagttgcctgactgcaagccttcagggtggggtctgggaatatttaactagaagaagattcttctttctgaaccccccctaacttggatctcctggggtttgcccagcctgttttcagcagcagaagtggggcagtgggcccaggggaatgaaccctggtgggggtggggagcccagaaactctcttgtcattttaaacccctcttgagggctcccagccctctcctccagccctggggacagcaggcagctgatgggcagagcctgggctggggattagcactctaggttaaagacaagctctgcccctgcactgctgagatgcccaggacaaacagcccggcctctcaggcctcggttttgctgtcaggaaatgggcgagcactcactttccgctgctgcttctcccaggccgggtccagcagcaggtcgcggtcccagtcctcctcctgttccatgtactcgccgcccccgccgccgcccgcaaagcgcccctccccggcccccagaccctcgggctgcataaccatcatcatctcgatcgggctcctggcttcgctccgctcggcacgctctcggacacccgggccccattaagtagggcccagcccagccccagatcgaattcgcactaaatatgggggaggagggaggggccggatgggggtgaaggagctcgggttggacctggcaaggggttgtcctgaagccgggaactgcgggactcgggggcgccggggtggatctcgcggcggagatcctgggtttgcattcctgctccgctgctggggcgctgtgtgaccttgagaaatccacgggacctctctgagtctgtttactcctctccacaatagaaaggccgataataatagtggccgcgggccgctctagaggctgccctctggagctcctcgtgagcctcttccagcacctcgctggtgggacacagagccctatccccatttcacagtcaggaacacagaggcgccgagctgttttgcatgttttctggggtgatggagacacccgggcatggggaacggctctgagccagctggatgggctgcggcagggctattaatatcggggcggctgtggggagtaggggagaatgtgctgagccgggaaaccccgacaccaccccggctgcaactcaatcccccgggcactcctggcccccgcgccagcgggcggggctccgacgggatgggaggagcctccagggtgggcgggtcaatcactccgcggcgttatccgggctccagcgccgcgggattccgagcgcctccactgctggtccgttggccagatcaactcgccgcgtgggccggccgttccctgagagtctgagcgctcgccgcacccccttccgagcttctattggccgtagcagacgtccgtctgccgctatctccgccccaatacggaagcggcctagtcctccggctccgacagctgggtgtccaggccatggggcagccctgggcggctgggagcacggacggggcgcccgcgcagctgcctctcgtgctcaccgcgctgtgggccgcggccgtgggcctggagctggcttacgtgctggtgctcggtcccgggccgccgccgctgggacccctggcccgggccttgcagctggcgctggccgccttccagctgctcaacctgctgggcaacgtggggctcttcctgcgctcggatcccagcatccgtggcgtgatgctggccggccgcggtctgggccagggctgggcgtgagtggggtgcgggatcgggcggggagaagtgggagccttggacaggggggaggggccccaagacctgagatgttagaaccgggttacattaggatccaggttgttagaatcagacatttttttagaacctgggatggaagagctagaattgagtgttatttatttactcgcaaatacttattgggagcctactaggtgcaaggttttgttacagggacgaagggtacaatagaacaaattcctgatttgaggggggtgcagatgagaaactagaggaataataagcaaatcatatagaatgctagaaggtgatagtagtttggaaacaagaagtagagcagggtaaaggggttgcaagtttcaatattaaataggtggttaggccgggtgcgttggctcacatctgtaatcccagcactttgggaggccgaggccggcggatcacttaaggtcagaagtttaccagcctagccaacgtggtgaaaccccgtctctactaaaaatataaaaaaattagtcgggcatggcggcacgtgcctgtaatctcagctactggggaggctgaggcaagagaattgtttgaacctgggaggcggaggttgcagtgagccgagatcgagccactgcactccagcctgggtgacagagcaagactccctccgtctcaaataaataaatacataaataaacaggtggtaaattctcatcacaaaaatatgagtgtttgaggtaatggctatcctaattagcttgatttattccaagctgtactgataaatcataacatcacttggtatcccataagtatatacaactggaatttgtcaatttataattagaaaaaaaaattacaccaggtacaggctctacacacacattttatgccaggcagaggcttttgctgagactgaggctgtagtgtgctatgatcacacctgtgaacaaccactacactccagcctgggtaatgtagcgagactctgtccctaaaaattttttttaattaatttttaaaataatatacataaatgtgtggtcaaggtagacctcatagagaaggaggcatttgagcaaaaaacttggagggcgtggggggcggttagccatgtgggaatctgagggaaaggtgttccaggcagaggtaacaagtggtgcaaaggctctgaggcagttgtgtacccagcatgtatgttcccagaacagcaagaaggccagtgtggctggagtgcagtaagagaggggaagagatgtcacagatagaaggatgttgtaggacactgaaggctttgctttttactagaaataaattggagaaccacaggagg

SEQ ID NO: 914253 - DNA, 4001 bp, Homo sapiens
cccaccagcctggggggctctgggtggccaggaccctctaagttacaccctctcggaagctgccccagatcacactcagctctgtgtggcctgggctctcctgccctccacacccaaggcttcgtgagctcagagcatggcgattgtggggacaggggatttgtcatcctggctcccatcagggcagctgggatcttgacagggtgtcaagaggggtggatggagtgtgaggctgagcccccagtgggccggggctccctatgagccccctccaggggccactcctcctggcacctggagcctcagcaaagggagggcagagactgccattagggggccatgccatgccatcaactcctgtatccggcccagccctgggggcagctgtcaccggctccattttgcaggtgtggactgaagctctaggggttgggtgacttgactgagtccttggcaggtggtgggagagggagtcagcagaggagcctgtcggcctgggtctgttccttccttgcttggggtaggggtctcagggacccccatgctgctttatgagtcccaggccatggtctttgttggaaggcccccccaacccccacagaggctgggatcctgctgactcggtgtggtacctctcaggaaggaagggcctccgtggcagacctagctattttgggggctgctgggggccagggtgcttcctgccacaaggtgctgggcccccaagtttagggagaacagcagtaggggtgctggaaagtttcacttcccttggctggggtccagcttctgcatttcagtgagtgtttatggaacagaacggggtccaggaaccctcagaaacagcagcccccagtcctggcagtgtgtgcgcgtgtgtgcatgtgtgtgcatgcatgtgtgcatctgtacatgtgtgcgtgtgcatgagagcatgtgtgtgcgtgtgtgcactcacatgtgtacgtgacagcatgcgtgtgtgcgtgcgtgtgtacatgtgtgtgcatgtgcatgagtattgtgtgcatgtgtgcatgtatgtgtacatgtgtgcgtgtgtgcatgagagcatgtgtgcgtgtgtgcgcatgtgtgacagcatgcatgtgtgcgtgtgtacgtgtgtgcatgtgcatgagagtattgtgtgcatgtgtgcatgcatgtgtgtgtacatgtgtgcgtgtgtgcatgagagtgtgtgtgcatgtgtgtgcatgtgtgcatgtgcttgagagcgtgtgtgcgtgcatgtgcgtgagcatgtgtgcgtgtgtgtgtgttgtgtgcacacgtgtgacctggctctggccccacctccctgacaggctgtgtgacctggagagattcagtgccctctctgggccttggctccaccctgtgaaagtcctggccaagggcagctgtggggagtgaggaacaaagggcgggcacaagcttgaaaatgggcacatggagaccccagcatgagtgagggcagaggatggtgatgtcatgggcatcatcacgggggccaatttcctcactgcagttggggaaactgagacccagagaggggtcagagctgtggttcccccctgtgtcagcatccaattagatcatgcctcccagcatcacctcattgcaagatgcaatcagatcacgcctcattaccctatgcttataaaacctgccccagccctcagctcggggagacactgctttgggagctgtctaggtgttctccttacttgttgcaagaaataaaatcccctattaaatcctctttagttaacacccgccaagcaactgagcccacccgttgtgtgggtaacaaaactctggcgacccagatggggccgactgggattctgatcctaacttcttgaggctcactaaggtaaagcagtgggccgcggcaccttccccgggcgaactcacccacgtggccccagagggttgagggtgactcccggggatcttctgcttgctgcgtggcccgtggggctgtcactccgccctacccccgaaacagcggaagcagctgcctggagcttttgttctgtgctgctccttcagggaagaaagtggactttgccccgtgggttgactgaaagggtaaattctttggacctagcagtgggatctctagacttcagcgcagggcacctctgctttcggtttctgtctggctctacgtgccgtgggggattgagaggcatctctggccaggccaagggcaacccggatcccggatctgggtagacaacagtgggactagttttgggaattcgtttttttttttttgagacagagtctggctctgtcacccaagctggggtgcagtggcgcgatctcggctcactgcaagctccacctcccgggttcacgccattctcctgcctcagcttcctgagtagctgggaccacaggcgcccgccaccacgcccggctaattttttgcatttttagtagagacggggtttcaccgtgttagccaggatggtctcgatctcttgacctcgtgatccgcccgcctcggcctcccaaagtgctgagattacaggcgtgagccaccgcgcccagcatgagaatttgttcttttttagagaaacagaatttttcacaggaggctgagctgctccatctcccagagcccctacttgccataccccgggttaccagaaacaggagctctgccatttgatgaaaaaaatacttttttcagataaatgtttttgtcatatcatcacacaaagcgggtaaagttgtatatatatacatacaactttttacaaatatgtgatcatatgtacaaaggctagaaggaaatatacagaaaaatatgtattaaaatactggttttttttcattgttttataagatactctacaaaacattacaatgaggtaggactattttagtgctagagaatctcattaaatgaatttgttcaagagcttctttgtcagctgggtgcagtggctcacacctgtaaccccaacactttgggaggccaaggggggcagattgcttgagcctaggtgttcaagaccagcctgggcaacatagggagaccctgtctctaccaaaaaaaaaaaaaaaattagggtgggcgcggtggctcacacctataatcccagcactttgggaggctgaggcgagtggatcacctgatgtcaggagtgtaagaccagcctgggcaacatggcaaaaccccgtctgtactaaaaatacaaaatttatccaggcatggtggtgggtgcctgtaatcccagctacttgggaggctgaggcatgaggcagaggttgcagtgagccgagatcatgccattgcactacagcctgggcgacaagagcgaaactctgtctcaaaaaaaaaaaaaaaaaaaaattagccaggtggtggcacacacagctgtggccccagctactcaggaggctgaggcgggagaatcacttgagcacggggagttggaggtaatcgtaccgtgagtacagtgagccgttatcgtatggctgcattccaggctagacaacacagtgagaccttgtctcaaaagaaaataaataaataaataaataaataaataaataaataaataaataaagagcttctttgtcaatatccttttgtgggtatacatcatagtcccacagtacttcttcaacccagggagataaatgtgtattagtctgaagacccaggagagaatcttcaagacttggcactgtcactgatgatgatctgcttccttacattatgacaaatgtattcccagctccggcttgttctgcctcattaagagaatatttgaagacattattcatgatagcagcatcagcattttgcagaagaaaccctggggacagatgtctgcatgaagcacctttattctgtgaataaactggtattttttaatgaccatttcctgcaactggcaaaagtctccgttcagttctactccacagggttgcactgctaagctataagatcaccccataaagactgtgctgag

SEQ ID NO: 914254 - DNA, 4001 bp, Homo sapiens
tgcaaaaggcagggctgcttcctgggctgggtccatctttctaatcccaatactcagtttccttctaactctacagctggaatctccaaatactcttgactaagctcacaccacttccaccccagcaagggcagaagctagagccctgaagtcaagtgtggtcataggaattttagtgacttgggagcaggagcaagcatgcccgctctgctctgtagtatacatctgggcaaacgggtcaccctctgacagcaaggatacaggaaaattggaagagattttcccaactcagctccaagtaaaactccacttgaaactccaagtgaaacagtctcagctccaaacaggtgccctaactacaccgcctgctcagaatggtctagaagcctcttggaccatgcccagcagagaagtctgtaggagaagcggcagtgaaggagggatgctcgcagtacttgagtctggcctgtcactgcaacccacaaaatctctcaatgattccctccaccccaatccaggctttccaggcccagtacagagaggggacaacgtgttacccgagagaaatgtagcaagcgctgaccttggatcaccttcagttctacaacccttgaaaggagacctcaggaggtgtccgagaagactcagccgcccatacaataggggtgggccgttcccgccctctccaacaccatcctcacggcgtctcctatcggtcttggacacaaactgcagctccggggcggcaacttcctgggttccggcccctcggcgcctgatccaggaggcgctgattggccgcgccaggccaacaccttcggaaagcgcaggctctcctccaatggcccagatgcacgtgagccgccgctccgcggagcgtgggagagggctctccctggaaactccacagagttggagtcggaagagatcaacgaggtttaaactcggaggcattgcacgatacaaaggggatttggagcgctaggggaggtgaccctaaagaacgggactatctgggtgcaaagtgacggcagatcaactcacctgcctggtgaagaggatggcagtgtcccagtactcggggtgcttgtcactcactttgttcagcttcttctgccaggcacagaagttgcgcagcgtcagggccgcattgccggtgaccttgggcccggagtcacgatctctaagaagcagcaccttgaccacaacgatgttgatggggttgaggatgctgggatggcggtagagtcgcgccgccgttgccagcagcgtcagcagataatgttccaggtccgcgccgtggaacttgaccattgactcgtccgcgaccaccagcgtctccacgtaccgcgggatagacacgaaacgcttggcgcgcccagacctgcgccggctacgactctccccgaagcccgcccgccgcggcttgtaagggtccagggcccgtaggatggcggggttccagcccgaggccaccccgcagcgagaggtggggtctccggaaggcccgcccggaacaccccggcgctggagaaggtgtgcgccctggctgttgcgctgcgccgccggcgcgctagcattgggcagcgggctaatgacatactcggcgcctcggtagccaaaggctccgcggagccccccgcacaggctcacagcagcgaacgagtccggctcggcgttcacgtccccagaatagaagcagcgtcgcaggtctgaagagcccccggtgagcccctggagggggacgcccagatgctcagtggagaaggcgggagccaagaactgagcatccggcgtcaggtgtaggtaaaagtcctcctgaaatgctgtgatctgaaaaatgagtccctgatccccggagtcctcgggaccccgccagtagtagcggcggccgttaatgtccgggtccagtcggatgggaacgactacctcccgctctggctcagagcctccagcggttcgcccggcgaaagccagggttaggatgcccagcagaagcatggcgccgggcagcgcaccgccgcgctgtgggaaggggctgggccgggctctccggccgctgccgcggtctccgtgcagcccgcactctggaaccgccaacgctacgggacagccggcagttcccagaaaggagagccaagggagggagactcctcccagggcggcgagcgtgcacccggcagcccgcgcttcctacctgtgcctttccaagcaaagcgcgccctgggagcttaagtacaatcgctgtcaagtgcaaggacgaagatttgcagccgagaactagcggaaggtgccgggcggcttctcgcaaccgcagccactcgcagcgcagcaagccaggcgctgggcgagcctattaaaggccccctcctctttggacggcccagtcagcgcccctcccctcactcccctcccagcctcccagagctcgctgccggagcctccaggggccaccggagaactcggtcccgcctccagagcggagagccacttggcggggagggagtggcattgagctgaggcaggaggcgtgggctggcccgagaaaccggcgctgaagtctcagtttgcgttttgctcttggttatgccccactgtcccgacgcctcactcgcttctgcccccgcggacagcgttcactctctgggtcttagtcttttatctcagggcagatcaggtcagcagctaggaatgaagacccttcactgacccgtccccaggcccacctcatccctgctgttgcaacatccctgctgtttcttaatcacagagtcccctaaaagacccagaatcaagaaccacccccccccccgcgtaaatgtcctattgccagaagagcaataggacaggggcatgggagccctctggaacccaagaccgcctagccccaaggtctgccctgggcccatggtgtgctggatgggctggggcaaactcttcagttctcaggaatcttgccagccagctgttaatcacggacattattaaaaattaaactaaacacacttacaattaaacaaagtgtatatatatatatgcacacacacacacatacatatatatacacatacatatatatatatacatacacacacacacacacacacacacatatatatatatatttttttttttttgagacggagttttgctcttgttgcccaggctggagtgcaatgacgcgatctcagctcaccgcaaactccgccttccgggttcaagccattctcctgtctcagcctcccaagtagctggaattacaggcatgcaccaccacgcccagctaattttgtatttttagtaaagacagggtttctccatgttggtcaggctggtctcgaactaccgacctcgggtgatcctcctaccttggtttcctacctcctaccttggtctcctgagtaactgcgaccacagacacacgacaccacgctaggccaatttgtgtgtgtgtgtgtgtgtgtgtgtgtgtgtgtgtgtgtgtgtgtgtatttttggtagagactgggtttcgccgtgttgcccaggctggtcttgaactcctgagctcaagcaatccacccacctcggcctcccggtgcggggactacaggcgtgagccaccatgcctagccacaaagtacatttttaaaaggtaataaatactcaaaacccgtcgcttcctaagtatttgataattacttatggtcttgagccaccagaaccgccaaccctctgagacagcaactcccagaaaagagtgcagaatggggtggaaatgtgagggaaatattaaatggtgtgctgccctgcatctccccagtcagggacatcacaatggcttgaaataggtcctggtagaagtatttacaccacctgaataagcaaatcagagctggggttgggggcaggaagatgagcccttgtacacagctacctgcctggcagggatgtggagatcaggttctggggctgcagttacaagaggaagaggctgtcttccagcaaacagtagaaaaatc

SEQ ID NO: 914255 - DNA, 4001 bp, Homo sapiens
cacagacacctcctgctgagtcagcaccatctttgcatctagttagaaatggtctggttaggtagccatcccctggactctgtttttctcccctgtttaggtaagagctgtgtctgggctaagggcagctgggtggaccaagtgtgggtctggctttactagagacattcacccaaagagctcgttccagcccctgcgcccctcgcgtttccaccaaagcttcagctcctgggctgagcccccaggcagaagttctctgcccctccctcttgtgctggctgctggcattgccaagttctgccggggctgagcgccaggttggcaaggtagtccatgccccattgatcacaaccagctggctgcacagaagttgggcagcccctctccaggttcagctcctttcaaacaatgtcttttgcttatggcgacctccatacccaagggaatcagacagccatctctctccatcccatctgcctttccctgggagcctctcagatctggaggcagtagagggctgaggggtgggagtgggagctattcgtaaacgctcaattttcatctctgctgggagaggcaggtgccggggaatgcgttgatacccactttcgggtcagtgcgccacgtgccgcgggagattcggatgagagggatgggcgtcggcagccccactctaaactggaagggacctgggggtgggggcgcagggatccagggtggcagaagttcagaaaagagttactgctctttctcagacaggagagaatctcgtttggggtaaggctggagaagatgagtggggagggctttttttttttttttttttttttctcagagggattggaaggggagattttagagacgctgggaggcgtctggggggcctccgggcacggcggctggaggaggctctcagtcctacctgcaggtcggccccgtagaaggcagccatggacgcatcggccaccagcagcgtctccacgaagcgcgcctcagacacaaaccgcttggtcctactcgtggcccccaggggcggtggcggctcgctagcgccttctgcctcctcttcttggctctcctcctcgctgtcctcctggtggtctcctctctcctgcctctgaccctctcccgtctccacctcccactcgggtcctcgcgggagggggcgggctccggcgggaccccagcgctgcaggcggtgcggctgagccagggagccccccgcgccctgcggctggatggtgaactcctcgccgtccagcaggaaggagccgctcagcccgcggcacaggctgaccgccgccagcgactcgggctccccattcacggtgccggagaagaagcagccgcgcagcccccgctcgcccccggtcgcccggccggagcccccgaggcgctcgatcttgaactcgggcgctaggaagctgtcgtcgggcgccaggcgcagcacgaagcccttgccgaaggcggacaggtggagcgcgagctcgcccgcgctgccgggcaaccgcgtgggcaccaccagctccgaggcctgccccccggctgcgggccgggccggggcgccgcgggccagcggcagcagcagcagcagcagcagcaggagcggaggccaccggggggcggcgggggcggggagcatgggggctgcggcggtggctgcgcgcaggagagggaagaagcccgccaggcgcgggcaggtgctggcggcccgagcgcggcccggccgctctctccaggaaaagcggaatcaatcgggtgcaaggccgactcggcccgcggggcccggcggcgggagcgctcccccggcggcccctctggctggcgcagcccgctcctcccgcgccgccgcccccgagccgagcgcgagcagctggccccggcccgcgtgcgcccgtcctccgcccctgcccgcgccagccccgcgcagccgcctcctgcctcctccccaccccgggaagcaccgagtgggctgccgagcccttcttatttatacttccttcccggcttgacataagaggtttatttttgatctctcactattcccgtttcccctcccctgggatcagagagagaaactgaaaagagggagagagagtggagaaaaaaaaattgggatgaaatgcaaaaccaatcaggcagcgagacccgtccgccacccgcccccctgaagtgtcaactacaacttctttcctttccctctacgcgtggacccacgttaacccctaccatgctggactgaccctttagaaagagtccctgggagaccccaaccgctttctcctctgcggccaagagtccaggatgcatcttccgaagaggctcgtgcactggtctcagcgaccctgttcggatccctgcagagtccgactgcagagcccgacactgttgggatccctgcagatgcctccggagatccgactgtgtggggagaaggttcctgagcttttcattgtaaagcataaagggagaggaggaaaaggtcatgctaaaatcatgccctcctctcatcactactgcacagccttcctaactttcactccaaactgaagatggggaaaacaaaaacaaaacaaaaaacaacccacctggttaaccctaagagggactctcactgtcctgttagagggcaggtggggcagaggccagcacagtggtaagttaccagcactgaggttggaagttagcatttccccaagagggaaacagacctccagtccctgaaaaaggtcttctcttctggatactgctagttgcccgggacttcaagtaaggtggcaggccctttcactgcgttgccacagccccaggaacaaatgtgtatgaggtgaatttattctgtcccatgtcaccactgccccctagggaagggggtagtattcaggaagagagggatgacatggtctcaagaccacaaaactgcatcccatcccagtctcaatgacacaggtctggattgggtggagggccctgttctctacctacaaactctagactcatccaccaactgtgcctttctctgagttgtcaatgtgggtgatgcattaggaaccgctgggatcagggcctttaaatcctttgccaattcacctgcccccaggtacccagctctgtgcttatgctggggatgttgacagtcgaggtcatcgctgattcttttcagcccatctgaccccttcctgcagtgtggtggttcagcatgcatctgagactctcagggcttgttacctccaaagaggaggctcttgcccaggggaaagtgctgccaaattccctctaagtatcccccctctctttgctttctcagaaacacagagggacagctgtgaattagatgaaaggatgaacttcccaacctagcatggtgcagaacctcctttcctgcataatttataggataggaataacgagtctagaatgttttggggaaacacttctagaggaaggacaatggaaagaatggtctcttcaacccttttctcaaaacaagcaaaacacttcgtcctagcacagtgtacagtgcttgggacatcctgtacagtgcttgggacagtctgacctgggcaagcaatgaatacaactctgtgttgcctcagggctattgtaacagttcaatgactggtttttacctccttgaagccccttatttgctgtttcccagagtacaactcctgattttctctttttgagacacagtctcactttgtcacccaggctggagtgcaatggtgcgatcttggcttacagcaacttctccctctcaggttcaagagattctcctgcctcagcctcccaagtagctgagactgcaggcaggcaccaccacacctggctaacttttgtactttcagtagagatggggtttcaccattttggccaggctggtctccaactcctgacctcaggtgatccgcctgcctcaacctcccaaagtgctgggattataggtgtgagctactgtgccagctaactcctgattttcagtagcagttaggtcctgt

SEQ ID NO: 914256 - DNA, 4001 bp, Homo sapiens
tcagtttgtgggcgagcacggctgtggctcagacccctgctccgggggtctcagcattcatttctcagtttctcctctccttaagcctggcaaacactcggattcttctgcaccccgccccctggggcacttgcacctgagcaaggctaaggaagcgaagcccccagaaggaggggcccttgcaaagccagagctcgccgccggacggtgcctcccggactcagggtctccgcagggctgtcagagcccggtccccacaccgctcgggaagtccttcgtcccgggaggcaccagcgggatgcttgcgcgactattccttgtaccatgggcgcctaaatcctaaagaaagtggggagcacttccactcgggggggctggagccccgtgtgcttgtggcttagaagacaccagagtccgacccgggccggcctcgggcagggagcgccggcgccggcggccgtagccctgggggctgatcttgctcctgggggcgacgttgtccttgtccttatctgtgaactggtagatctggtgtgccagcttctgcaccgtgcacgtcccgaagcggcagccaaagctccggaggccctggaagttgttcatgctctggcggtagcgcttgactcggatgcgggcggcatccggactgctgcgggcggggggagggggaagaaaggcaacttgagaccccatcaagcagagctttggccccaacaccgggaacgggagccattctagagccagagggagctggaaactgctcgcgccatctgagctgcggtccagccccgacgatcccccgggccaggggagtggagacagagaactcctcccgcacaccttccttccctcccgtccctggacagcacagggcgtagttacctgtcttcggggcttcgagaggcacccttcatgtcctggggccgaataagggtctgggcaggcccggccttcacgtcagcgagcccggtggggtagctgctggacatccgcagttccctcttcccacgactcagagcccacttattccacctggaaaacacaagcagacccgattcgcgtgcgttcaggtgacgcccaggcctgtccctgctcccattcacttctagaccttcgggaccaacggtcagttccccttgcctgccaggtaccagcaagggggaaggcgctgcccggactcacttctttcgaaactccgacgcgacatccaaccgagcggtgtcagcgcctaggaaggcgagcgaacccaggtacatcagggcgacggaaaccagcttcatcccggctgcgaagcgcagaccctggaaaagaagaaagagagtcgagcgtgagcacccgggccagctgcaccgcccgggcggggcacggagggcgggcaggggccccggcgaggcgggtttagcccgcgctttccctggctcagacgcttatctccctccgcgcagagaggcgccagaggcgtttgcacgcgccggccgggtgacaggccccgcaggggaggccgctgcaccccgccaggctcccagagggtctctgctcaacttcttggaacttggctgacggagcagaggggactgggtctctggacctccagctgtgtgcacgagctgggcccaggatatggggtgtatctatctctcagagaaccctccaaagtgggttgttcccctcacccagcgctcccagtttagggccttggcaagcactgccccccaccccacctcttaacccgcagggtctgcggcacctacctgctaagagagtgatctgccaagtacttgaaggagaaagtctcagacgtcccactggcaatggcaaaactccgaagtccaagcccagctgcagtgagaagcccgaagtggcaaggcttgagctgttctatccagtgtcaccaagaaaccactgagtggccagctctggttcctgtgctttataagcgcacgggtgggggagcggcggggcggggcctgggctgcccggttgccttccctttctttcctcagccacgcgcgctcctgctctcggacgcgcgcattgcttcctttggggctggagttgggatggggggaggggggagcgggggagaggaggtccctcgtgcccagagggcttaggtatgggctccaggcggttggtgcaggaactgccacagccctctttgggcacagggttcagacagtacgccggagcgaaggggcgccactacaacctcttgaggtccttatccaggacccatgcggcccggagtgcaaagcctcctggcgaagaacagcaagagcccgcggaagggacagcgcggatggcccgagccctggacctggggagctgtggcctcaagtggaccgcgcccccctgccggcttggcgcctgaccgggccgcgaccccagactcccgcggaggggccggggcagggacggagcaaagccgagaggagcaggactcactagtcccccagaggaccaagaccccggcgtttcggggtgagctagtaagatttcacggtagggacaaggctcagaaaagctaaattgagaattgggatttggaggggggaattatctgaaatttcagaattttcatttctatttggaaacataggaataaccaaaattaggaggaaatatactgtttcattttgcctccttgtaatcctattatgccttataaggtcataacctgagattgtgcctggctgccttcattaatccatcgtaaacgtgaggactgactgccagggagcacactaacgcttcacgtatgctaatcattttacagtttaccaagcacggccacatcccagtctactttgagcttcacagccacccttgagtcaggcaaggaaggtaacattccttttcccatttcagcaggtagaaaattcaagctcagagaggggaggtatctgcagagaggggaagtcaccctgcaggtaggaagcagcagagtccctactcggcccgacacgctagcacggccgactggggcgcggcgtggattcctctaggctggggtcaccaacttctcaaggggcaaaggagagtcctagcccccgcccaaagaatttgtgcctgttcatgatgaatcacgctagacacgtttgtcacccgtttgtgctctttcatcacagcttcttctctttcttacttctctcctgggggccaaactgggaaggaaaggctaagccacggggcttcctgcttcgtgcttgtgggtttctggggtcctactaaccactcctctaatcgaatgtcctgaagcccagcgactcgacggagaggccaaaggtgcgagaccactagccaaacaggcttctagtcctcacctcccggcaattcgctgtgtgaaggtgggcgagtcatgtcccatctctcgagtccccatcttagagccggtccccagcagacctttaagcttccttcctactctgccatatggctctgagctccggtgcaaaggcggctgggcagtgggtcgcgcggaccttgcccagagtggtctgtctgggccgcgcactgctggcttagctgccttttcactctcgggactcaacagtggacattgcacctggggaagaaatggccgcgcggaagttatttaaggactcttcctggaaggagtcacctgagcggacctgaattccatctgaggacggaggacagattccgggccctgaccctggccctggtaaggggttgggacgcggagggttagaggagtgcagcgcggcgcactggtctggatccggccgcccggctgggcgcagggcagtcaccgaagtggcctggccgggcgactagtccgtctgcaccgcagacagcagctattactgaacgcctgctcggtgaccaggagcctccccagcctaactattgttcttctcccttgtctcccatttccttttcctttcactttatcctctgcgagtcaagctcttcgcgcagatccaggactggctatcagtcgctctgaggatgcgacctacttgtcgccagcttccact

SEQ ID NO: 914257 - DNA, 4001 bp, Homo sapiens
cctggacagcccccagctgacagtcagtctggttcctgttttgagaaatctgattgcaaatgtcttagaaaaaaaaaggccctaacggccttttcaaaatgcagaccaattttcctctcccaggcctgacgttcagtcaatccaaacacccagtgagcagggcatggcacaggggggcggtgagggccatgggcatggggcacccctgcagcgtcagccagagcttagacggctgcttcaaaggctgagggacaccgcagagtcacagctcttatttcacgccatccacatttcacagatgagaagaccgaggcccagtgagggaagagacttacccagagtcacaagataagaccacggcagtgtggacaggccccatccccagcccgctggggcaccaggaggaggccaactctcaggcatgcacaaggagttgccacacgacacaaagaatcgtggcgggcacgtctgctccctggcacaggccagggtagctgatgaaatgtagaaccagaagtctgaagccctgatctgttggccaggtgccacctgggactacctgtgtgactcggggcaggccactcacctctggagcttcagtttccccatctgttccacagggacaaaaccacacctgtcctcgccaccccatgcgctgctgagaggctcacacagtggagagatactctatcagccataaaatgctggacaaaccgcagcaatcgtccacatcctgtgtacttttgcacctacatcctgaacagtctaaactttgataccaggtgtgatgtcagttgtcttacagaggcggcagctaaggtccagccattgcaggtgtgctgggagggcccctggtcaacagcacccacggggcaccatatgcagggcctgccagaggagaaatgtaggggagagggcacaggggatgtttccccgacctgagcgcggtccgagggggagggtgcccgcagcaccctaggtcctgctcaccacgccgccctgaaagcactctcgagcccaactccaggacagcgaccccaccagagggtgggagaagagtccggaagactggctgtcccccaacacctcacacaagtgtagactggaggagagacgggtgggggtagtggaaaccctaaagcgagtgccgtgagcagggacagcaaaagggtgggtgacatcgtcaggcgaggtaaatggtggccagcggaggggaggggaccccacagggaccaagggctgctccgagaaggatgaaggggcgcgccgggcccccgtgggagaaggcgggagccaggggctgacagcgacttcggggggccggtggagcacgataaggaagcagcagggcggccagggggacccgactgggtccggggaccgatggggcagaggagctccggagttggggcgctccgggctcaggcgcccagggtctggggcttagggtctggacccgcaggcgccaaggccgggctgctccgggctggggggccgacagggggttgcgagagccggccccgggggtccaggtcgcggggtcgagcatggggccagggtctcggggccgcggccggggcgcccgcggggtcgggccggggccgcgggcagcttctcctcacctgggctcgggcagcaggatcttcttgctggcgcgcgcggccggcgtggccttgctcttctccatggccatcaggtagctcacgtcggccagcaccgcctccaggtccgccatcttggcggcggcgctgcctcctcccgccgccgccgccgccgccgccgctcctgctcgctcggcgctcggcccggcccggccgcggctcgctcggcctcgggcgccgacgcctcccgcctggccctgctcggcgcccgcggctccgctcgccgccgctcacaggcggcgccgccccatggcgccggctcgggcccggccccggctcgcgctccgctcccgccgggactgcagtcggggcgccgccgccgccgccgcccgcgcgcccgcgccccggagccgccgccgcctccggccccgcctgccgcgcacaacgccagcgagcccgcgaggggccgagccgggcgggcgacggcgccccctggaggccgcgcggaatctgaccccgaaccagacctgcgaccgcgggctcagaccctggccgtgacctcggccctcgatgctggacggagacccgggcctggaacacgacagggacccggcacggaagacgacccgagacccattctctgaccacaacctcgggtcacatctctggatcccaggctccccagtcgggccgcagccctgacaccaaacgtgatcacagggaacctggacgctcaccaagacacagattcagacctctgaacaccatcctgggactttcatctcagaccctggctataaccccggactccctgaccttggacgcagtccacgacctgacaccagactccaaacaggaccccagactcaaaccttggcccaccacctcagactctaaccatgacctcagatcacagccctgggtctccaacgccatacccagactgcgacactcacctcagacccccaacaggtccccagatccagattttggaccatgacctcgatcccatcctggttactgaccccaaccttgattctgaccctaggctactaccatgaccctgaactctagacttggggtcaggactcagacctagattggactgtcaactccagatcactgtcctagactcaacacccagaactgtggacacggactcaggactaggacgtctaacctgggacccacactggacccagaatccttagtaggtcacccagaacctgggacctgacaactgcagcgcagttacaggcttcccccatccctgatcccacccctcctactctagaaccaatcctggccgcagaaggcccactcaggatcaagtaccctgcacccaaccccaccccccaaccagctcatagacccaggtccctggccagcactcttggcagctcccttccctgtaccccatcccatccagatgttccttcaggatggttccacatgtagttacggtaaaaactctcccagcccggaagcgcacagaggtttcagtgctgcctggcaggggaaacccaccctgctgagagcccacccagagtggggaaagccaggtgtctcaaggcagcattcctatctcaacatgcccctctctagagcctctctttgctttcaaagtgacaggaccctcctcccagccctgggcacataaagctcaaatctcattaccatgctgtgggccagcagccagcatccttttgcaaagcaaggcccccatctctgtgcacctctaggctaccatcttggatcagccccaacagaacctggaaccagagcatgtcagagcttgtgaggttctcctctcagtgggtggtgagtcactcgccacccatatacccatgtcagagcctcagttttcttttccccaactgctccttcattctctccccttctctaatctaatttgtcaccatagtctcctgtctggcctcctgagaatctccgtgaatctgtctacttctcagggtcctcatggccagccactgccctgatgcaggccctgaccagggatgcttttcccaaatctagatctgatggagtcactgcctgcttggcacccagaagcagctctccaggccttctggggctactgagagtgagagacctagaggggtctctaggactcaccacactctgcccaaagcagattaggtgaacaaactccttaatctgcaagtcaagatcttggaggacttggaccttgaatgctccagtttgtttcgctaccatcctctgcacctggagtttccccaccaactcacccacccattctcacttctgtgcctctgctgtttcctgggcctggaagcccttctgtgtaccttcctccgtggacaactcctactcatccgctaagactcacctcctccaggtagtcttccctgactccct

SEQ ID NO: 914258 - DNA, 4001 bp, Homo sapiens
tacccaggcgtggtggctcgtgcctgtaatcccagctactcaggaggctgaggcaggagaatctcttgaacctgggaggcagaggttgcagtgagccgagatcgtgccactgcactccagcctgggcgacagggtgagacttcatctcaaaataaataaaaaataaaataaaatgtcataagccaattgcaaaatttatttttttaaatttttatttatttattttttttgagacagagtctcactctgtcgcccaggctggagtgcagtggcttgatctcggctcactgcaagctccgcctcccaggttcacgccattctcctgcctcagccttcccagtagctgggactacaggcacccaccaccacgcccggctaatttttttgtatttttagtagagacggggtttcaccgtgttagccaggatggtctcgatctcctgacctcgtgctccacccgtctcggcctcccaaagtgctgtgattacaggtgtgagccaccgtgcccggccgccaattgtaaaatttatatagtaaggcaaagactcaagaacagccgtgacacttctgaagaacaaggtgggaagacatgtctttccagataaagactattttaatgccatatagtaattaagagacagtgatactggtaaaggatagccaaacagaccaatggaatagagagcccagaaacagacctttgtattaagtgatgctgtctacttgacagaggtgacccgcagatcaatggggaaaggaagtacttttcactaatggtagaggaaaaagtatttatttgtcaatgcaaattatttattagtctacccaagtgcaaccctcccagctaacgaagcaattttcctcttgagtccaggaaaggtgatactagataagaacatggtattacctttaaagtagccataatattggaggtgacggtacataaagtcttcataaggatcaggaatagtctgtgaaaggaaaggccacttcaatcaagataatgttttcaaaccataatagactcaacaaaaagtacatgagcgttgttgcataggactagactaaaccaagcgagctgcattccatgcgaattattctatcgtggggatcaagatctccagctgagaaaagatgccaccagaacatcccttctcatctagtagcagatttctgtggagttcccgaagaaatggagttccccgaagaaatttctgtggctttccgtgttgtgtaccgacctgctttaggtgcgtttccaaagctgggaacatgttacttctggatggtaggctgaaaactagtcagtgacattagcatccagtcgcaaaccctgcccaatttccaaataggcagctgattacacaagagaagctacaaagccacaagaggacaagtgaaaaaactgccaatacctccccgggcgccccccagctccctcttgacttcagaaaaccctgccaacccagcttctcctcagctaaacaaggtggtcacgccgaggccagaggtgcatctgagacagggagggcagcgtatcttcccgcttcttcttcccaaggtgctggccccatgcttccctttccctgagaaaggagatgctcgccacaggaaagtgaaagaaatgggtatgggagcacgcgacgaagtcgtctcggtaggtgccgatggaaaaaggtcagggggttgggaaagtgggccctaaagattgaatttagggttcagaggaacctggtctggggcaggtggtgagggggtttcctaagggtaggagcggggaaggagagcagaaacttcccaggagggcagagcgatggatgcgaccgccttcgcgccccggcccgtcccaagcagcacggatggctgcggcagagaagctccagcgaggcaggcggccaccgcacttaagtacagaggccaagcagtgtgcgggcaaggggacaaactcgctgcacccgcccgccaccgccttctgtgagggcccgggtagtctagcaaccgaaagcaggaagcggagaaagggcggggcggtcgggcgcttccggggagctaggcctcgcccccaaggagggagcggggaccccgggaaggtctgcaacatgtatggcgggcagcggctttcttcccctcatacatcacagccccagcctcggaatcgaaaccgcattgatgagtacgatgccagtagccttcaacatacttccaagctggtttgctgttggctttagataactgttatgcataatttgctctaagagagctgctgcttctctcctttcaccttaacattctctccactgcacagctagaaaggaaaaattaccttctacactgcaaatcttaagaaacagagctaacaaattcaaatcacacattttgattaggtttaaaaaaatcaattatatgcatagaaatttactccaggccaggcgcggtggctctcgcctgtaatcccagaactttgggaggtcgagagttggagactagcctgaccaacatggaaaaaccccatctctactaaaaatacaaaattagctgggtgtggtggcgcatgcctgtaatcccagctactcgggaggctgaggcaggagaatcacttgaacctgggaggcggaggttgcggtgagccgagatcgtgccattgcactccagcctgagcaacaagagcgaaattctgtctccagaaaaaaaaaaaacaaaaaaccaacaacaaaaaaataaatatactacaataaaattcaaacacgtgtctttggttaactatatatgaatataaccgtatctgttacttttatcagtggggggaaaaaagctataaagcacctttttttctgaaatgttaaccatattacatcattgccaggaattaagtaggtaaaatattatctaatatggctattaaccaatctagatattatagataatattagaccccaaaactttgatcacacagcaccatctgggactagaagcctgtttgtctaaactggccccaccactccccattaaagatctcctgctcattttcttgaaagctgttgttaaatgtttgcaccttgcattgtatatgcttagaaaaaaaaacaagtcctggttacataatcagaataacaggagttgacgagcaaaaggataacccatcaggattataaaaaaagctttattagtgcatatatacaaatttacaaggtcagaaactggagaaatacaaagagctttaaaacacaatttgccgtttcctcagtttaaagtgacttttacctgattgtgatacaacagaaagtacagaacagtaaactgctttttaaatactggaattttatggagaatacattcacataaagaaaggaggtgaattttgttttggaacagggttaagacaatggagacattaatacatagagtgtcttgttgtatttactgccacatacttgaggggaaattctcaaaatcaaggatatgaacacctgctgctgcctgtatgccacctagtgtgcgaaacgaccgagctaccagttctagaacttatgagaactactctaaagagtgtggccatctatcagcacgaggtaaaccacttagacctcagcacttcaggggtggccgactagagaaaagaggccagaaaaagcttcagacaattccagtcaagcaaggtagaatgcagagctgccttctgaattgcacttgttctggaggagaagttaattcttcacttttgtcagggagtcctctacagaagtgttatactcatgagccacatgttcttcaagactgatgaggttaatacacctaacatgctaagtttgccagtttgagaataaaggcagcatggtcaaagcaattccaatcacctcatccctttgcaaaaacagaaaaattacatttcacaaaagtgaaaactttgtatgcatacactcttgcccaggaaatttataagatctcccccataacatttatagtttatttgacaataaaactggttaagactttgaactgaa

SEQ ID NO: 914259 - DNA, 4001 bp, Homo sapiens
tcagcttcactgctgcagcccctcactgtattccacaaaatcaacccaacacctaccatgcactaggctgtgctgggacgggcaagcagagagcaggagccctgcaatccgaggttggattctaatgaagacgggttcgaaaccagtatttactgagcgcccagcgctgtgctggagacacagaggtagatatctcggtcccttttcctccggagactccggaggtctaaggacctgactgacttgggaggctcccacactgcctttccacaaatcccctccacagagcagggcactctgcagcgaccgcacgctccctgggagcacctcactgccacggtcgccgcggcgggagccacaccctgcgaaaccggcaagcacacacatcgcacacaaccctcagtggcctcattgtgcagaggggccagagccgttccccaccttgttgtggggcctcggctacagctgagaacacccatctgccccctccgcacccctcccagcaaggggcacagccagccctgtttgggcccctggagtccctcatggtcagcgccgccaaggggctgcgcccccacatcccggcctgggcactgctggggggcgaccagccctgccagggacggcccaggccctcgcacactgcacacacacaccccctccccttgcatgggaaagccttacataacacagctctgcacacaccctaagcacgctgcctttccaactctaggcgagacctcgcttcgggccccctctcctggcgcgcaccgctggagcgcagggttccagcgagcgcagcttagccctcctcccacgccaagcccggctcctgcccccaactcccacacacagccccttcctcctcccctttgcccctcaccactcctccctgagttctggtttgaattagtcaccggctccaaccaccacattcctcaggctgctggcgccgggccaggctctggggcgggggccatcccgcccggacgggtttgggagttgggcggggggaaagcgccgcctccggaggggaaggggcggtcccgaggactgggccgccgcagcgcacccccctcctcgcccacctcagcataggaatctccctaattttgtccccctccccacccatcccgctgggaggcgcattgcaaacttccaggttccgcggcccgagaggaaggttttctggagcggggaacgcggagaggcaaggctagggcggggcagctggaggaggctgaggggctggtggtacagaacagggtggggcctggacgactcgggacgcggttaggggcagaggtgcagggagcgcggaaggacagccgagggggcgcacggtgcggggtcgcggaggcgcggaggcgctgggggccgcggtggcgatctcggaaatttcccctccagtaaacatgggatacgaacggagcagcccccgagccaccgccccatgcagggagaggaggtgggacagaggccaccaggcccggaacggggcgccctgccttgcagtggagccaacagtccgccctccggagaaataaagagtggagcaaagcacttcggagcgattttccaactttaaccaacttgcgccccaactccagaggcagaactccgctcccagagagcgacgcgtcgccgccccgggtggccccgcttgctccaaactgcttgaatcctcacagtgacacccccaacaacgcgccctgccggagcaccgcaacccacctccccgcgacccgcccttggtgccccggaccccgatggcgccacggtgcgcctggcgcccctacctgagggctcagccccagggcacggccatagccggcgcgaggcccaaggctgcggtgctgcggctactggcggcgacgagccccgttccgggcgggtctggcagggcgggcggtgcagtccccgcggcagagcagctccgagtggccgggcccccgtgcgcggaggcggctcttgtaactccggctcgggcgggcgggtctgcccggagctgtggggagagggcggggccgggcggggccggagcggggctgggactggcgagcggggcagaccctggagggacccgggagtgggctgctggggaggggggccgctgggggacgcggggacattctttccccccctccccgcatccactgccccctgtcctgtcccggacctggacctgctctccaacatgtgcactgtgtggcttcattggcaagaaactcctgcaggctccctgggctcaccctcacagctggaactgcgaatcaacttattttgcaggaagggcctgggggctctgaaggtggctgggtgattcagccgcgaccgtcagcttgctccggacctttgagttttctctcagcttaggcaactacacttcagatcccaggccccagcctccttgcttggttcccaagctccgtgctgccgcgcccatttctcgcgttctctctttctgggggcccctccgtccatatccgcacagaactggcttggatttccaccccccaggagccggggtcaccagtgcctcgcgcaccgcggtgctgcgcaggccgcgggcatacgggggtgaggaccccgggcgttggacagcggacccgacgcccaccttcctctccagactcccgcccccaggagccagagccccagcgcttcctctgcctcccattccttctctgagcgccgcccccgcctccccacttgcgggacgctgagtctcctaatttacagcgatttcccacagccacttctaactacatcgagattttattaaacgtttaatgatggggtgcgggggccttctggctacacactcccctccacactccctttctcttctccctcatgagtccttttatcctccctcctaggtggccacccactgcccgctccaagccagtttcccctccttcccaaatgctaaggaaagagagaccccaggctggggaactaaggagacctggccaaggcaggagcgccctccttgctgcaagatcatgagtgggctggagctgagaccagctcggccctgtcctctgaaatggcaaacatgtttacaggctaaaaatacccagcagtcaactctgctgccagccctgggggctgtgtccaggtccagttaccggcacagagtacaggccgtgggggagggaagagacagccagaggaaccacagacatgggcactcatataatggacacagaaaggtggagccgcatgtgcagacatccagacaggcagagacatgtgaaaacacaaagcggagacttgggcaccagcattttctcttgctctctctaatacacacacacaggtgcccagataatgactcaaccccatggcagaggcagcctcgccacaacacatcccaagcacacagtcacagactcacactttcccaagaatcacctgctcccccattttgttctgcacccctttcctagcacctaccttatttaaagaaaaaacaaatctaaaacttttgagctatagaacacttaaaaaaaaattaccaaggccaggcgcgatgcctcacacctgtaattccagcactttgggaagccaaggcaggtggatcacttgagctcaggagttcgagaccagcctggccaacatagtgaaaccccgcctcgactaaaaatacaaaaattagcagggcatggtggcgcagcctgtaatcccagctgctcgggaagctaaggcaggagaatcccttaaacttgggaggcagaggttgcagtgagccaagatcgtgccactgcagtccagcctgggtgacagagcgagactccatctcaaaaaaaaaaaagtacaataaaacacagacttctccctcctcccctatcacagtccctcttcccaaaagtaaccattgttaacagtttaccaaaggatttttaactttatggaatgaatcatcatctcgttccttgaaagagcgaatgttcccagtgcatattaaaacaggagttgattcacacctaggttgg

SEQ ID NO: 914260 - DNA, 4001 bp, Homo sapiens
aaataaaataaaaaataaaaaaaaatttgcaatcattctccaagcccacaagtgatctaattctccagtactccagtacatcaaggcaagaaaaccccagactacagaaagccctctgtccttgtgataaggaagggggtctaattgagctggttaacacaagcctcccatagacaaactaaaagagcaccctagaacacacggagctgtaaatattcacccctagacactgccatgaggtcggagcccacagcctgcccatctgtatgctcccccagaggtctgagcagcggggcactgaagaagcgagccactcccccatcgcacgccctgcgagggagacaagggaacttcccgtttcaaatgcatgatgtgttcaagagcagcaatgccagtgtggcagagcagagtgaaggagggggtggggtacaccacagggtcagcaggggagctcacccaggtcagtaggggtggacctcacagggcctgtaggctatggtgaggcctctgtttttcactctgtgatggaagccactgagtggctccgagcaaaaaaggaattgaatctggcatgggctcggctgctgggacgagaacagaccacagagggacaaaagaggcaggagagttagaggtcgctgcagtaacccaggctggagatgaggatggcctggacccaagcagtgatggcagaagtggtgagaactcagatcctggctggatattgaggatgtgatgttggatgtgagactgggaggaccacagagatgctaaggtttttgccctgaacaacgggaaggttgttggttcccctgacacggagaagcctcaggtggagcaggttaagtgtgagttgccaaccaggcttccaggtggatatggtgagtagggagctatatatcaggtttaagagacagttaatgactggagagctgcatctgggagtaatccgggcagggagagtttttagagataacactgggggtgggtgcagagaaaagaggtttggagattgaactctcgacaggatatggttagaggagcccacgctcttaactgccgcaccatgctgcatctctgaagtcagtttccacatcggtaaaacggaatcaacaacagtacctatctcacattgtaggaaataaacgtgtgaagcatgtagcacaatgttcgaatagtgagcactcaatcagtgctggcgattggttatttaacaccacctgtttctgatcttggggtgccattgttcacatctctccttctgatgtctgttccatccaggatcccccttgccagccccttcttccaacgccaccaaccccccagcacatgggggcatgaacccacaccacacatcctgtctcttcttagagaagatatcttttcatacagcggatcactccagccatgcagctcccctctgctctcagggcacttatactgcactgggctaggatgcttagctgcccgattcggcacggtgctggccagggggcatgtgctcatttgctcaatgtgcatgtcctgcctgactgctctgctgggcacaggggctgcccctgggaggttccctactctgcaaacaagtggcagctgggaaaagcactccgggaggaggcaactacaggagaagcagggaagcctggagttgtaggttgggggagaagcgggcagaggggctggatctgggggcctggcaaaaaggagaaaagtgggaggttctttacttcccaaccctcatctgtcccaacaagcccctagtgcagcaggaaggctgctaaagagtccctgtctgggagacctgacctctgggcccgttctccggctttgcacgtcccagggtcttggttttccactctaaacagcggcagttggtctaagtgttttcagaaggcccttccatctacaaaggatcatgagccttgaaacccagatacccgaggaccactcccggccctgggtttcctccagcgtggggtctgcccaagcactgagatcaacccccaaccccaacccgcttgtgatgactgacggcctcccccaccaatgctgctacaaggccgagccagggggcggggcagacaggcccgaattcaccccctacttaaattcagcccaatcagcgtcgagttctgcatgtgagcggtaggggcagtggacgctgccctctgggcatgcgcaacctctcgcctaaggcctcctcccgcctcgcatgcgcaccacgccgcagagggggagaagggtagggtagacacgaaccttggtcccatcttgaaagtccgggagctctcctcggccttcctgtatcacacgtttttggatcccgtcctcccggagtcttgcgatgatatccgccatcctccttccccgctgctccctttcggcaacttccggactcgctcggtagcttccggacttgcttcggcaactcctagcacctcggcagcttccgagctagcgccattttggttgagggcagaagccaaaagggactgagcgtggaaacggatggtgattggttctctgcgctggggctgagcgcgcgcgtctgctcgggggcggagcctaggaatgtctcggggctggaccccagcctgtcaaggaggaagggccggggtccgcgggccgggcgggacgaggacgtccctaacaattgtcattgaattgattgggactgcggccgtgtggcactttgtttgaagttgtggatggaatataacagcactgcagagttaggaaaatgaaaaaaaaaaaaaacacccgtaagccacaccctcaaagtgttatgatttttgtgtattttcttccggctttttctctttcgcatatctagtatgattgtcgggactcttgcatcctggatcttcctctttcaaaaaataaaaagaggaagagggaaagaaaggtggagaaggagaccaagagagcccattgcggggtcggaaatgagtcatagttgtgcccaattaatattagggaataatcgatgaatgatagaaatgaggtactttagcgccgggcgcggtggccctgtaaccccaccactttgggaggccgaggcgagaggatcgcttgagcccaggagttcgaggctgcagtgggccgtgttcgtgccactgcactccaggctagccgacagagcgagatgctgtctcaaaacaaaacaaaaaaaaaaaattaaattaaaagaaaagagaaatgaggtactttggggctaaaacaacttttgtttttctttttttgagacggagtctcgctctgtcacccacgctggagtgcagtggcacaatttcagctcactgcaagctctgcctcccgggttcacgccattctcctgcctcagcctcccgagcagctgggactacaggcgcccgccaccatgcccggctaattttttgtatttttagtagagacagggtttcaccgtgttagccaggatggtctcaatctccggacctcgtgatccgcccacctcggcctcccaaagtgctgggattacaggcgtgagccacagcgcccagctgatatgaaacattctaaataaaatactaggctaattgaattcactaatgtcatgtaaaaatgcatcagtatggggcaggtgtggtggcttatgcctctaataccagcactttgggaggccaaggcaagtggatctcctggatctccttgagctcacaagttcaagaccagcctggacaacatggcaaaataccatcttcaccaaaaatacaaaaaattaggtggtgtggtggtgcacgcctgtggtcccagctactcagcaggctgaggctggaggattgcttgagcccaggagatggaggttgtagtgagccaagatcgcaccactgcactccagcctgggtgatagagtgagaccccatctcaaaaaaaaaaaaaaagcatcaatatgctaagtgaaataacagtaccagtcacatacaggaaaatactgtattattctacttatgtaaggtacctagagtagtcagattcacaaa

SEQ ID NO: 914261 - DNA, 4001 bp, Homo sapiens
tgtaggctatggtgaggcctctgtttttcactctgtgatggaagccactgagtggctccgagcaaaaaaggaattgaatctggcatgggctcggctgctgggacgagaacagaccacagagggacaaaagaggcaggagagttagaggtcgctgcagtaacccaggctggagatgaggatggcctggacccaagcagtgatggcagaagtggtgagaactcagatcctggctggatattgaggatgtgatgttggatgtgagactgggaggaccacagagatgctaaggtttttgccctgaacaacgggaaggttgttggttcccctgacacggagaagcctcaggtggagcaggttaagtgtgagttgccaaccaggcttccaggtggatatggtgagtagggagctatatatcaggtttaagagacagttaatgactggagagctgcatctgggagtaatccgggcagggagagtttttagagataacactgggggtgggtgcagagaaaagaggtttggagattgaactctcgacaggatatggttagaggagcccacgctcttaactgccgcaccatgctgcatctctgaagtcagtttccacatcggtaaaacggaatcaacaacagtacctatctcacattgtaggaaataaacgtgtgaagcatgtagcacaatgttcgaatagtgagcactcaatcagtgctggcgattggttatttaacaccacctgtttctgatcttggggtgccattgttcacatctctccttctgatgtctgttccatccaggatcccccttgccagccccttcttccaacgccaccaaccccccagcacatgggggcatgaacccacaccacacatcctgtctcttcttagagaagatatcttttcatacagcggatcactccagccatgcagctcccctctgctctcagggcacttatactgcactgggctaggatgcttagctgcccgattcggcacggtgctggccagggggcatgtgctcatttgctcaatgtgcatgtcctgcctgactgctctgctgggcacaggggctgcccctgggaggttccctactctgcaaacaagtggcagctgggaaaagcactccgggaggaggcaactacaggagaagcagggaagcctggagttgtaggttgggggagaagcgggcagaggggctggatctgggggcctggcaaaaaggagaaaagtgggaggttctttacttcccaaccctcatctgtcccaacaagcccctagtgcagcaggaaggctgctaaagagtccctgtctgggagacctgacctctgggcccgttctccggctttgcacgtcccagggtcttggttttccactctaaacagcggcagttggtctaagtgttttcagaaggcccttccatctacaaaggatcatgagccttgaaacccagatacccgaggaccactcccggccctgggtttcctccagcgtggggtctgcccaagcactgagatcaacccccaaccccaacccgcttgtgatgactgacggcctcccccaccaatgctgctacaaggccgagccagggggcggggcagacaggcccgaattcaccccctacttaaattcagcccaatcagcgtcgagttctgcatgtgagcggtaggggcagtggacgctgccctctgggcatgcgcaacctctcgcctaaggcctcctcccgcctcgcatgcgcaccacgccgcagagggggagaagggtagggtagacacgaaccttggtcccatcttgaaagtccgggagctctcctcggccttcctgtatcacacgtttttggatcccgtcctcccggagtcttgcgatgatatccgccatcctccttccccgctgctccctttcggcaacttccggactcgctcggtagcttccggacttgcttcggcaactcctagcacctcggcagcttccgagctagcgccattttggttgagggcagaagccaaaagggactgagcgtggaaacggatggtgattggttctctgcgctggggctgagcgcgcgcgtctgctcgggggcggagcctaggaatgtctcggggctggaccccagcctgtcaaggaggaagggccggggtccgcgggccgggcgggacgaggacgtccctaacaattgtcattgaattgattgggactgcggccgtgtggcactttgtttgaagttgtggatggaatataacagcactgcagagttaggaaaatgaaaaaaaaaaaaaacacccgtaagccacaccctcaaagtgttatgatttttgtgtattttcttccggctttttctctttcgcatatctagtatgattgtcgggactcttgcatcctggatcttcctctttcaaaaaataaaaagaggaagagggaaagaaaggtggagaaggagaccaagagagcccattgcggggtcggaaatgagtcatagttgtgcccaattaatattagggaataatcgatgaatgatagaaatgaggtactttagcgccgggcgcggtggccctgtaaccccaccactttgggaggccgaggcgagaggatcgcttgagcccaggagttcgaggctgcagtgggccgtgttcgtgccactgcactccaggctagccgacagagcgagatgctgtctcaaaacaaaacaaaaaaaaaaaattaaattaaaagaaaagagaaatgaggtactttggggctaaaacaacttttgtttttctttttttgagacggagtctcgctctgtcacccacgctggagtgcagtggcacaatttcagctcactgcaagctctgcctcccgggttcacgccattctcctgcctcagcctcccgagcagctgggactacaggcgcccgccaccatgcccggctaattttttgtatttttagtagagacagggtttcaccgtgttagccaggatggtctcaatctccggacctcgtgatccgcccacctcggcctcccaaagtgctgggattacaggcgtgagccacagcgcccagctgatatgaaacattctaaataaaatactaggctaattgaattcactaatgtcatgtaaaaatgcatcagtatggggcaggtgtggtggcttatgcctctaataccagcactttgggaggccaaggcaagtggatctcctggatctccttgagctcacaagttcaagaccagcctggacaacatggcaaaataccatcttcaccaaaaatacaaaaaattaggtggtgtggtggtgcacgcctgtggtcccagctactcagcaggctgaggctggaggattgcttgagcccaggagatggaggttgtagtgagccaagatcgcaccactgcactccagcctgggtgatagagtgagaccccatctcaaaaaaaaaaaaaaagcatcaatatgctaagtgaaataacagtaccagtcacatacaggaaaatactgtattattctacttatgtaaggtacctagagtagtcagattcacaaagacagaaagcagggccgggcgcggtggctcacacctgtaatcccagcacttttggaggccaaggcaggcagatcacctgaggtcaggagtttgagaccagcctggccaacatggagaaaccccatctctacgaaaaatacaaaaattagctgggtatggtggcacgtgcctgtaatcccagctactcgggaggctaaggcaggagaatcgcttgaacccaggaggcagaagttgcattgaaccaagatcgcgccactgcactccagcctgggcgacagagcaagactccatctcaaaaaaaaaaaaaaatgacagcagaatggtgattgccaagggctgggggcaggggggtgggaaatggagacttgttctttgatgagtgtagaatttctgttttgaaagacgaaactgttctggaaattggttgcataacagtgtgcatatacttaacgccactgagtatacacttcaaaacggttgagatggt

SEQ ID NO: 914262 - DNA, 4001 bp, Homo sapiens
gtaatcccagcactttgggaggctgaggcgggcggatcacgaggtcaggagatggagaccatcctgggtaacacagtgaaaccccgtctctactaaaaatacaaaaaaaaaaattagctgggcgtggtggtgggcgcctgtagtcccagctactagggaggctgaggcaggagaatggtgtgaacccaggagggagagcttgcagtgagccgagatcacaccactgcactccagcctgtgccacagagcaagcctctgtctcaaaaaaaaaaaaaaaaaaaaagttaaaaaaaacccctaatatttaacttatttgctatgaaattcggcaaataagctattttccccccactagactgaaagatcactgagggcagaagaccttttctgacttttcattgctatattgtcagctacagggttaggcattcaataaacatttattgggtgaattctaacttggatttaccccctggtttaagtccttgactgattacaatctgaccgtgaaggctgggcaggagaaacaggtagtgtccagattctccgtaaattccagaaagatccaaatgtggtccatcagcaggtgatggggcatagttttggttcacaccaacttaccccacactgacttgaagtatagtccatgaattcagccattgttctgaaggaagcactaagggttgggggtctctcttctctctatttgaataaatggcacgtcacaggttagctctaggattccctactggagaatgaagccattttggaaatagtctcctttttacttttggaaaggctctgcaagtttatgtcagaaagaacgatgttattgagaaagaattccaactctaaaagatagacatgcaatttatccaggatctaagagacaggcttgcaggctttcctctactatcagatgatagctgtaagattttttttttttttttttttttgagacggaggtttcgctcttgttgcccaggctggagtgcaatggcgcgatctcggctcaccgcgacctccgcctcccgggttcaagcgattctcctgcctcagcctccctagtacctgggattacagacatgcgccaccacgcccggctaattttgtatttttagtagagacgggatttctccatgttggtcaggctgctttcgaactcccgacctcaggtgatccgcccgcctcggcctcccaaagtgctgggattgcaggcatgagccaccgcgcccggctaatttttttttttttttttaagtaaccaaccagggctgaacactaccgttattctacagctacccaacaagaatctgtcaaatgtaaagcgttttgaaaggacttttccattcattgttctgatcctttccagcttccgctaagggaaggtttcctcagctgcttctgcgctgcgcacccctggctcccagcgggctaccgcggcgcgaaggactggggcggcccccggcacagcgaccctcacctctcccgggagaacgcgctgcgggccggctgccggctgtttctctaggtggggcgcctcccgggcaaggacccccatgcagcctttgggacgctccagggcatgccagtccaccgccctcctcttggccctctccagcacttctagagccagccttgctgaacgctgcagggaacgtcggtccaccccattcagcgctgcggccgccaaacagttgtccatggctccctgagtgggcacacaacgtacaaacgccggcgggtcagctgggccgcggcgaccctgctccaaatccgggtgggagccccagcctcgacctccctggagaccaccgctcctggtccgcccccaacgcacactccagcgggagcccagccaggactaggcctagcgcgcccgccccttccattttcatctaccccttccgctacttagggagccccctcacccggctcactcgtcaaggcgcatgcgcgcaacgctattctaggaagagggaccaggcctagcgctcccggcggcgccggcgcagctgggccattggcggaaggcgggagaggcgggagaggcgggagaagtgggggaggcggggcggctgggcggccaaacacgccttctgcgtcccagccttggcgtctgcgcgcgagttgcctggttaactgctgagcgctggaggcggggcgccgggcgctgggggccgggggtcgggggtcgggggccgggggtcgggggtcgggggctgggggctgaggactgagtcgagccagcagcccagggcatctgtccacgctgtcagaggagcctctgggcgtggggctggcccttagagggctactgcgctgcttaacttggtgggtataaaggcaggtctcctgttgagctaaaaaattatggggtaccagctaggtaggcaacatagcgagaacccgtgtagacacacacacacacacacacacacacactagccaggagtggttatggggtaccagctaggtaggcaacatagcgacaacccgtgtccacacacacacacacacactagccaggagtggttatggggtaccagctaggtaggcaacatagcgacaacccgtgtccacacacacacacagtaggaggagtggtggcgcgcatctgtagtcccaggtactcgggagggtcgaggtgggaggatcgcttgaacccgggaagcggaggttgcagtgagacgagatcgcgccactgcactccagcctgggcgacagaggaagacttcgtctcaaaacaaaaacatcatggggaataaggcaagtgcctcccgcgcctctttctgcttggtctacattttggggtgtcgctactcttgtttgaggaggtgattaggccaaactgtgtggctgccaaggtggcctttggagaagggaacagctcgggattgaggcgagacggaggcggggctgtctgcagatgttcctggcccccggggcagggggcgcctgagaagttgtagggtctctcataatccctcagcgcagctctctctcccctccagtgggaagtacggattcacatatttttggagacctgttctcttggggtctgactccatcttttaggaagactgcaccatgtttaagtaaggaactgtgaatgcttacttaaaccatgtttaagtaaggacctgtcactccactccgctggttatttggtaggagatacagcccaggctctcactgctaattagtgactcagccgcaccacccagcgcaaagcaaagcgccgatgcttaggaaggtccactttgagggacacgctcagtgggggtcactttaaggaacacaaataaatcctcctttaagtctcctctgtggttcatgaaaaaggagagaaactccatcctcacctagtctcaacagatggcttgatgagcaattatcaggtaccaggtgagtagtagccgaccaatacgacctccttctatgctacttaacttttgcaaatttcctgctttccccttataaaaaagaataacagtgagtgaaaccctacattattcttgagatgatttttttttcattttattggtattccaaaacatttccttcaataagggtttatcaagtgcctcctttagaacatagtggttgtacgtgcatggggtcctgtatatccactcgggagagctggtttgaattctggctctgccatctttttttttccatttcttctccttctccttctccttctccttcttcctcctcctcctccttcctcttcctcttcttcctcttcttccttcttccttcttcttcttttttgtttaataaagaaacgagggtatcaccctgtcagccaggctgaagtgcagtggcacgatctcggctcactgcagcctcgacctcctgggctcaagcgatcctcttcttcagccaccacgccctgcaaattttttaaatgtttcgtagagacagggtctccctatgttgcccaggctctctgccacttttttgctctgtggttctgggcaaacatattactt

SEQ ID NO: 914263 - DNA, 4001 bp, Homo sapiens
tgggtgctcgctgtgggtgcccacaggctccgggaacagagtggggaggaacggggctgacatatcacagggagtgaatggctggccgagccgctgcccccaacctcacagcagggaccgtccctgggcagggactccctgctcgttcacaccctggcctatcaagtgggttggattccagggaaacggaggctctgcccgttctctcattcttcctgcctcagtttcctcatctacaccatgggccttctaagagcatcctcccagcatggcatggtctgggggcccaatgacctgggtttaaactgcagcaaccacatgtgtgagtggggagaccttgggcaggttgcttgacctctttgtattcacgtttcccatctgtaaaattgggcactgcctgtggcacccataccactgtcgggagaattcaagcactgggaccccgggaagtgctcagtatccatggaggacggatgtaccagaggagggctcagggaggagacccctggggcaggggcctgaaggggccttgatccaaggtgggtgttggggagacaaggacatcaccctgagacccaactgaggacagggatgtggtgacagagggactgaacatggtgggtagagggcctgggggacccccatcagggcagccagaaggcggggatcactaggccaacttcaggggacccacaggcccaataccgcagggtctccgattctgatctcctgcagtgtagcttcattaaacaaacatgatgagaggctgtgattttgaactgagctcctgtactaggccccaacagaccagaccaaaccaaaatggaggcactcatgccaaatgccacatcatcaaaccgaagctttaaggaagcagacagagcccaaaaccacagaccagtttctccgggaagcaggagattccagtccacctgagccggcatcatcaggtcccctctgccttaccccttagaaaaaagcagtccgcttagaaaaaagcagtctgcagcgatccggtattaggcggtttggtgtttcctatttttctgtttcctcctttctgccttatgaaccccctgctctgccactgcctggtgggagctctcactccattttgtagaatggaggctgtccggattcacgaatcatgaatagaagccaatttgatctataactaaatgtgttgtcattttgtcttttgatggccttaagctggattttcatgaggcctcccaaagctcagcagcccctcccttggggagccagggaccagcgtatcccctcattggtggctcgggccaacccagccccgggtcacaaagaggctgaacagcctcggctccctgatggggcacagttcccgggatgagaagtgcctcctgcaggcggggcggggctggctggccactcctttcttggaccctgacaaagtccattgctaagaatgattctttcccagagtcattcatggccacatccctgcatcagcactgggcatgcaggctggtgcccaggaaacggctgttgctggaagggatacttgacccctgtggggaaggggcgcacagtccttcctggggcagctggacccagagctgttcccttggttcccttggagggtgtccgggaatcccaggaaaaggaggcggtggcaacccagctcggacaacggaagggtgcctgctggccaggggggtgcccgggacctcgctgccactccccagatctgcctctcctccttccgctttctcccccagcaggcaggcagatgagctcagccaggacacagtggcctctgagtgcagctgccggtggctaggcccgcctgggctgcctgtaacccggagttgctgagctggactctggcccgactgctggcccactacagccccagcctccccgggatactctacctgaggctctgccaagctgcccttcctcctggctgtcccgctctgcctggtggccctgctgttaagaaatgtccaacgcagggccagtccccgggggaggggtggggcggagttgccctagcctcgtgcctgactctggctctgggcgggctggaggctgcaagccaagatttcaccaccgcctccctcgggggcctcgacatctcctcccagaccacagagaagaagtcaacgcccagagggcgccaggctagagccacacagcagggctgagctccgagctgaggggcagcctgaggaggaggaggagaggctgtgcagcagggctgagcactgagctgagggccagcctgaggaggaggagtggggcagtgggccctgggaatcccggtgtggggtggggaactattattgtattaattatattctattataatattatgtggaatgttatggcccagaatagcaaggaagtctcgaccccccactcccagccttccctcaatgcctcccctaaggaataagaccactactactcctgctgccctcctcctaccaccttgcctggtttacaagacaggaggaaagagagaaggcaaaaagttagaaaaaaacagaagtaagagaaatagccagaagaccttggcgccaccacctggccctggtagttaaaaaaaagtgataataatatcaacccctgacctaaactacttgtgttatctgtaaattccagacattgtatgagaaagcactgcaaaactttctgttctgttagctgacgcatgcagcccccggtcacgttccccgagcttgctcgatttatcacgaccctttcacgtggaccccttaaagttgtaagcctttaaaaaggccaagaatgtctttttcagggagctcggctcttgacgcaagtctgctgatgctcccagctgaataaacctcttccttctttaatccagtgtctgaggtgttttgtctgtggcttgtcttgctacaccctacccaagactcagtttccccttctgcaaaacaaagaggtcagacccaaaggtggctggagtctagaaataccatcttagggaccatacctcatgcctgctcctctcccagcgccctgtgcttccgtgttcctccacaccaccccatgggccgccccattcatagagcctgtctttctgcagatctaacattttacaaacgaggaagtgggggcagagagggggtgggatgtgaacatggggcgtgtgtgtggcagagcttcttgctccagagctggggctgcacccgtttcggatgtcccctctgcctcccaggaggagtgcctgcctctctgcttaggaccgtggtcatgatgccacgtgtcgccttggtggttcctgtagtcccgatcttcctcaagttcggcacaggcagctgtgcctaagcctgtccctgcctgcccccagcccgccccggatacacctgtcagagccagcgtgctgtggggatgatgtgcaagctgctgtgggtgtggacaggcaggggacagggtgacaggtgtggaggaagagcctcctctatgccccttcctgggcctgccgctgctaccatctccctggtgccctgggcctccgtagctcccggccccggggcctctgggccaacgtggcacctgggaggtgctcatcatggccccccccacccgccagctccctgcctacctgggagggcggtgaggtcttctggaccatgcccacaccggtggcccgtgattagatagttagggtgggggtgaaggactgcagagcccctgtcctctgtgtgggatggagcccccagccactgccagtcacgtggctcagcatgtgacagcccagccctgccattctctggagctcagccagattgagcgggtgccaggcagggctgggcaggggctgagcctgtaggtctcagctgggagtgaggcccagagagggcagccactggtctaaggccacacagcaaatcagggacccatcttggcgggtactggcaggtgggaggggtgtttcaggatcccgagggtcccctccctggccagggagctgttgaagaatttcccccaac

SEQ ID NO: 914264 - DNA, 4001 bp, Homo sapiens
aggcaggcagatgagctcagccaggacacagtggcctctgagtgcagctgccggtggctaggcccgcctgggctgcctgtaacccggagttgctgagctggactctggcccgactgctggcccactacagccccagcctccccgggatactctacctgaggctctgccaagctgcccttcctcctggctgtcccgctctgcctggtggccctgctgttaagaaatgtccaacgcagggccagtccccgggggaggggtggggcggagttgccctagcctcgtgcctgactctggctctgggcgggctggaggctgcaagccaagatttcaccaccgcctccctcgggggcctcgacatctcctcccagaccacagagaagaagtcaacgcccagagggcgccaggctagagccacacagcagggctgagctccgagctgaggggcagcctgaggaggaggaggagaggctgtgcagcagggctgagcactgagctgagggccagcctgaggaggaggagtggggcagtgggccctgggaatcccggtgtggggtggggaactattattgtattaattatattctattataatattatgtggaatgttatggcccagaatagcaaggaagtctcgaccccccactcccagccttccctcaatgcctcccctaaggaataagaccactactactcctgctgccctcctcctaccaccttgcctggtttacaagacaggaggaaagagagaaggcaaaaagttagaaaaaaacagaagtaagagaaatagccagaagaccttggcgccaccacctggccctggtagttaaaaaaaagtgataataatatcaacccctgacctaaactacttgtgttatctgtaaattccagacattgtatgagaaagcactgcaaaactttctgttctgttagctgacgcatgcagcccccggtcacgttccccgagcttgctcgatttatcacgaccctttcacgtggaccccttaaagttgtaagcctttaaaaaggccaagaatgtctttttcagggagctcggctcttgacgcaagtctgctgatgctcccagctgaataaacctcttccttctttaatccagtgtctgaggtgttttgtctgtggcttgtcttgctacaccctacccaagactcagtttccccttctgcaaaacaaagaggtcagacccaaaggtggctggagtctagaaataccatcttagggaccatacctcatgcctgctcctctcccagcgccctgtgcttccgtgttcctccacaccaccccatgggccgccccattcatagagcctgtctttctgcagatctaacattttacaaacgaggaagtgggggcagagagggggtgggatgtgaacatggggcgtgtgtgtggcagagcttcttgctccagagctggggctgcacccgtttcggatgtcccctctgcctcccaggaggagtgcctgcctctctgcttaggaccgtggtcatgatgccacgtgtcgccttggtggttcctgtagtcccgatcttcctcaagttcggcacaggcagctgtgcctaagcctgtccctgcctgcccccagcccgccccggatacacctgtcagagccagcgtgctgtggggatgatgtgcaagctgctgtgggtgtggacaggcaggggacagggtgacaggtgtggaggaagagcctcctctatgccccttcctgggcctgccgctgctaccatctccctggtgccctgggcctccgtagctcccggccccggggcctctgggccaacgtggcacctgggaggtgctcatcatggccccccccacccgccagctccctgcctacctgggagggcggtgaggtcttctggaccatgcccacaccggtggcccgtgattagatagttagggtgggggtgaaggactgcagagcccctgtcctctgtgtgggatggagcccccagccactgccagtcacgtggctcagcatgtgacagcccagccctgccattctctggagctcagccagattgagcgggtgccaggcagggctgggcaggggctgagcctgtaggtctcagctgggagtgaggcccagagagggcagccactggtctaaggccacacagcaaatcagggacccatcttggcgggtactggcaggtgggaggggtgtttcaggatcccgagggtcccctccctggccagggagctgttgaagaatttcccccaactcacaggggccgaacttgtcatgaatgcaggagcaacctgggaggaggcccccgaagaggcctgtcctcccgggacagaactcctagccttccctgggagtgaggctccccccaagggaggccacacacctcccaggagggctgggccctccccactctgggttgggtgcccctcactactcctcaaagctccagaggctcagtagggcctgggagtcccatctttgttgaggagcccagggtaaatggggagccctctgggtagggcaccaggaggactcacttttggagccagctctggggtgaggtctgccaaggcccaggccagccagggggagtgggtggaggggttgctcagggctccgggccagacagctgcggccccgcctgccctgcctcctccttgctgggctgacgcttcgcctctttgggcctcagtgttcccatgtgagaatggggctgactacagtcccgggggcatctgtgggtgaatgagagggttcggcaggcatggatctcagcacctggcatggagggcgttaagtgtgaggtctgggctcaaatcctggtcctgtcacttacctgtgtgacctaggttagtgtcttaaccccccgtgcctctgccttcccatctgtaaaatgggacataagtgattgtgaggctgaaacaagttattccatgcacgtgggcccggaactgtgaccattccaagtgcccggccccctctggaagggtctgagagctaccttccagactctaggacaggagtgtgggcagggcatgagcatggcatcaggtggaatcattcatccattcataattcattcattcattccctcacttctcagaaacacgcccctgagcctggctcacagggcctcagacctgcccaagagcatctcactgcctcatctgcccacgagtgaccttgaaaagaaacgtcccctcactgggcctcagtttccccagctgtaaaatgggggctgactctgcctgcctcacatggctactgcgagggtgaaacgagagccgacctgaaggcaccgacagggcacctggttctcagtaggcgctcagagcatgtgaatgtcctcctgcccctctccttgccctcctgaggaagtggctgccccaggccttggccctgaggccctggccctgcctcccaccccctccctggcagtcttgaaggctggacccaccctggctccttgaagaggcaaagttagaggctgtaggggcccagggcccaggacacagtcagaactcacgggcaacggtgaatgcgggtcacttgttcatttacgcactcaacaaacctttactgagcacctactgtgtgcagacacttcacacaattttcacaattcccagacattattgaccatgctttccagctgggccacacagtgacaaggactcatggggatccacaaccagcctggcctggctccccggcccacggtgcttccaaggtgcctggagccctcgcacaggaatgggctggagtcttcagctctgggtgagccctttgccaccaactctcaggagcctcaagtctcagtggaaagcagcagccacctgggcatttgctgtgccaggcactgggcagagcctttggcacaccccaacctggggacctcccaccatcctgtgagccagactcagtgatcatcatccccattggctttaatgtttaaaatattgtggaatcacatccatgccagggaagtggtgtgaagggaatcacgtgggct

SEQ ID NO: 914265 - DNA, 4001 bp, Homo sapiens
aggctggagtgcaactggcatgatctcggctcactgcaacctctgcctcccaggttcaaatgattctcctgcctcagcctcccgagtagctggtattataggcatgcgcccccatgcccagctaatttttataatttttagtagggacaggatttcaccatgttggccaggctggtttcaaactcctgtcctcaagtgatgcacctgcctcagcctcctaaagtgctgggattacaggcatgagtcaccacgcctggccacaaaatgaactttctttctttcttttcttttcttttcttttctttttttttttttttgagacggagtctcactctgttgcccaggctggagtgcagtggtgcgatctcagctcactgcaaactccgcctcccgggttcacgtcattctcctgcctcagcctcccgagtagctgggactacaggtgcccgccaccacacccagcttattttttgtgtttttagtagagacggggtttcaccgtgctagccaggatggtctcgatctcctgacatcgtgatccgcccgcctcggcctcccaaagtgctgggattacaggcaaaataaactttataaattaactgagacccgtctcagattttctgggtttacactggggacctctggctgctcaccaggcagttcctgactggacctgggtcccataggtgaccaccccagacttggccagcccccatggagctcacagtctacacacggaacaatgacaccggaaacaatatcattacaaacatgatcggtgggccagggcttcttccagaggtggccagagacccacccctggctctgactgctgcggggaagccgtaggggagggcctcttggagggcaggtgatctggacagagggaccaacgtgtgcaaaagccctgtgggggcagatgctgagaaataagacacacaggaaggtggaggcctgatgggacctgtcatatggagaggggactcattcccttggcagtggccatgcctggtgcagggcccagaaagaagtcagagctggcatctggggccaggtagctggcatgcacatctcatctgagcctcacagctattattattacccagttggaaggacagggaaaccgaggctcccagagacgacttgatttgccctcctcacagcctcagtgcgaggagggaggccccccagcccctctcctcacaccagccttgtgacaccatgtgccaatgtgtgcctcgtgcctttcactgtcttctcaacatcttcctgcagcttccagactttctaaatgcgaatgtagtatttctagaaccagaaacaagcaatgcatgttgcttttaacatctgaaaccaaagatccgactttcgcttcaactgccaagaatctctctgcttccaatccccgattctccggcacctcctgatcacagccctggtgcccccgacccaatccttgtctgtccacagagctgccttctcctctaacctgggagctcctcaaagggaggacggggtctgtccccatccctggggctcctggggaacaggcttcatttctgtggctgcttcccaggagcctgccaaagggcaaagtgaggctcagaagacaccagcacccacctccctctcctgagcaagccccgtacccatggcccctgcagccataggccccttggtgggcttgccccctgacccacgggccatgggcacacatccccttccctccatgcccctggttcccaccagtgtcctttaccctgagctccctctgcccgcccctcacccctgtggccccacataacccagcgtgggctctgcccctgggtccttcgctgcacctccactccctttcttggacatgctgcctccagatgcgcaggctctgctcctacccccaggcctcagccctgctctgctgactgcgatcctcccaggagactggcagctcccaaaccaactcccgtgcccacgcctggcaatggggtaatcaatggggtgatgctcagtgttacccaacaggcgtggggcagggctgcacctcccaattcccatgcctacccttgtctcactgccaggacctatagctgctcggtgtctgccctgttcttccagggccctgcccccagggaccacactgcacagccggcttgggaacaggttagacaagtcaaggctgtctgaggctttgctctgtgtttcctggaatgggctagcagggagttacctgatcaggaaaaaagaaccccaggggaaggtcacaggatgaaaatatcagcaggatcctggtggcaaatgctgccttcgccaggaagtcctcccaggccccagccacagtggtcccatgccccccatggcccctcctagggtctctatgctaaatcttcatctccctcctctcctgtcctcactcttcaggcttcacaggtcaagatgagcaactgtggctctatttccactctcagtgtgcccagctggcatactcagggcagaggaaggggctcagatctttgcagagagacccttgatgggcgacggcacctgtagctctaggatggcgcattgttcattggtttatttatttactgtgcaaccgtgggtaggttacttaacgtctctgagcctttcggaagtaacaataacacctaattgccatggttcttgagagggtcacagagggagacgtgagaatggaaaaggcagatcacagctcctggcacaaaatcagtgcccctcaatgttgcccgctaatgtttccacaagtatttgctgagcaccttctaggttccagggagcagaatgagctcaggtcctgccactgtccttcatggatggcctgactctgtccccaccccaccttcccccaagcctgagaccaaggacacgccctgctgagggctgtagagagtctcttggcagagtgtgcagccctgtgggcaggagggacatctgagataacccttggttgtgactggagacagcccagcggaggccacagcctgagaccaagccctggccctggaatcttcggtagctaaagatgtaaatgccaatgtgacaccaggaagggacctcgggatggggaagggaatacagggcagaatgctaaggcccatctaagagcagcagatgggttatggccactggggaggcccactgcctccaaaccactgaattgtacactgtaaatgggtgagttgtatgggatgtgaatgctatctcaataagctgttttgttttgttttgttaaactgaactgacaagaagcctgaatagacgtaaataaattaaaatatgctcaacctcagtagcaattgttaaaatgtaaaataggtcgggtgcggtggctcatgcctgtaatcccagcactttgggaggccgaagctggtggatcacttgaggttaggagttccagaacagcctggccaacatggtgaaaccctgtctctactaaaaatacaaaaaattagccaggcgtggtggcatgtgcctgtaatcccagctactcgggaggctgaggcaggagaattgctggaacctaggaagcagaggttgcagtgagctgagagcacaccattgcactccagcctgggcaacaagagaaaaatgaaattatatcaggcatgttcttagaccacggtggaataaaactggaaatcaactccaaaaagaaccttcaaaaccatgcaaataactggaaattaaataacctgctcttgaatgagcattgggtcaaaaacaaaatcaagatggaaattaaaaaattcttcaaactgaatgacaacagtgacacaacctatcaaaacctctgggatacagctaaggctgtgctaagaggaaagttcatagccctaaatgcctacatcaaaaagtctgaaagagcacagacaatctaagatcacacctcaaggaacagaggaacgagaacaatccaaacccaaaccaagcagaagaaaggaaataaccaagattagagcagaactaaatgaaattgaaacaga

SEQ ID NO: 914266 - DNA, 4001 bp, Homo sapiens
tccagcacttcgggaggctgaggtggacggatcacttgaggtcaggagttcaagaccagcctgaccaacatgatgaaaccccgtctctactaaaaatacaaaaaaaattagccatgcattgtggcgtgcacctgtaatcccagttacttgggaggctgaggcaggagaattacttaaatctgggaggtggaggttgcagtgagctgagatctcaccgtagcactccagcctgggtgaaagagcgagactccatctcaaaagaaaaaaaaaagaaaaaaaacaaagccaggcacagtggctcatgcctgtaatcccagcagtttgggaggtggaagtgggaagatcactaggtcaggagatcaagaccatcctagctaacacagtgaaaccctgtctctactaaaaatacaaaaaattagctgggcatggtagcaggcacctgtagtcccagctacttgggaagctgaggcaggagaatggcgtgaaaaaaaaaaaagtaagaacctttaagttacatttcagaaggcacaccattcccatcaaaccaaattaataagagcctatatgaccaatcaaatcttgctgcattttgtgcgaaaaaatcaggccaagtataataagcctaaaacttattttgcacataaattggtcttactataatttctctctggtacaaaaggagggctagaaagagaaattctttcaaaggaaaattataacacttattactagattccagccctgacttttgtttttgagtgcagattgaatcatgaattatctcttggctacaataagcctctaaagaaccagattagaggccaggcatggtgtctcatgcctgtaatcccagcactctgggaggccgaggtgggtgggtcacgaggtcaggagtttgagaccagcctgaccaacatgatgaaaccccatctctactaaagatacaaaaattagccgggcgtggtgatgcgcacctgtaatcccagctactcaggaggctgaggcaggagaatcacttgaaccagggaggtggagcttgcagtaagccgagattgcactaccacactccagcctgggtgacagagtgagactccatctcaagaaaaaagagtaccagattataatttttcttcatattttcagttggtgccctgatggaatagattcctttgtctgttctgacacacaaatactcttaattgtcaaattattatcattatgattgagacagagtatctatcacccaggctggagtgcagtggcaagatcttggctcactgccacctctgcctcctgggctcaagaaatcctccagcctcggcctcctgagtagctgggactacaggcacacaccaccaggctctgctaatttttgtatattttttagagacagggttttgccatgttgccaaggctggtctcaaactcctgggctcaagtgatccacctgcctcggcttcccaaagttctaggattacagatgtgagccaccgcacctggccaattgtcaaattgttaatgttatttatctctccttgttttacctccaaggaaagcagaatcatggcattctgaagactagagatgctaacctctctcatttggcaccccactgggcccaatttgctttttactgcaaatgccctgctgttgaaactatacaagcaccctccctctgggcccagggactgttgtggaagaggtgggcacgtgacattgtaagggcagggtttgagggatattgttagctcagatcctccaaatcaaggatgggtacacaaatgcctaaacagctgggcaaaggacaaagggacttttgacttctgagccaatgtgtggcactgtattagtctgttctcacactgctaataaagacatacctgagactgggtaatttataaaggaaagaggtttaattgactcacagtttagcatggctagggaggtctcaggaaacttacagttatggtggaaggggaagcaaccacatccttcttcacatggtggcaggaaggggaaaaatgagagctgagcagagggaagccccttatcaaaccatcagaacttgtgagaacttactcactatcacgagattagcatggggcaaactgcccccataattctattacctcccaccaggtcactcccaccacacatggggattatgggaaccacagttcaagatgagatttgggtggggacacagccaaaccatacaggcacttttttatccattcccaaccacaaagaattttctgcttcctgtagaattaaaagacaatttttacggagaggatacaaagatcctcctagacaaagcctcctgggcataatactcctagttaggagatttatgcagatagatatatatttttaaaagttttaccagccatcttagaacaaattactagaaggccacaaaaagcactgcagcaccacaaaagtatctaaattccttagcttaaaaggttatagtaatgcttatgttttgctataagttaattgctataagtctataactaaaaccaagattacagtagctcaacacatagaaattaaagatagataaagttattgcgggatctggccagcagcccgcaatgcaatggggctctctctttgttcccaggcagattggcaggtcgaaaaataataaacacacacaagatagtgaaagctgggtccgggggggtcactgccttctggtcctgcagtgccaacaatgcactggatataccagcatttattattaagtttagtgagggcgggggtaggttagtgcgggatttagggtcatttgattatgaggtgagatggtcacatggggatgaagtaattctttaacataacatctgtatgcagaagtacagtatacagggataagaatttataatatagcgtgtgcatcagtaatttctaacagagcctaaaaacagaaacacaggctttccataacctatgattagcaagatattaatcagcggtaacagttgcagcaaaagctggttacaaacaatctgtagaaacaggacgtgaagctagacaaccggttagaccagaaattctcagaagggagtgtgccttaaccctaaagaggcctagaagagccatggcaagatgagggcatttttagccctatcttatccatatggacaggggcccctcatgtgtccatttataggctctctacaagggtcgcattccattcccagagctatgaacatctgcttttctgggataggaatcttggtgatgtgaaacctccctgactgcatatccattcataggctctctgccgggggaagcacatcacgcgctgttggctcattctggcagtccaacctggcattgtctttacacaatcctgcatgcaactttgtgtttacaataatcaggagcatttcatcttttattctgtagcaatagtttcaaggggtctccttacataaagtcaattttataacctcacctttggcttttattttattttattttatttttttattttttaaaaccagaacatttattgcatgactaattgttgacattcttaagatgaactggatgctgcaacagctgccctcttgggtttaggtgttgttccttcacggaatccatgcctgaatctgtgttatacaatttttaggtgcctcattcgaccagttctggtggtttttcatcttttagccttggcactccagttatactttctcttgcgcttggcagagtagccacatttgccacaggtcgacttctgaaggtggtaggcctcagagccacagcagcggcacaacgtgtgtgtcttattgcgatgctttccaaacgatgatgctcccttcgtcatctcgcttctgcggccgagaccagaaagtggctttttgtttgtacacaaaaattttccaggcacggtggtgcacacctatggtcccaggtacttgggaggctgaagtgggaggatttcttgagcccgggaggcagaagttgcagtgagccgagatcat

SEQ ID NO: 914267 - DNA, 4001 bp, Homo sapiens
agggagagagatgatggaacagctggttgatagagcagtcagaacacacagcatttattaagttcaccatagtgttgccccaaagcaatcagaatagtagtatcaaagatcactgattacagatcataacaaatataatagcaatgaaaaagtgtgaaatatttcaagatttaccaaaatgtaacacagacacaaaatgagcacatgatgttagaaaaatggcattgatagagttgctcaatggagagttaccgcagccttcaatttgtaaaaaaaatgaaaatgcagtatctgtgaagtgcaataaagcaaagtacaaaaaatgaggtattcctgtacatgtgctgccaaagtgagcgctatatacattcttaacctggaccaagagcagtattcaaaataacaactctggccaggcacggtggctcatgcctgtaatcccaacattatgggaggccgaggcaggtggatcacttgaggtcaggagatttgagatcagccctccgccatcatggtgaaaccccatctctactaaaaatacaaaaattagcctggcgcggtggtgcaagcctgtaatcccagctactccggaggctgaggcaggagaatcgtttgaacccgggaggcagaggttgcagtaagctgagatcgtgccactgtactccagcctgggtgacagagtgggacgagactgtctcaaaaaaaaaaaaaataacaaacaaaaaaaacaactctgaggatacatttctagcctgaggcaactaaagcaagaaataatcttatgcacagacctacagttaatcattttactgaatctacatatacattccacttacatgattacatatacgcatcagtatggacttacattctatacatatgactctcccatattcaacaagagatcaccaagagcctgaatcaaaggataccaataaaacaaaccctaaactaggaagtgggagggaaaggagaaaagggatgagggagaaaaagaaaaaagaggaaggatgaagggaaggcggaagccaatattaataaatactgagtacctactgtatacacaccaccatttcatggttgcttcttggtttccacgctttcagtcttggccctacatccattttttacacagcagtctaactgtggtcttcgaaaccctgtgttatctgtccccagtgcaccccatgctgtgccactcctctccctcaatgctctgcagccacaaggggcactttctgttcctagaatgctctgacttctttcctgccacagggcctttgaacttactctttcctatgcctgaactgctttccacatcacttattctttttcattttttgaatttcaactcaaacatcaccttctaaaggaatagcgcacagccacttagtaaccctctatttcctttatcacaatctgaaaagttcctgtttgtctagctccacccaccaacttcgagggcaaggaccagcaatgtcttgctcaccaccgcatctcccgggagttagaacggtacctggcacctcaggcatctgataatactggctgaatggctgttggaggcagaggttcttaactgcctattaaggatgaggaccctgaggttcagaaacgttaaagtgatttgttccaaatcagacagcgccaggtctgaacctagccagctggggctaagtcaagtaacaactggcgaaacagaaagcttagcaaaggcaggatagcgacaaacacgacctaaagttttctcttcatacccagggatatccacacctttctctcccgccctgaccgaccgcggggcctccccgcccagcccctggccgtgcgagtcccttactatgtggggatgagaaggcatttgagaagagtcaccccgagcgccaaagccgaaaaccaattgccagtacccgtggcaattgtgagcgccgccattgctgcggcaccgcacgcttcccaccaacttgatccacatccgggatcccgcgcatgcggagaaagccctctgaagccgtgcccgctagctgcgcgcatgcggcgagcggcgcagccagtccggggactgcagtcagctatttaaacctcccgcccaccttttctttagacccgcgtctcaccccgggccggaagggctcctgcgcaggcgtttgtagccacttttaagttttatcagctagttcatgcttgcgttgaaagagtggtcgtttgcgctgggtcatcactgtgtagtattggggatacttaggtgagaaaaaaacttaacgctagagacgttcacgcactagtggagaagccaggattgttgccctagagttacagtagataaaagtacctcagagaactgcgggggctcccaacctggacgcttgcaccggagtattaaatccagctagagaatggcatgtgcaaagatacagaggtgagaaacattgtgtttttagaactctgagcgaggctcttggctcacctcctgcttgagcggaacccattctggaagcagggtagaggctagtcctaacgcttagtgtacaaatagcctacggttcatgttaaaataattcggattctgattcagtaggcccaacaaactcgcagattgcgtaatgactgaggcacatgcaatttaattaggcttgtctcattattttactgtatgatcttggacaaactaaactctaaacctcagtttctttttttaaaatttttatttatttatttatttttgaaaataggagataaaaatggtttctggccggacgcggtggctcacgcctgtaatcccaacactgggaggccgaggtgggcgaatcacctgagttcaggagtttgagatcagcctggccaatatggtgaaaccctgtctctactaaaaattaaaaaaaaattagccgtgcatggtggcgggcgcttgtaattccacctactcgggaggctgaagctagagaatcgcgtgaacgtgggaggcggaggttgcagtgagctgagatcgcgccattgcacttcagcctgggcaagcctcaggcctgtttatccaagatgcttttggtctaaaaaaaaaaaagtttcagcctcataaactggttgtgaggattaaatgagaatgcatgtaaattgcttgatatgattccaggacagaataaatgctcaataatgtgtcagatcagttaattatcttgctgaaagatgcacagcaagtaggtgacagtgtcacctccctaatatgagtttatgccctcccacagcttcagctgccacccatgtgaatatgattcacagatttctagctcagcactcttctctcactttcagaccctggtctccagttggctacctgacctcacgtagatgtttttgttttgtttttgagagacagggtctcattctgtggcccaggctggagggcaatagtgcaaacacagctcactgcagcctcgatctcctgggctcaagcagtcctccccacctcagcctcctgagtaactgggaccacagggatgtggcaacgtgtgtgtgtgtgtgtgtagagatgggatctccctatattgtccatgctggtttcaaactcctgggctcaagtgatcttcctgcctcagcctcccaaagtattgggattacagttgtgcgccaccatgcccagctacttagatgttttaaaggcactttgcattaattttctatttctgctgtaagaaattaccataaacttagtagcttaaaacaacacaaatttattctcttacagttctgtaaaccagaaatctaaaatcagtcactggagtaaagtcaaggtgtcatttggattggttgcttccagaggctctgcagggagattgtttttcttgtctttttcagcttttagaagttgcctgcattccttggccccttcctcacatcattccaaccaacttccatccttacaatcgattactttcctgtaatagctacagtcaaatgggcagctgaagatgatgatgatgatgatcttgacaccgagaagcaga

SEQ ID NO: 914268 - DNA, 4001 bp, Homo sapiens
tattttcatttaaaaaaaaaaagaaaattacaaattacacctttgtgtaaaccagctaaattccctacagccttcaatagcaggtaaatcatccgcttagaatacaaaagtgaaaacatgttactggccaggcccagtggctcacgcctgtaatcccaacactttggaaggcgaggtgagaggatcgcttgagcctaggagttaaataccagcctcggtgacataatgagcccccatctctgttttttgagacagagtctcgctctgttgcccaggctggagtgcaatggtgtgatctcggctcactgtaaactctgcctcccatgatcaagcatttctcctgcctcagcctcccgagtagctgggactacaggcgcccaccaccatgcccggctaatttttgtatttttagtagagtcggggtttcaccatgttggtcaggctggtctcgaatttctgacctcaggcaattcaccggcctcagcctcccaaagtgctgggattataggcctgtttttttgtttttttttttaagaaaatacagttattttactaggagtcacacttgtatattatttgtctctcgattggtaataacacctatgctgcaaaatcaagaacaaaaagagaaaactaaagaaatcacctactggctcccagtagttgaatgtttcatcacagtcagagatgttgctcaggagagcagcacataaccttgctgaaagcagacacttgaaagcagtagatccttcaggtgcccagacttgtcctgctttgttcccagataacctgttcaaaagcaaaaaaaaaaaaaaaaaaaaaagcatgtcaggaaggacctgctaatcagaagacctaaatctagatagaaaggacaaaaagggcaagggacatcaaagcacttaagttattcacctaaaaaggtgaatagctagttgttttttctcagtaaaattaataaaaattcagatttttaagaaaaaatttttatgagatagggtcttgctatgttgcccaggctggacttaaactcctaggctcaagtaatcctcctgcctcagccttctgaagaattgactttaatcactcaatcactccttccacttcctgcttttaaggcataaattaactcatacactttagctcaatgcatttatgtcactccatttatcccaagccaactaatcactcacttgaaggccacaaagctgtcattctccttttctttcttttcttaacaaggtcattgcttttgatggctttattcattcccccttatgttcagatagaagcctaggtgcaaggtacatagcctactccaattccatatgttgacagctcccttaatgcagttctaacctgcagcctccagggtttgggaagaggtgatggcgggttggatgggcccagtaaagggtcgggacttgagggagaataaaaggagctgtgaggaacagccgtaaaaggtatactctttgatcctgtctacatctcccacagaggctgtgcccactctaggcctggcccaggagcatcacagatccgcactccaaggcagttttacagcgcagtggagggatctaaggtgggcgaagactgaatgctgacccgcccaggaagaccaataggacctagctgaagagggagctcgggcctcccgcggtgaggccaggccggactgagccccgcgcgccacagctaagaccctcccgggggcagccccgaaccgccccgccggccggccacgcccctgccgcgccgcacacgtactcggtccggtgctccgcgccgcccgcctctcggctgcccagcagctcccgcagcttgtccgcagccggggccgtatccccactgctggccccgctgcccttcaggcgctgccgagcccctcgactagccatggcaagcctggggaaaaaagaattcggcaccctatgaagtcggtgagcgcgcagacatagctttggctggcaaacggtgtccgccgagggacaaaagaccttgacatgcgcagaaaatactaaattatagcgttactgggccaattggggcagatccccgagtagcgaagaaatagaacctgaggagtttcttcatcagggctgtcccatccacctgcttctaactctagccattcctacctccctccaaccctcttttccgtcacttttcagcattctccattctcaaaaaaaaaaaaaaccacctctcagctcccctatttaaatgaaaaaacaaatagaaagtgattaaagaaatctacatagtgagatgtgaagtattcagttaaatatcacagcacagctatctactaaaaggtccttaaaatgtcatttttaacaccttgccttctctgtattttggtaagagtgacagaggcagcctgtagctaaaaactgcttcagagagacaaaccggtaatggcagagtgtagactgatgaaattctgtgcggcaaattgaaccagatgtccatcactgtcatcgctactacggcattgtggtaggcattttacatattttatcctttttaaacttaatacaacaaccttgttttatttaccaggaaactaaataaacttggagctagtaaatggtggagctatgttccagcccaggactatcttaccggaaagcccatgctctctcttcccaccagatctggtgaaaggtcttcatttcctacaatcatttttatactggcacattgatgatatcatacctgtgacccccatatcttgggggtcattcatctaatcctgacactctatccactcctctaatcacagagctatatcctaccctgtcgagctccatgccagtaactgggacaagtttatagagggaatgctaatctcttgacaaggtctcagaaggttgtgatttcctactaaaaattcccaagtattgaaaatggagattgatcatattgctcaattctcacatgcagtcattagttaccaagttcaaatatccagcttaactctttttttcttttctttttcttctttttttttttttttttttgagacaagagtcttccttgctcacccaggctagagtgcagtggcacaatctcagcttactgcaacctctgccccctaggttcaagagattgtcttgcctcagcctccctagtagcagggactattgccaccacactggctaatttttgtatttttagtagagattaggtttcgtcatgttggccaggctggtctggaactcctggcctcaagtgatccacttacctcagcctcccagaatgctgggattataggcgtgagccactacacccagcctaactgtatctcatatacccatctcctccttttcatttaagtctaatgcaggtccctccctgtctacgtaggactaacacaatagcatctccacagggatcactcatctcaaattcatcctgtgcaacattaaccagttaattttccaaagcactactctggggcacttccttaataaaaaaccaccggatgttttcctattgcctaccaaataaagtacaaactccttattctagcatttggtattcatgaactccagccccaacttaccgttccaatcttatctcccactactttcctatgcacactttacatcccagctaactagcctagaaagtgcccccaaatgctcccttatctatatctctgtttatggatgtcctctgcccaaaatgcacaccctacttgcctaacaattctcccttcacattcctgcccttgttttaagatccagctttcaaacgctaccttatacatgtaccaagcactactgaggatagaagaaagggataaatcacattacctgccatcagttagcaaaatagtcaatgtggagagctcagcaatagatgtgtctgtaagagatcccttgattctttatcccactccccaaacttactcgtatggcagtgtttccatccaagttaatgacacttccaatcttctaggtattcaggtcaaaaacctagtagtcttgctt

SEQ ID NO: 914269 - DNA, 4001 bp, Homo sapiens
aaacaacctacacttaacagtcttccttcatttttttaattcaaaatgtgatcagaaaattttacctttgaattttctataataaaagtcaacaggtaatgtgtaaatcaataaatagcaataaaagtatactatttagtaacactattttggtaaccgtcagaagaaataacttaaaaagtgaaaaaaagtggttgcttctggaaagtaggatttggacacgagaagtggaatagaaagctactgtttttcctttaggtattttagtagttgttaactttaaaaactatctccaggtattattttcatttaaaaaaaaaaagaaaattacaaattacacctttgtgtaaaccagctaaattccctacagccttcaatagcaggtaaatcatccgcttagaatacaaaagtgaaaacatgttactggccaggcccagtggctcacgcctgtaatcccaacactttggaaggcgaggtgagaggatcgcttgagcctaggagttaaataccagcctcggtgacataatgagcccccatctctgttttttgagacagagtctcgctctgttgcccaggctggagtgcaatggtgtgatctcggctcactgtaaactctgcctcccatgatcaagcatttctcctgcctcagcctcccgagtagctgggactacaggcgcccaccaccatgcccggctaatttttgtatttttagtagagtcggggtttcaccatgttggtcaggctggtctcgaatttctgacctcaggcaattcaccggcctcagcctcccaaagtgctgggattataggcctgtttttttgtttttttttttaagaaaatacagttattttactaggagtcacacttgtatattatttgtctctcgattggtaataacacctatgctgcaaaatcaagaacaaaaagagaaaactaaagaaatcacctactggctcccagtagttgaatgtttcatcacagtcagagatgttgctcaggagagcagcacataaccttgctgaaagcagacacttgaaagcagtagatccttcaggtgcccagacttgtcctgctttgttcccagataacctgttcaaaagcaaaaaaaaaaaaaaaaaaaaaagcatgtcaggaaggacctgctaatcagaagacctaaatctagatagaaaggacaaaaagggcaagggacatcaaagcacttaagttattcacctaaaaaggtgaatagctagttgttttttctcagtaaaattaataaaaattcagatttttaagaaaaaatttttatgagatagggtcttgctatgttgcccaggctggacttaaactcctaggctcaagtaatcctcctgcctcagccttctgaagaattgactttaatcactcaatcactccttccacttcctgcttttaaggcataaattaactcatacactttagctcaatgcatttatgtcactccatttatcccaagccaactaatcactcacttgaaggccacaaagctgtcattctccttttctttcttttcttaacaaggtcattgcttttgatggctttattcattcccccttatgttcagatagaagcctaggtgcaaggtacatagcctactccaattccatatgttgacagctcccttaatgcagttctaacctgcagcctccagggtttgggaagaggtgatggcgggttggatgggcccagtaaagggtcgggacttgagggagaataaaaggagctgtgaggaacagccgtaaaaggtatactctttgatcctgtctacatctcccacagaggctgtgcccactctaggcctggcccaggagcatcacagatccgcactccaaggcagttttacagcgcagtggagggatctaaggtgggcgaagactgaatgctgacccgcccaggaagaccaataggacctagctgaagagggagctcgggcctcccgcggtgaggccaggccggactgagccccgcgcgccacagctaagaccctcccgggggcagccccgaaccgccccgccggccggccacgcccctgccgcgccgcacacgtactcggtccggtgctccgcgccgcccgcctctcggctgcccagcagctcccgcagcttgtccgcagccggggccgtatccccactgctggccccgctgcccttcaggcgctgccgagcccctcgactagccatggcaagcctggggaaaaaagaattcggcaccctatgaagtcggtgagcgcgcagacatagctttggctggcaaacggtgtccgccgagggacaaaagaccttgacatgcgcagaaaatactaaattatagcgttactgggccaattggggcagatccccgagtagcgaagaaatagaacctgaggagtttcttcatcagggctgtcccatccacctgcttctaactctagccattcctacctccctccaaccctcttttccgtcacttttcagcattctccattctcaaaaaaaaaaaaaaccacctctcagctcccctatttaaatgaaaaaacaaatagaaagtgattaaagaaatctacatagtgagatgtgaagtattcagttaaatatcacagcacagctatctactaaaaggtccttaaaatgtcatttttaacaccttgccttctctgtattttggtaagagtgacagaggcagcctgtagctaaaaactgcttcagagagacaaaccggtaatggcagagtgtagactgatgaaattctgtgcggcaaattgaaccagatgtccatcactgtcatcgctactacggcattgtggtaggcattttacatattttatcctttttaaacttaatacaacaaccttgttttatttaccaggaaactaaataaacttggagctagtaaatggtggagctatgttccagcccaggactatcttaccggaaagcccatgctctctcttcccaccagatctggtgaaaggtcttcatttcctacaatcatttttatactggcacattgatgatatcatacctgtgacccccatatcttgggggtcattcatctaatcctgacactctatccactcctctaatcacagagctatatcctaccctgtcgagctccatgccagtaactgggacaagtttatagagggaatgctaatctcttgacaaggtctcagaaggttgtgatttcctactaaaaattcccaagtattgaaaatggagattgatcatattgctcaattctcacatgcagtcattagttaccaagttcaaatatccagcttaactctttttttcttttctttttcttctttttttttttttttttttgagacaagagtcttccttgctcacccaggctagagtgcagtggcacaatctcagcttactgcaacctctgccccctaggttcaagagattgtcttgcctcagcctccctagtagcagggactattgccaccacactggctaatttttgtatttttagtagagattaggtttcgtcatgttggccaggctggtctggaactcctggcctcaagtgatccacttacctcagcctcccagaatgctgggattataggcgtgagccactacacccagcctaactgtatctcatatacccatctcctccttttcatttaagtctaatgcaggtccctccctgtctacgtaggactaacacaatagcatctccacagggatcactcatctcaaattcatcctgtgcaacattaaccagttaattttccaaagcactactctggggcacttccttaataaaaaaccaccggatgttttcctattgcctaccaaataaagtacaaactccttattctagcatttggtattcatgaactccagccccaacttaccgttccaatcttatctcccactactttcctatgcacactttacatcccagctaactagcctagaaagtgcccccaaatgctcccttatctatatctctgtttatggatgtcctctgcccaaaatgcacac

SEQ ID NO: 914270 - DNA, 4001 bp, Homo sapiens
aaccaaaaggatataaataaaagagaatgagagttgtccatatccacacacacacaaaatccctacagattcttgcctggctgagcaatggcctggcttttaacaggggcagcccaggctccctgaactcgggctcgccgtcttttttcctccatgttgaccaaaaaggcttctgctccgagctttcagaagattttgttcctgtttcaaactactccatggtatctgtttattaaaacaaaacaaaacagtgcttttagttaggattgtgaacaattactcctaaggcataattaatttcaggcagaagactctcaatggcaatagagcttccatgtaaaatcagtttatgtcatcacaacatttcattcaagaagcctagtcatttggggctgctggctttagcattcaccttttgtaatcttaccatagtacttttgtttctttcacaagaaagtgcattttaagaaattctaaaattaggacctattataaaccacattcctcttaatagtccccaagagtagaatataaggaaactgtactattcccattttcacctacatggacattgagaaatcggctaagactgtttccaagcatatattccattatcactggctgcatcaaacttccctggaagtttgttcaaaatacctatggcccaccttcagaaaatctgatttaggatggatacaggtatttgtctttataacaagcagtgtaagatttgacacaatgcaggtatgtatgtggacggtaaagttcaatgatgcacccaaagccactcaggaaatcaacaacagacagattaacattcaacttatattaaactcctgtctccagctaacggataaatccacctcataatggctaataatactaatttgacagttgtaccagtaaaagcttagcctacagcaaatgcagaagcacgtacagctaccaaaacaacaaggaaattcaagccacatgttccacatctgtaatctatttctttatgcttctacctaagaaagcttcacacctcaagttctcaaaggtaaaagctcgttttatattaatagcttgcttagactatagattcccaggtcccatctcccacctcttctgattcagtagagctgagccaggcccaggaatctgtgtgtttaacaagttcccccagatgataagcatgtaattcatttcatttaataggtggagagacgcagaggctgccatctgcccagaagagttaatgacaatcaaataccaattctccaatcccaggagctcccgtttgacatgttctctcaattgaggccctaaaagcgtaacacaattacctacagtccccgcagaggatacgacttgctcaccttcttgctccattcactggggagccatatgttatttgccagggaacaattgttgaaaatagattccagagccccatcccagatctactcaatttgtagagtcccagaatttgttaactaacgccaccctcaacccaggaattcttaatgcacataaagcttgagaaccagtgctgtaaaatacaaggactctggcgccagccagaactcgctttgaatccagatctgtcacttcccagctgcatggcccatggcaaatgacttcacctttctgagccccagtttttcctcagtaaacagggcagtcactttccgcacggttgaggtgcagactaagcgagctccgcaggtggaagagcttggtcgtggataagggcacttccttttcctaatttagatccttctctttaaggaggcctagaatgaggccccggaggtcgcccaggaagagacttcaggggtggtactcgcacccccagccccgcgcacccagcagtaagtcaggaaggcgcacttgcgggcggagccgggcgcgcccgtgcaaacccggtaggacttggggcagccctcgcagcccctgacccactccgcagtctgtgatcggaaccttaagagtgaagcaccgactccagcaactcccaatcacaggccgcggcatcaggcacttcctctcgacgttacgcagcgccgccactacttccggtgcgcagtcctcagtccgggtagtcccacatcccccgcgcctggagggcctaatcaccgaaggtgctgatgaggggatatgtgttgcagcggacagggattgagagtgcaggggagcggtgtgaaggggtcggggtttggcaaaggtggaagtgaaggcgtgtctcctacgtgagttcctcgaaactggagatgtccaagcatcggcatctttgtggcagaaagagtgaccgggtccctgtgggactagataaagggagaggagtttgggggacctggttataatgtgttaggcaaaaggatttgcattttatcctaaaaaccacggagagcctgaaatgagcctcctttgtgttcctattgcagcctgtgcacacctccgaacacagcatttacagcagggcgtaggaccacgccttaattcaccttggctctctccagtgctaagcaaatttgcttgagtgaacagacctacattttggcccagacaccaccacttactagttgtataatctagggcaagtactctgcctctttttaaaatgggtatcgctctttttgggaggattaagtgagataatgcatttaaagaatatagcacaatgcctggaacacaacaaaaactcaaaaaatgaaaaagagctcaccccatttgagctcatgagaaacatctttaaaatggtcatgttaaaccatgtactttacagtatgaaaatagcaaaagtagcactgaattgactgttttatgcaagtcattctctaagatccgccaaagtatagtcactgtggaaatctttaaaataagcctgatatgagtgtttaccttcaggaagctcattataggtacacctcatcaatgtgtacctatattgttgctactatcaaatccattttcacagcactcattattatttgttatactttgtgacactgaaggaaaaaaatgatttatcctagacctgaaaggagagaaaatgctaaggccacactacagtttttttcccccatcaactaatttgtcaatgtctgcttctggctcaggaactttggctgtatcttctaaaatatgttatttctttcttttcaatgattatagttttggaacaggaacaaagaagtctggattgaggagttcctaaaagtagtgattgacacctcttcagcctctacgtagtgtatttctcaaagatcaatccatgatttacttgcatctgaaattactgctttttttttgtttaacagaatcacctgcgtttttaacaagcacccaagtgattctggtgcacaaaaattttgaaaacctctaggacatatgtaggatgacaaattgttctggtttgtatgggcctgaggagtttcccaagacacaggactttaagtgctaaagccaggacagtcctgggcaaactgagatggttggttaccctagacgatgcgagtatatagtattagatgttcttaatggtcttggcatcctcattagggtcttgactttcttatttctatttgaagtgtttgagtttttatcaggaggtggtggtagagaccatgggagaaggaatgaaggcgaagtgtgttgccaattatcaacctattgagtctccattccaaacccacccttcactaccctgtttgcaatattggaaggtttctcccttgccttttggttcaatggacagtgagcttcatcagtggagggtactggaggaactttagaggaggaaggggctcttttttctggttccagtgtgctcctctcagctggctctttagtgcacagtggcccacagtgtttgactactccctgtgggctgaattaccaggttagtttctcttctgaaagttaaggcatcaattgggaaggaatggaatcccaaaatttgaaataagcactctgcttagacccagataactgacagtcttgaacacccatggcac

SEQ ID NO: 914271 - DNA, 4001 bp, Homo sapiens
actgcaaagaaggaatgagaaagaaacgatgctaaatatatctttttaaaatgtctgccactaagagtccagcaccagcaggtggagcctcataaccacatttttgtcatccctttcctttttctctccctcagtcatgcaatattattgcacgtgaagaaagacactaaatggcctttgaggctcagttttccaccattccagtggctaggcaatgtgctggcccaacatatctgagtcatctcaacaaggataggctgataccagctgctgaggtctggaggtgcccccttctgacaaagccacttccctggccagagtttccactaatgcacagatacttggatgctccctgtgacattactggagtgaagtcactattaactatgatactagccatgctgagtccggttcagccagctccagcctaagcgtactctctgtgggataatgaaagtttggagattatgcatgctctgctacttgcttgttagtgagtttaaagccaatatatcctactagatattgccctacgtggtaatagtagtatgtacatcatgccctccttgaataatagagagcctattatgaaacaagcagtatagacaaatgttcctatacttatatgtttaaaaaaatgcaaaaaccatgattacttttgcacaacctaataattaatagcaaagattagaaagaatctaacttcctatcaaacgaggcccaattttaacgtacggcactggtatacagagtttacatataaatctttaggacacacaagaaattggtgatatgggttgcctccagggaaggaaaatggatcgatgagtaaaggaatgaaagggagctttcttctttcatgacttttgaagttagtagctatttaaactgcatcatctatttaaaaagaaaataaagatttaaaatttttagaaaaaaattcaccccatcacttgtcacggcaccccgttttaactctttgaataacacttactacatattttcttacactctcattaatttgtttattctgtctttccccataactgaataaagaacactcactccatgaagtagagattttgtctctattgttcaccctgtagcacccagcacttaaacaggatttagcacctagcagccactcaataaccatttgtcgaataaacctaaatcgactttgctgtcttacctcctaaacctcccctcctccagaattctgagtttggtggccttcttcaacgttttcattaacacctagcatggacctctatctctagagttctcacatggtattataattgcctgtttgtgttgggcttcggccagaaaactgtcatctatttaagggcacagacttggtgcctgacatacaactgacaataaatattcaatgaaatctatcaaaataacaggctgacgctaccagaggtccaggagtcgcagggattgctcaaataagagcacaggaagactcagctgcgcaagggatcagatcatcagcactgcctttgcatcgatgcaatcagaccgattgtcaccggtcagaaaagccccagaagcgccacactaacacgccccatgttgcaaccgtcctctccaaccccaaagaaaacagaagattgacacaggcaccacgtgagcgcccgaaccaaacacaaacacatgcaccctaaacactgagagaaccacccaacgcagacaccctactgcccacactgcaccaagggcgcctctgggatccatcccctttccctaggttctcagccctagctggcaaggcggatagagaagaccggaagaggctgaaaagaggaagcggtgatttgctgcccgtatgcccgccagtaagaagtgccacacacctccgcttcggctcaggccggattctcaccatgcgtgtgccttcttctttgccagcctctccactctagcaccagaacaccgcagcggatacttgcacgccatctcccctgggcgcggccatgttggagaaaactgcactacatttcccatgagcccgcgggacaacgaacagcgctcccacagtcctcttcgcctcccagagcccgggagtgaccctttttcgaccaagtgtctttgtaaagtgctgtctgttacactgaaaattcagttgtctttttggggggagtagtaataattggtagtgcagctatatttttatctgttgctctccaaatggacaaggtcaaacaggtttgggccctttggtctttcagcaatgtcccctggcaccttctattcttcgtgcatatttcctcctgaatcttattagaggtgagaaaggaaaataaatcttggtgccacaaaatcactaagctaaagggaaaagtcaagctaggaactgcttgggcaaacctgcctcccattctattcaaagtcatccctctgagtcatccctctgctcactgagataaatgcatatctgattgcctcctttggaaaggctcatcagaaactcaaaagaatgcaaccatttgtctctcagctgtaatacgtgcgacctggaagccccctcctcactttgagttggcccgcctctgcttcaatttgtccctcctttctggacggaaccaatgttcatcttacatatattgattgatgcctcatgtctccctaaaatgtataaaaccaagctgtgccccgaccaccctggacacatatcatcaggacctcctgaggctgtgtcacgggcgggcgtccttaactttggcaaaataaatttcctaaattgtctgagacctgtctcagatattcagggttcacagagatatgggagaggatcctggggtctgaaagatggcattgcatgggcgggagggaaggaagtgaatatgcatgaatgtgccaggggaatggtgagtaccacagagtaatagaaagatgtgtggaagaatggtgaaggaagcaagacagaattctgtaggcctgcagagtgggagttgcagggaggaaggttagagaaatgaaatgatatgaccagagcttcttgtggcaagtgggaggagagactagaagatgactgatgaagtgaaaagtaacgaaatattaacaagcccagtagtggcagagggaaagaaaaaagagctggtaacagatcataagtaaaagacaaaggagagggtgatgattagcagttgttcctgctctgttatttgttatataaatgtaccataatccttctacctgcattggtttatgagctatgtgagtgcagggagggaaaggtgtaggggaagaggaatcaccttcccatgttgttgatacaatggcccctatctgcagtgcaccacagtggactaacaataaaatagctggctgaccaggaaaagtggcagtgaaaaaagagtgctgttgagtggcggaatgatttgtgtggagaataggttacaaacatgaaagaacagaagaggcagataggcaagcattgcaatagtctaggaaagaaagggtgagaccaaaacttaatagtaaaaatgaggaggcaagtgcaagctggagaggtcaaatccaccagacattgcaagctacatgagtataagaggacacacaggaaatctccccattgcaattctgcttctgcactactggatgctttcaaaaacacatccccatagagctttctgcaatgatggaaatattttatagtttgagctgtccaacataatagacactagttaacgtgtggcttatgagcatttcaaatgtggctagtatgactaaggaaatgaattttgaatgtttaaattttagtttcaattaaacttaagtagccacaagtggccggtgtctaccaaactggataacagtgtaaaatatcctcttatctcttactgatcaaattcaattacttcatctcagtatttgtcctgctttaaggtgctgaagcttttaaaactttttttctgcacctctcttttaattctctttatacgatctgatcacttactttcagaattttccactagtttctctcactc

SEQ ID NO: 914272 - DNA, 4001 bp, Homo sapiens
accacatcggctcctaaagaagatgctctctgcgtgtgtgtgtgtagagtgcaattgtagacaagcatatgactgtgaatgtttgtcagcagccatctatgaactagttctgcgcctgtgaaagaaggaacctgaatacgagaaaatatctgccatcggctgttttcccaaagttattctagccaccaaggcctccgccgtgtcccagcctctgtccccaggcctagtgcctctccatcagcctggatcagggcaaattccctgcccccaactcttcccaccagggccggacctgaaggccaaggcctccgggtatgtgctcaggactcctggcccagagaaggtttttccctttctgcgtctttgcttccccttccgctttggggttcaggaaccccgattctctggaagaagagaaggcctaggctactgagctgctctggctagagacgtccttgagtgtctctctctcccgggcaatggtggctgtgctctggggggcccaggcctgcctcctgtggctgcgttcaaggcagcttggaggtcatttaggccagctcccccgggttccccgtgggctcaaatcaggacccagacccttctctcttgccacagctctgggccacctgggactcgggacttcctgtctcccttcctactctgtcctaaaccattgttcagaggcctgccgcctccaagaatcgccgagggagaagctccaggggaactggcctgcccgcatccccactgccagtagcgctcagggtcccaggactcgggtcttgccagaccacagtgtcccctgggaccctagggtctctggctccgcactgtgttgcgccagtgcgcctggatttcccgtgagctttcggccaaccacgctccgggcttcccgcctggctccgcacctgcggcgctctcacctgcggcggcgccgcccgaggagcctcccagccggcgaggagcgaggcttctgcagtcctgctgtcccgcagccccgcagccccgcagcctcgcagccccgcagccccgcagccccgcagccccgcagccccgcagcccagcgccagagcgctgcgcggagactccttgccgccgcacgccctgggccggtaagaagcatccgcttcaaatcccgcccagcgggcagcgcaaagcgagcggtttggggaaatgccgaagggaccgggaaaaacaaactccaagtcgagtttaacagccgaaacgctccgtgcctaggccggcggacaagaaggagacagaacagatcccttggctccctcgcagcgatcgatcccgtttaccgaccagagtcaccaccccgcccccagcccgccaactcatacctcccgcaagccaccagtttcaagggatgcggaagccaagcaccccgtggtccccagcaccaggtgacccgcacgtgcactcaccgtagcagggaacctgcaaggccgcgctgtggccgctgctgccttcctggagtttgaggctgccgtccgggggcgtcttgcaggcgcctcgctgcaagtaaagatgcggttgcgcgggcggctggggctgcggctgctgctgctgcggctgcggctgcggcggcggctggggctgcggggtcgacggctggggctggaacttgttaaaggagccccgcgccccagctccactctccaggggtgtcgccaggtcctgctgcccagcgccgtaacgggcccggctcttggcgtccccgaatccctgtgctttggcggcggccgacaggaaagttgtgccgaacttgtcgcctccgggaaatgccctaaaaggcgacgagccctcccgactctgcgacaccgggctgtagtaggcgtccatggcagcggccggcgactcgcagtaagagacgcaagtctcagcattcatgcctggcttgcgcaggcggcgggcggggacgcgagcgagggcgcgaggacgccaccgcgcgccttggctgggagtttggggaggcgaggaggctgtggctgtgcactccttgcccggcctgctcgctctccctcctcccctccacgccggcctctctctctctccccctcttctttctctgtctctctcctctctctccctcctctctctctcttcccctccctcccccccccttcctctctctctccctctctctctttcctccctccccacagctagccgagggaaagaacggagggcagtaaaaagattcagatgtttcggaaagttgaccagatctcccaaaccctcttaaggttttgcagcggaaaaaaaaaataagtaaatttttttccctgccttgcttcttcctttccccctctctcgtcccctcctcctctctccttccactggcccctgccccctcctctccactcttaaggagatgctactaactcgctagcggggattcaacccggaggcgcccgagggcttttccgattctaggcggggctggggagatgccaggatccccagggctcccgaggctaggctgagaattggcggggtgtcggagctttgccttagggcaaagggaaatgcaaattttaatgacaggttaaaaaaaagccccccaaaataaacctaacaggttttgacattcgaagccagggggaccacgggcctgcggatgcaagcgagtcctacggactcctgcgcgcgagctcgcgggcgccgctgcgggccttcccgctggcaccttttcctaggtttccaaccttcctccccattcccgttcctacgggagattaacacacacacaagccttcgtcgtccagtgcatggtcacttgcacgtcttgttaactatttccctctgctgtaagggcgctgggctgggatgtagcggaatctgtgctccctcaagccctggagaagccctgggctgggcccggcttcagaagctttagagcgctgccctctgcgctcccgtctagaggccgcaccgttcacgccccacgtctgcgcccaggcgaggggatttcctgccaggcgaagtacagagagcggactctggagaccccctgaccttgcccgatagtcgcgctgtcacctgttcactccttggggtcaggggtcggggagaggggtgagaccgtctcttccctttctggcctcactgcccccgactgtaaaacgaactgcttggttttgataggttgtggtttcaccaccactgcgagcctcaaggcccctggcaccgccacagcaagggaaaaaactttgcgcgtgcagcccctcgatttcgcttcatgacaaccgtgctagagattggcgcccccaattttctgatgagctaacggaggctcagagaggggcggccacctggtccaggtcacacagctgggaaatagccgtcgcgccctggaacctctgctcaggctagtccctccaccgacctggaaggccgtgcggacagcgtagatgcagaggggaaactggcccccggctgtggaatggttcaagttgaaggagaccagcgagagcagccttccttaaaccgctgagaaaatcgttaagcgagaacgtacctctagggagtctgggagtagggtgagaggtaaaagtgcaaggtaaaattaaagagggcctgagcaccgtgaaccaaggaatgtgggtcagatgtcaactttctgcatctaaggtctcccaaagaaaaaatatacctggggggtcgcgcttctgctcccaatctcatctgggctaattcttacccccaccctacccccttagtatctctggtccttgctccgccgccgaccgcgcgatcccacatctggtttccatcgccggcttaccttgaagtgctcgttaataaagatattccgcaaaccaagccaggagcgcgcaggctccagccgccccccactccatgcccaatgggaaccgcgcctcactggcccgcagacctaagccacttgagagtcctttatttattgagctcctgttgtgccaacaatctggcaatacaaggcttatcatacccattttgcatatgggtagact

SEQ ID NO: 914273 - DNA, 4001 bp, Homo sapiens
caagtagctgggattacaggcatgcgccaccacgcccggctaattttgaatttttaggtttctccacgttagtcaggctggtctcgaatttccgacctcaggtgatccacctgccttggcctcccaaagtgctgggattacaggagtgagccactgcgcccgacaggctgaatttttttttttccaagaatgaagtgacacaaattaggatcatggtactgaatccgatgaaaataacagacttagtccccagactttccaagctgggaaggaaaagggaaccacaaaggagttcccaaagcgttaacctttcatttaaatatctcaatatttgaatgatttctacacacagccttttttagcttttgtatgtgcagtgaccaaactactaatcaaatacaacaaaactgggcgggcgcggtggatgcctgtaattccagcactttgagaggccgacgtggacgaatcacttgaggccaggagttcaagaccagcctggccaacatgatgaaaccccgtctttactacaaatacaaaaattagccgagtgtggtggcgcgcgccggtacttccagctactcgggagtctgaggcaggggaatcgcttgaacccgggaggcagaggttgcagtgagccaagatcgcgccactgcactccagtttgggcgacagagctagcctgtcttaaaaaaaaaaaagaaaaaagagagacagactccttgggtttccattggatactccccagaaagcagaccctcacaggacaagcgtttgccttcaaagtcttgaccatcctctactagactctaacctctaaccacaaacaccatagttataagatttccaaagaggctggggagaaggaggataaatcaaccaggaaacaatgtagacaacaaggttatcaggaaacaaagtagacaacaaggttatcaggaaacaaagtagacaacaaggttatcaagaaacaaaaagaaactgtcattgctacactagttaaaatgatacagactttgaaaagcaaaacagccaagaaaccacatggttcctttacttctgaagcctcttgtgacaggatctatattcctaacagtctatattcctaggaaaattgggatcacagacgatcaaacaataactcactgttttcataacttgactggtaagtggggggaagggaattggtaaacgacaaaaagtgacttacagtgaatttaatgatctgttggggatatgtggggaagtcacgtcccagacatcagcctcagtttacccacccagaaaaaggcgagaacataacacttcgctcagaagagccagagggccttgttccataagcctccacctactcaaaggtcccttcaaaggctggactcagtaggggtccccagtgcaattgaggcatgacacccggagacttcggggtggggggaaaaggagaaaggaaggagggtcaaagtgcgcaaagctctatcggttcctggaaagccattttcgccacacactgggggtgccctagacccaacatctcctccctaaagaaccacaccgggaagccccagcaactctccctcctttcggcttctccctcggttccgggctgcccctccggccgcgcccctcaacgcagtccggtagcccctcctctggcagtgtcacggcggccggccagcctgcccacccgccggcgccaaggtcttctcaaccccgcggcggaaggatgccgggctgggcctcccaggctcctcctgggcctacctgcaaggcagacgggagctcggtttgcagtccagcgaacgggctgagccacagggaaaaagaaagaggagacaggaataaaggaaggggtccgttctaccgaccggcaggagaaggcggcttgagcgcggggcctcgcggacaactcagccctcgacccggcgccgccgccgctcaggagacatcaagcaagaagacggcgcaaaagatcaccgaatacaagaacgccccagacatcaaaggaggaacgcccaagcaatcgttcaaggaaccacagccgagcgccgaaaaacagctcaactcctactcaaggtccggctcctgtctgaggcgtaaataaacaaacccagatcataagccacgggttaaaaaagagcctgcacttctgccattttctgtgggtcgccggctgttaaagttctttagagaactggagtttctcgtgaatgtgttgaagatcaaatcatagcgcaataacacttgttgtgtaactatagtcccccaactgttctatggactcccaacactctttatcccaattgagcaaattagttaacctcatttgacccttagtttcctaacagagcagtgaggggaattaaaaatcatagagacagaaaacgagagagaattcaagctgaggaacaaaatgaacagtctacgtaaaagctccagtttagtccccacaaagcatgaccaagagaagctgggaaaacccagaattatgtagcctgaccttaaggcagggggaaaaaaagcacacggattgcttttctcttttattttcttccaaaggcctagagccacaggtgtgcttcttacataataagcaaaagtctctttgggttcagaacctgataaagtgttgacattttcatcaccacaacaatggcttttttctgtagtctcttagttgataaatgaatatgctcagcacaaatatggattaatatgtacatcctagatgtgattcaataaatcacaaagatcactgcaagtatggttaccaattgtgagcaatcatagtctaccttacctgctcctagggaggtttacacccttccccactactcagagaggaagggtgtaaaaaggaaacaagatagtcccagtttgtcgggcgcagcggctcacgtccataattccagcactttaggagacgaggctggtggattgctttgagccctggagttcaagaccagcctgggcaacatggtgagactccagtctctataaaaaaaaaataaataaatacaaaaagttagccgggcctggtggctcccgcctgtaggcccagctactcgggaagctaagatgaaaggatatcctgagcccgggaggtggaggctgcgatgagccatgatcacaccattgcactccagcctgatctatggagcaagaccctatcttaaatttttttttttttaaatgccgggcgcagtggctcacgcctgtaagcccaggactttgggaggccgaggcaggtggatcacgaggtcaggagtttgagaccagcctggtcaagatggtgaaaccccgtctctactaaaaatacaaaaattagccggtcgtggtggcgggtgcctgttatcccagcttttcgggaggctgaggcaggagaatcgcttgaacccaggaggcggaggttgcagtgagcagagatcgtgccactgcactccagcctgggcgacacagcaagactccgtctaaaaaaaaaaaaaaaaaaaaaaaaaaaaaaaaaaaaaaaaaaaaaaaagtcccagcctttgaagactttaattaaactcaaagagcacatccttacagtattagccttttttaaataatgtattggcactttacaaaaatctcctctaagtctttgaaaatactgcccaggccgggcgcggtggctcacgcctgtaatcccagcactttgggaggccgaggcgggcggttcatgaggtcaggagattgagaccatcctggctaatgcggtgaaccccgtctctactaaaaatacaaaaaattagccaagcgtggtggcaggagcctgtagtcccagctactcgggactacaaaaaaaaaaaaaaagaaagaaagaaaactctccttcttggagaggcttgtggagcatagctatagccctcattcaaattttactcagataactacattgtttttgtttctttgttttttgagacggactctcgctctgtcgcccaggctggagtgcagtggagcgatcttggctcactgcaacc

SEQ ID NO: 914274 - DNA, 4001 bp, Homo sapiens
gaaattaagacactgaaagctctctctgagtttatgaggaacaattggagaatgaaacaagaatgactgtgattaaaggaacctaagtttttttggggtaaaccaaaccactgggcaaaaaaatgcggattccactccaaaataactctaccaaggctgaggcatatcttagaaaaagacacctctctgtgctaacaacaaaacattttctcttattcctttaagagtgagataaattggaagtgtgagagaaattgccaactttttttttttgagacagagtctccctctgtcgcccaggctggagtgcagtggtgctaactcggctaactgcaagctccgcctaccgggttcacgccattctcctgcctcagtctcccaagtaactgggactacaggcgcccaccaccattccccgctaattttttttgtattttttagtagagaaggggtttcaccgtgttagccaggatggtctcaatctcctgacctcatgatccacccaccttcgcctcccaaagtgctgggattacaggtgtgagccaccgcgcccggtctaaaaattgtcaacttaaacagacaacattcaccaatatgcttgaggaccaaaatgtttggatttgatattaataagcaccataaagctacatgatcaaaacaaaagttttataagtttcctaacacatattgaaaatattgtgaaaattatacagtataaaaatgtatggccgagcgaggtggctcatgcctgtaatcccagcactttgggaggccgaggtgggcagatcacaaggtcaggagatagagaccatcctggccaacacggtgaaaccccatttctactaaaatacaaaaaattagctgggtgcggtggtgcgcacctgtagtccacttgaacccaggaggcagaggctgcagtgagccaagattgcgccactgcctgcagcctggtgacagagcaagactccatctcaaaaaaaaaattaatttaaaaaaatgtaagccaggtgcatgcacctgtagttccagctattggggagggctacttgagcccaggagttttgagtccagcctgagcaacatagggagacctcatctcttcaggaaaaaaaaaaaattaaattactactttattaataaaaataatcaattgttttctaacgatatacaaaactaatctttttcaagtgatatacataactctgttccagcttaagttctagaagttcaaatctttaatcatctccaagaactttcttactaaaagacagaattcagtcacattctgaacccgtccagtttttaaaggaaatgtcaacagagaacccaatctaacattgacagaacaccacaagatttaaccaagtaagttaaaagctgagtgaaaatacaaaaaattagccgggcatggtggcacacgcctgtaatcccagctacgcaaggagggctgaggcaggagaattgcttcaatccgggaagtggaggttgcagtgaactgagatcgtgccactgcactcaagcctgggcggcagagtgagactccatctcaaaaaaaaaaaaaaagaaaaacaaaaagaaaaaaagctgaatgaacttctatcacaaagcatgagataagttgattaagttgataagctctatccctgtaacctcccatcaacaccaccaaatttcttggcctcaattcaacttaagcctctgccaattatttcctgcagaaacataataaaatattcctaagattgcttcatgacactcacagcaatttccatttgttatttagcattcattaggagccaatgagatagtccttataactctaaattctacgcagaacttatcaattcccagtggacaatgttgctttcttctctacattctttcctctgatatacattctcttctaccataaaaactttttcaaaaatgcacattcttagcttaacttcccaatctagattctccataaagatagtctggtggctcttcattaatccccttctgggagcactgaggtcgtgtaactaggaaattgcttatgattaagggcccttcatttaaatcttgctgacctcacacaaaaaattaaaggaacagtaatctttccaaaactcacatgagaatactaaaatagtgggagaatgtggccttgtacagtttccactcaaggactaggaactgaatctctgcacccttaaaaccactctcttagccgggcgcggtggctcatacctgtaatcccagcactttgggaggccaaggcaggtggatcacgaggtcaggggtttaagaccagcctggccgagatggtaaaacaccatctctactaaaaatacaataaattagctgggcgtggtggcgacgcctgtaatcccagctactcaggaggctgaggcagagaattgcttgaacctgggaggcggagaagtttgcagtgagccgagatcgcaccactgcactccagcctgggggacaaagcaagactccgtctcaaaaaacacacacacaaaaaaacgctctcttactgattctacatactttggaaacttatccaacccagaatgacctcaagactgatttttttttttttttttttttgagacggagtttcgctcttgttgcctaggctggagtgcaacggcgtgatctcggctcaccgcaacctccgcctcccgagttcaagtgattctcctgcctcagcctcccaagtagctgggattacaggcatgcgccaccacgcccggctaattttgaatttttaggtttctccacgttagtcaggctggtctcgaatttccgacctcaggtgatccacctgccttggcctcccaaagtgctgggattacaggagtgagccactgcgcccgacaggctgaatttttttttttccaagaatgaagtgacacaaattaggatcatggtactgaatccgatgaaaataacagacttagtccccagactttccaagctgggaaggaaaagggaaccacaaaggagttcccaaagcgttaacctttcatttaaatatctcaatatttgaatgatttctacacacagccttttttagcttttgtatgtgcagtgaccaaactactaatcaaatacaacaaaactgggcgggcgcggtggatgcctgtaattccagcactttgagaggccgacgtggacgaatcacttgaggccaggagttcaagaccagcctggccaacatgatgaaaccccgtctttactacaaatacaaaaattagccgagtgtggtggcgcgcgccggtacttccagctactcgggagtctgaggcaggggaatcgcttgaacccgggaggcagaggttgcagtgagccaagatcgcgccactgcactccagtttgggcgacagagctagcctgtcttaaaaaaaaaaaagaaaaaagagagacagactccttgggtttccattggatactccccagaaagcagaccctcacaggacaagcgtttgccttcaaagtcttgaccatcctctactagactctaacctctaaccacaaacaccatagttataagatttccaaagaggctggggagaaggaggataaatcaaccaggaaacaatgtagacaacaaggttatcaggaaacaaagtagacaacaaggttatcaggaaacaaagtagacaacaaggttatcaagaaacaaaaagaaactgtcattgctacactagttaaaatgatacagactttgaaaagcaaaacagccaagaaaccacatggttcctttacttctgaagcctcttgtgacaggatctatattcctaacagtctatattcctaggaaaattgggatcacagacgatcaaacaataactcactgttttcataacttgactggtaagtggggggaagggaattggtaaacgacaaaaagtgacttacagtgaatttaatgatctgttggggatatgtggggaagtcacgtcccagacatcagcctcagtttacccacccagaaaaaggcgagaaca

SEQ ID NO: 914275 - DNA, 4001 bp, Homo sapiens
aaaaaaaaaaaaaaaaaaaaagagtaatgtgacaaaactgatggtttaagcaagttgaaaagggtttgtgaagggttaatctcatgaaaagttctgtgggtataagcaggttggctaagatttaaaggggattacttagtttttccataggtcgaacactgaaataaaagcacactgatgtagggccagaatccgggcccatgtgtctgaataatggttttctagagaatttatttgtttaacagaaaattgtaaagaattatgagaggtttgtggacgttttaccttatggtcaaactatgattgtatagatttgtttataaggttttattaagaattggatctaacattaataatatactaatgcaaaggtgaaattttgctttctctcataaacaagatttttgcataatattttaaaataatgagatttttgtttaccttttaataaacaacagaaaaaggaggagagaggaaatagattcggttggcatcatgctgtctttattgcgacctgcttggaaagttgactctcccctctatcagcaagtaaagatttttgccttttagaaattttggagttatcattttggctacctaaatgacttgtagtgactctatactaatcttctctgagcaactctcctccatatcctgttgggtaatgagaacaagtggcaccccctccctccaaaaaatccatacccctttatattacagaaaagaaatcttcagaaaagagacatgctacaatgagactaccatacaagatgtgaaagttaccccccaaattacaatatcatgagacaaaataagggagagctgctgtctctcagtgtttgtccctagtaaggacaactaaccactgagcaaacggacaactgcacagccttcttttactcacagagtgttgtccacctgcagagccaagtcctctcaatctatctgcacactgctgtgcacttctaggctctcagatgtttttaggtctacaagtccatataaccactctaagccatgcgtcttaaaatatgccctcattttccattgttaagccattgaatacagactggtaggtcacgtggcttctgtaacacagtctaggtcacatcggttaatgctctacgcgaatgggaccctggaggtccttactcctgctctcttctccagagtaggttatacctaaaccatcctgcatcagcctttcccaaggtcagggctgtgctgagggtgtaacaagcatggacagtagcctagctttcttgggagatttaagtctcgggcttctaaaggttaaatattggtttgtctataatggggagaagaaaaacagtggtataactatgtaaaatgatggatatattaatctgcttcaccatagtaaactttttactatctacatgcatcccacaacatcatgttgtataccttaaatacacacaataaaatttgtttaaaaataaaattaaaaactgtcttctaaaaagaaaaacagtgaagaaagagctctgctgtgagctcaagaacagccagtcacagctccacctaaacccacgggtgacttaaaagctgaagccttgtcataatcattgtcacgtactcttattatgatgaaactttgctcctctttttgctgaggagattcacctaagttactctacacgacagtaactgaaacagcacccattagactactttatgacatccccctgcagagatcaagagttctgcaatcgcagcttcacaatcctgagagactaccaattcaaccagccttcaggactggcacacttctgtgtgagaaaagttcaaaaaatggcttaagaaattcaaagcaactgcttacccaagatgaagagcacccaggggaggcaatgcactgaaatctccccacagctgcagtccccaagctcaactgaaagactgctgcgagcactctaggttaggctcagagcaaaccaaacacgtgccttctgaagtggttgcagagatgcaaacaggaacctctaaatcaaggttctcatttcagtcatctggcccattacccaattgttatgtatactttcattctaaaaagaggtgacaaattcaacctactgaggtgaacctcacactcagacctcttcaggtgccatctccccttttagatgacaagccctctgagggtaggagcttgaatggcaccaggcaaataggtgctgagaaagaaatccatttcatgcaaacaaaatacaataaacgtaatattaacacaaaaccttctgtgttaaagatacagcaacctcttttatttttcctctcaaaacagaggtgcaacctcgccaggcaatcacccaatccctgcttccaaagatacgcctgcccagtcctccaactcaccatgtagacatgaaagtttcctctggccatgtgatatcagcatttccagaatacaggcagccattgattcccatagagaacctcttgggtgacttggacatcctagattagaactcaaggtttcttcacttcaagatacctctcagtcttagtcaccacttcaaaataggtgttctcaatgtacgcaccttcaacctcggctagattggcttgacctaggcatgggcagactcatggaacttgtcctgtatcatctgaaaagctgttgaacgtttgctcccaagcactacgctgcatggtccttgagaagtgatgtgctagagagccagcaatctccacagcataaatattcccatcataacctatttcaagctaccaacagtttaacaactggcttgcaaaattcctaaaaaacttaatacaggttgagtatcccttatccaatatgcttgggaccagaaatgtttcagatttcatatttttttcagattttagaatatttgccgaatacatacaagttgaacgtccctagtctgaaaatccaaaatgctccaataagcatttctttggagcatcatgttggcactcaaagttacagattttggagttgaaatagcaaccactcttttgtattttcagattaggggtactcagcctgtaatcagctcttgctatgtaagctggttccagcacaccacggaacctctgcaggttcttgcgggggtacagctccgacatgactggttgcacgatgctgaaaaccactgttaaatcaagtttagcctaaagctgcctccttacatattttaagtttggcctaaaggtttctctgtacatcatgaactataacgtaaatggaatagtatacggactctagtctactcttgtgccagtcactgagtttggccaatcgaagatggccaatgattcaaactattcaaataaggcaaacaccgagctgtaaccaatccggctatttctgtacctcacttctgtttcctgtacatgactttccttttgctgtccataaatcttccaccacgtggctgcgctggagtctctgagtccactctggctcaggagactgcctgattcatgaatcattctgtgctcaattaaactcttttaaatttaattcagcttttaataccacaaacccccatctttttcacatgacaattcccaccttttatgtagatatgcacacaccaaaaggtagccaaagggtacaaagaagtttattgactatgatgcagtaaagataccaagagttacaatatttgtgcatatggcccaacagtgcctaccctcctacaaaacaaaaacaaaaacaaaaaaaggcaatgaggtgcagcagttaacagcccaacactggagtcaaaggaatggagctgcctcttctggcagcaaagtttcaagttgtgcaattaaataatagtcttggtccactccttgtgggtcttcttacagtttccctttagaaccataactgagtgacttagtagaacattcatattcaggatgtggcctccagaagtgtcgttttgttttgttttgaacaaagacgtgctaccttctctcttgaagcaccagtgctgggttcaggagctacagaggactaa

SEQ ID NO: 914276 - DNA, 4001 bp, Homo sapiens
agtctcccaagtagctgggactacaggtacatgccactgcagccagctaatttttgtgtttgtttttttatagagatggggttttgccatgttgcccatgctggtctcaaactcttgagctcaagtgatcaccccgcctcagcctcccaaagtgctgggattacaggcatgagttaccacacccagcagaaattcttatttctacttacactatgggtttatccctcgtataaaaataaaggccaataaaaatttgaatgagagtagcattatagggacaacagggaatgtgctctgagctacaaaaacaatattttgtttgcaaacattaggactttattgttagtaacaaactacttgggatgtttttcacaaatgatcctgatatacgagtatctatacagactgtctgatgaggcttaatacactgttcctcactccaaagagctccatgaaagaacctcgcccaccatgctgcatctgctaatcccaacactttaagcagccacaaaggagaaaatgatgattccccagcacatacatggagcagtgaaacactgaaagaatctgtcctcctccccaccccaaaaaagatcattgtggtatagttcttatgcctaggtcagagctctcctttctagaacctcggaatttacccctctcacctgcttctgctacttaacaaagggtagagataaaggaaggaaactcaaagaatttcatgtgcaagaacaaggaacctctcatttcaagtttgtgtctcccatcagccccttaactacttgaaaggtaagcattaccattattgtaattgccttcctcttcacagctcaggaagctaagatcagcaaggttgagtaacttacttacccagctgataacataaccaaattcctgagctaggacgaggcccagttctgataatctccaaagccccggctcttgcaacacctcctggtggcacctgatgcctgactcttacaccactctgtcctgacaccagcagtcaggggcttctattacatagtgatgtttcccccgcgttaccttggcgtgctctcctggtgacagagtccagtctatcttgaatatacatttgtcttctgtgctctggaaaacacatcccatcagagctgaatcacccacatggactgttagctcaggcggggaaacattcaagtcattcaggcccaaggaataatctatagaagtcaaaggcaagaggacacatcatttagacaaatactctcaacaacaaaaatcaattccaatcatggagtactaaacacccctctccctggatgatccaacatagacaaagtcctcggaggcatgttcaaaggcagcatggcatccctgtcctctagttacctatatggctcatcagaaggattctgcaatcttcatactacaataaatgctatctggctccctcctcctatccagccccttacacttttctggaattcttcctcccaacctttctaaagaaataagggaaaccccagaagtctctcctttctgatcatcaatttagaaactcacctccacttaccataacgacgaaatgggttgttccttgctcttaaatctcccactggttccctctctgaaaagggaccttttgtttacttcctcttttccctttcttttagttcctttacaaaagcatttgctggctgattctggctgtagggcaggtccttgtaattaggccaccacagagcacagctttcctcctgcatttccactgtgtttatcctctccctgcctcacccctccagctttgccatcagctttccagcctctaggtgcttcacacagggacccctgcccattatctctatgttgctcaagcaatttcgagcggtcactacaagaaaaaaccattacatggatatttctgttttcacaagatatgctctatgcaaagagacaacaaaatcaagaaagatacatttagatgctgcccagttcatatcagagaagagccaagtgatgggaatgaacagaaaatgtgccagtcttttcatccaagctgtttccctgagagaagacagttaacttcctgccccaacagtaggctcacacagcagggaggacacaaaagaaaacatcgactctaaacccttcagagggaattattttgaaagaaatcaaaattagctccaacaaatatttggaattttcctgtaaggaagaattgagcagctccatgtgtgattgaaagtgtaataagcgaatttaatattaagaacactgtgtgtagaattaaatgaaggactgctaggaagcaacaacagcaaccaaagcaaagagaaactgatgtttgaagggcaatcttggtagagaaacagctgaagaagatgagattttctgcaagaaaggaaaacctctccacaaaaaactacaaaacccccagtgccaccaagtcaccacatacaggggttggactggtagctctctggatcggagggcaaaaacctgcaggctgctccacagacctctaggaaaatgtctaaataccttctgagatcattataaccctgcttctttgagaaaaattatctaatgaacaccattttggtgtgcgtgcctgtgtgcatgtttgtacacactctggattgcctggaataggagcaaaggcaatcctgttgtatactttgctgagtcagggtttaaattactgtccaaagttcaaaaaataataataaagagaaaaagaaaaggctatgagagcaaagcacctgattaatttcttctccttccagaactacatccatgggataaagaaaaaggcatgggggaaaaggatgaaaacctagaaaccagtggagatgagcaacgagaagctcagcacttaggtggaggcataaacaggagaccaatctggtctgaggagatggccaggtcaggctcctcagaaggaagtggagcataaggggaaacctgaagggtaaggaagcatcgggcgggcttgctaggttgaagtgctgggaggaaggttccaggcaaaggaaaccaccataaattgggaaagagctcagtccatttgaggaaccacaagaaggctgacatggccacagtatgaaaaacagctctgggtctctctttggtaatttcagttcctgattcaaggcgaactgtggttttaaagataacaatttaaagtgcaggaatgccacagagaaactttccctttgtcacgtaagagggtcccagaacaccctttaggacccaaatgcattctgtttctaatggaaacaggaagcttcagcttcccaagaaaccataagctagttggcttcaacaacagctgcttcaacaaaactgtgaagttccacattagggtttccatcttcaacaaacccaagggaatcgaaaatatgtaaaattggcttttaataatgcacagaactcaggagaaatcaaataccccacggagtcccttagcttctacttacccagtaacactggcagcaggatgagtttcagtgggcaaaacatgctgctctcaactttcaaatcttaagataaaagaacaaaaatcacaaaatcatgtcaagagaagctcattaatttaaaaaaccaatagtgaaggactatacggagcagcctctgtttgagacactggtatgcagcattgaacaagaaaaacagacgaggtcccagctcatttgcagtttgtatgcagcgggaggtggagaaaaaagaagcaaataaatgaatgaatgaataagaaaataccagatgtcaataagtgctatgatgaaacaaaacagagtagtgtttgaagagtcacttgggggctgctttagattggccataagggaagattagatgaaagttgcttttcaagagaaaaaaagcaaatgattgcaggatgcccttgagatgacaaccctagattttccactacctgtatgtttcacacaaacaaaaaattataggatatccagcctgaaatttttccccatctctccacctaaattagaattact

SEQ ID NO: 914277 - DNA, 4001 bp, Homo sapiens
tccaccctttactaacagttcaaagtatattaaactactgttcccacattattctcataaagagccttcaaagtagatacacactataaggctcagagcaccttactaggaagtaaatgtcagttgctctagattctttaagaccttgcaatctagagagctccttaatcgttaacctgggtctgacttccacagctgcccgggcccaggagtggtatgcagccaggggaaatcttagccagtttggcagtgacccataggccagttttggaagcagggagccatgattgtttaatatttcaagccttgactttttgcttcccgaaaaggaaggaaattttctggaactgtagctattaatagccctctattctggtttaattcgtttatggtgagcaggttagcacgttactgctttggttagccgaaagcatcttcgaggtatcacaactggctctcgagaccacgtaccccaccaccaccaaggccttctataagcagtacaaaaactcagttctcataacatgcctcaggagaagaaaatgggaaaccaaggcctcacagagaaagggagctgagggaccatggggacaaaatgttgggtccaaaccgcatcgtctcaggaggccgcacgctcagggcccacctctgaaaccccagtccaggtgatccacacgctagcccggccaaaaggtatttgccacgcggagacaggaaaccaacaccgaagccaaaaaggcaaaaatcttcgaacaaaaatggaaaaggaaagtcttcctagtcatcagtaaagataggaagagtagggtgggcgaggcgcgggagctttgcgcagatacccgggattctcggcctggggctctgaggggggaaacttggacacgtcgccgcgagcgcagtccaggtagcggaggccctagaggtgcgcgccagggctcgtctgctctgccgccgcgtcctccagcccggccgcctatggggcacgctcggtccctgtcccggcactaggccaccgttccgctcggctgtcatcggccaacgtaccactctccctcctgccacaaatgtcacattccaagaaaaaacagttccatttggaaagtttaaattttctccccgcgaaagcagattattgtaaaggcagccctaacaggcaagcgggagctggatgtaactctccagtttgtcaaagaaacttgtctggggagagaacaaagaaggagcagcagctaacgcgatccgagcgtctggggctggggtgcgaccctttcgtcgcccccacccgccagagccgggtctggccggcgggcagaaagggtccagtccacagcgccagagcccgtcgggcgggccggtgcgcgcgcctttgtctcgcgccggggaaagctgcaccggacacccccttccgtcccctccctcgccgcgagacccgcgcgcgggcgcgggcgcgcctcggagtgtctggccatatggctgcgcccctcaggaaaggccagccccgcgtcgggcgcgcagcaccccggggcccaaaccccggggccacaacttcagtcaacgtgggtcgcggggcggcaagacgctgaggcccggcccgcaggcaactggacctggagcggggcaagggaacccgcttaaaaacaacaatctgggatctcagccccgggcccccagaagctgcccccttccgtgagcagcaggggcccggggagcccggggcgactgggttcttcgcgtgggagactcggagacgccctcccggcacctcgagtgggggctggttacctttcaccgcaggctcacaagttccccggcgcaactttgccctccacatgaggcgatcatggctagttcagtccctcggctggggaagacggctgccgggcagcgcggggaagtggcgccggacaatcaaccccattcacacagggcttcacctccagccccaaacccgacaaccgctgctgggtcctagagcttctcgcgcgctcccgccgccgtccgcgctccccgctccccgcgcgcgggccggggagggtcgcccgggctcgtcactagaaccctacactccacccccgccgtggcgcccggccgctgggccctagagcccgtctgcagacacccgccgcccctccccgggccgcgagactgccaggctgaaattgcccagagctcaagctgacgtgtctccctgagacttaggagggcgacagcatcccttcctttgtcccctgccgggttttgattaatttcagactcaccagttctccctccactttgtcttccttccccaccagcccaatgccggccaaaattctgtttccggatctgcccaaaagtctagatttgcttaggttggttttttttcttcttaagtggaatttccaggtagaaagtggccacacttttctcagcattccccaggccccagtgcttccatcacgcacttgagattgggcgataagctgctactatgtgctccgttgacaaacagaagggccaaaacagacctgacagcctcggatattaaatgtgttcgcagaaccgtacatcctctggccataaatccccaggctgttatctgcctgagtagaggtaaagaaagtaagcgactctgggaaaatgttgccccacctcttaaaatcaggctgtgctgagaactactcatccacctcattatattggtttatactggcggctctctggagccctaatctggggtgcccgagcctgccccatagcacttctgcctggctttttccgggcagctctactgcttggagaagagaaagctaggtaactgtacagttgctgcccaggatgttagtgggagagttagcgcacaccaagcctctcttatctggtgctccctgcctctgtttacctgctatctaggtccggccttcagggactcctccctggattgtggcagttccctaactagactgccagcagttttacctctcatcagttctggtgggttgcatgtcctgattctgattcccctgatgggccctcctactgagtaaactctgctctcaagataaagcccaaatgtaatcatttaacaattatttatgaaatgcctactccatttaaagtcatctaccctggtacacacaaaagaaacttagcacacaaaagaaacttagagcagctgaccagcccttcaaggatctgttatctgtctaagaagacaagatgtgtgaacagaaaacaggcaagcaacaaagcaggagatccaagtactgcagatgcctgggaagggcggagagaggcactgactacacagaaggaaaagcctgggagggtggtggagttcagacacagcagaaagaggaaaaggcagcactgggcaagcagaggcaaaagccaagagggagatgacaaggtctgggtgcttgggaagaaggcatagaggaaagcgtttttaccagaaacgaggagaaaacaagggaaggcagaataacaacgtcacaaaaatgtaggcctggaaagaatctaagaaagtgtcaactaaacctttcacttgccggatgaagaagctcaggcatagctgttgaatgacttgtccaatgttacagaacaagtttagtagcaaagccaggtatagaaacaacctctgcctcaatgtgccttgtattacacattgtgaaccctgaatcgcaaattaggagctgaagtggttatcttatggacagtgaagggaccactgattcacctaacatttgcgcgaatttaatacaaattggggaagaagtgatggatagaaaaagaagaaaggaaactaatctttactaattgcccactcctagataccatcctatagtctaggaagcagcaaaatttccaagttacaaccatcaagtttagaacaaaacaggcatgagctgagttgcagctccaccattcagtatctgtgtgacgctgagcaagttgcctaacttctctaaacctcagtatcctttttggcaagatgaagaaaatagcatctcacagagtgg

SEQ ID NO: 914278 - DNA, 4001 bp, Homo sapiens
aaaatgaacatgaagttttatctagacactgaatccttttattcaaccttatttattgagcaccaccatgtgcctggcactctcccaagtttctattacctgggtgcaggaagaaggaaaacatatttaaatgtgaagccagatcaggaggaggaacatccttctcccctatgaatggtacttctcggtgactgtacacagccaggactccagccatgagctcatcctcccatgccccagtcagttccttacaaatcaaaagcccaaagcaattgtctgttgtcctagatatgcaaccagcatacagaagaactaagagattattatacttggtggaagaatcatggaggccaatgggcagctttaggggagaaagggtatctccctgttaacccgaaggctacatgttatctgcccatgacattttcaagacctgagacagattttgaggccatttgaagagtgatccagtcagtgtagaggcaaaaaaaaacaactacaaaaaacctcatctctcaaagagcttcttgacctagctgagagctaggagaaccttagaagacagaggctgagctaaggatgggactgagaggtcaaagagtctcccagccaccacctatgcaggtgtcattattcctagagagggcagccccataccatcatcctcagagcaagccaggccccatgaagctgcagccaggccaggccaactaccccagacctgctgtcaacactcctagaggtgtgaagtgacagaggctctgtctgtctggctcaatggctccactaacactcggccttagtgctgcacagccagggaaagaatttctcctctgcaggttccagctgcaggcagcttttccatgaagatggccaaatgttggtcactgcatcctgagggaaagccaacaggggctcaagaccatgctaaaatccctccttgtgctgcctgctttcacccagctcctttgctgatgtgtcgccatcaagctttcagccacatacagtttggggaaatgataccctagttagcaagcctctcctactccaaggcctctcaaaactctccccagggacctctgccagcctacaacagccattagcagctctgctggcaaagcagctaccagaagatcaagggcagaaagcagactgccagagcccaaggctgtacacctcccttgccgggagagagccaaagaggtaaggatgaaggcctcaaacgacctcatcaccctatcatccagtgcatccctcgcctccaggtagaagtccacctcagctgtccacatccagccagtcctcaagcacctaggaactttgcccagggtggcaagtcccaggtcccttaatttctctaaaccttgcgattccattctaggccgccagggaatcgggatgctgcccgctcacctgaggccgctggggctcgggccaccgcagaggcaggggtagggacagggacaggaacaggggacagggcaagggatcggaccggagtcagcgccaccgcctctgcgagcagggaaggcggaagccgcggttcagaccccagggcgctgctgattcccgcctgggccgcagggtccgcggggctggcccaaggtcagcagcgcagcctcgcgcgcactcaccgggttcggacgacagggccatgccgccggccgaaagggacggccgcagggctggagcaaaggggacgcgctgggcagagcggagcggggctgctgggcactgaggccagccggggccagggcccggccaggccgcgccccgcagcaggcgcgggggccgggcgttcagagggcgcagcgctgcggatccccggccaggagggccccgcgggaggagggagggccgcctcagcagggaggaagccggccagccgcgtgcagcccccgtcggtgccctacctgggcgcggagcggagcagagagagccgagaggctacctgaagcgcccgggccgcgccgccaacgggaaacttgagagcagcaggggcgcggcggccgccagggcccttggccggaagcacccgccgcctcctgggctccgcggggcccgcgccgcagcccggagcagatgccagccgggctccccagacctcaactgcgctggccccgccgggcttccacaccgctccccgtgccgcccgggcttgcccgacgtcctcccctccccgcacaacttttcccagcgcgagactctgggggtctcggccccgcacaggtgacttgctccctgtagttgcagcaacccgcaagcattggtttcttccaggcgtccttctggtcacttggatacacacacacacacacacacacacacacacacacactccctcgccaaccgtccactcttccaggcgtccttctggtcacttggatcacctacacacacacacacacacacacacacacacacacacacacacacacaccacgtgcacacgctccctctccaaccctcctcgctctgccttcacctgcccctcaaagtcctgaatgacctcctagttgccaaagccactgggtgccgtgcagcctccctcgctcacctcttcctggcatctgagcctgctgaccacgtcttccttcctgaaacgcttggagtgcagtttccagagttggcacccgcggcccccacctccagatttttcacatacctgggtacctacagcttctcggcctccgcggcctggcttttctctgtggtcccaccccagggtcccaccgtgccagcccgctctcccactccaaggcccactctgggcatctcagccactcccatggttttaacaacctcctgccggatgatggctcttgaatttcatctccagcccagaatgcccccgagctgctgaagatggtgaatctaactgcctagggaacatctcctctagatcttcctaggccggcggaagcggtccagacccaaactacctagttgcttcccaggaaaacgccagaacctgcttctgtgtttccagtctcagtgaatgataccggggtcggcaccaccacggggccacagttgggagccattcttgactcggtctccctttcctctctcaacgagtaagtcaccaagctcggagaggaaacttcattagtgagcacccactgtgtgtcctcactgtgtcaaccactttcacagagttgtctcatgtaagcaccaagttgtattccttctaccccatagtctgattggtctgatactcgcaattcgtgtattcataaacgttttgcacatgagactgcgttaatgagttacatattataaagaacactaaaaaaattaaaggatgtggtaaagatgaaacaataattttaaattgtttcatttttatgagtggtacaatatacctttttcttttcattttaaagttattagcaataatctgtttagtgattccactaatctgttagtgatttagtgattaaatcattaaaaatgatttaaataaatcttagtttaatactttatgagaccagaaagtgtacttgtaagttcagttaatgtccatacttggtcttaatggctattctttaaaaaaaaaaaaaaaagatatctcacaaagattaaatagacctgaatagaagaactgtatctttgcacttattaaatcatagttcttactgtttaaatttgatctatcaattttgcaaatgtgaaaactcttctttgtctatgaaatcaacattttcaatgatgttttcctcagctgttcttgcaaatcattttaacaaatgggacttttaaaacacttgaaattctgcatttgcaatattgtaaaatggatttagaagtatgcttctacattttgcagattgtggctatgagagtataggtgacactagcacgcttcgttttggcatgaaaatcacatgataatggaaacagttccaaacgtcaattttcaaagtgccttccctataacacaattcttctaaagcacatttgttacgtcagttcattgctgaaatatcacctttacccaa

SEQ ID NO: 914279 - DNA, 4001 bp, Homo sapiens
tgtggtctcagctatttggaaggctgagttgggagaattgctcgagtcctggaggtgcaggctgcagtgagccatgatggcaccaccgtactccagcctgggtgacagagcaagaccttctctcaaaaaaaaaaaaaaaaaagcaagaaacaacagcaaccacaacaaaataattaattccatatcttagtatggaccaagtaacccacttggggtgctgcaggccttagcagctgcccccacatctgctgccttctggatgtccttggcagacagctcccacctgccaacccgtccctccagagtgtctctcctctcagaccctccagacacctgccaggccaggcctgacaaggaaagctcactctgcagatgccaagcagagcttcagctccagctgcatgttcacgcctggcttccaaccctttgtcagctgaagccagcaggcttgggaggcttagctgtgaattcaccagcatcagtcagccaatgatacagcttatctcactgttacatgcaacacgctctgatgaacttgaagaagtgtcccaaagttagaaagttctaaaacactgccagtttcaacaaacagtaacttttcatggtgccacagtccctccagaaaggaagcccagtgccactgaaatcccctcgttatacgaaggaagctggttcctactcttgccagactccccttgcagaagccccgacacagacctgagcctggctccatgactggtcctgaagatgccactcaagtgatgcacccgggtgaggtgctgcctgccacccaggaggctcagctgagtcagtgcgtgcgtgcagctggctgggtcctgtctgccggctggagtaggaggtctctgttttgcatatctgtgagcagcagtgagccagagcaggaaaagcctgggctggaaattctctcgtgaatatgaaatatgagtggaaaatttccaagagccctgaagtccccaggtaatcccagttatccaaaacaaaatggctgtggtatcctgaatgcagtgtcctggccctcttcacagccctcacaagaggaaactaaagcggcggcttcctctttacaacagtaaactcagccgtcctgcccagctgcaggagataagccacagcctccctctaacgcccagcctcctcctgaaagctgagtagcaacgagcgatatcatcacctttgctgcttccgttctgaacgtgcttcaggcctggctgcattttatcaaggggattggtctcaggtacagcccgacctgcctcttctcagaaagcccccctaaagcagccctcccaagggcaccccataactgccagggggagcttcaatcccagttgctaatacaatcccctccatcccctcctcctctgaaagggaaagaccatgaactgcttccacctttcccaggaaaggacagagactcagggagcaggaactgcctcagcacagaggcggacagaggacaggggcaggctaggatgaaaagctgacagccccatcccactccttcctttcttcccagaaggaagcccacatcacaggtgactgcgaagcctgataagctttaccagaacccccacccccatccacacacacagaaaaggagtacaccccaactgacccaccggagcccaccccaaaccctcccctgcttacagccgctcactgctcccacgtgggcctccagctccgagcgctggctggactctgccactcctcctggggaaggtggagcctgcctcaagtgacccacaggagcaatcctctaaaaccaagcagggttgattaaaatggcatcacagggtgcaaagctctgatcttcatctgccctttaggagagtgggaaggctcagaacagacacatagcctcccagtgacttaggcaaatcctgtggtcctgggaaataaccatgagcaaaatggctatttctgtggtgctgttgaaatcctggggagaagagctcaggaaggatgggtcagttgtttaccgggaggctagctgtaaccctgacttgggcctgagtcacctccgcatgtccaatcgtgaggttgtgtcttactgagctcacatcataattcctgtgtgcacagagcagtattacagggttgacacatgatcctcgggctgctgctgggctttagctacccagagattacggcccacctgtcctcacagctgtttcataaacagtgcaaccagcaggctacaagcaacctagagggagggtaatatttattcattaaacaattaaatgaacttacagtatgagaaaaaaatccaagcccttagtactattctgccagaaggaggaggggcagatgactttttctgctagtgttttggggaaaggggaggtagagtggggactgcagtgggaggattccagcccaaggatttaagtccgacacgttcagggaattttattctgcacctttaaccggatcccagctagccttagtctaaacaagcatttttcaaagtgcagtctgcagaacatgaaaggtcagaaggcttggaaaacactgcatcctgtagtcccttatgggtattcatgcacagtttctactagcaaattcaacacctgagaagtcctgcagtaaagaaagctgcttaactttgtttaacccgacgcacttatttgaccatcctagaactgctgtcataggaaaaaaacacctattaatatcttgtggtatcggctttgggaaacaccctccaccttgagtcttcattttccaacttagagaaagctgccttcctggagcccagtttacaggtatgagacccattgcatcgggttcagacagaaaccagcagcagctccactaagatgacacaggttgtaacaatgaccaagggtcctgctgaagccaaaaggcgggaagactccccagaacatgggcagtttagaagaaaaatacagttctgtcccagaagagcaagctcttctcaggacctcacaattccaccttgagcctaacttgttgctgcttcttgcagccaagatgtctctgtggactgaagagcactgatcccaagctcaaagccttatttccctttcgaacaaacatcaagacaatttatgataaccagatacagggcccgcttctcctgcccgagactagactgcatccccttttatcacttaagcaccccttacaaactctaaaagacaggagaggacggaatcaaattatgtctcatcaagaaagatatcggccgggcatggtggctcatgcctgtaatcccagcactttgggagcccgaggcaggtggatcacaaggtcaggagattgagaccatcctagccaacgtggtgaaaccccatctctactaaaacacaaaaaattagctgggcatggtggtgcgcacctgtagtcccacctacttgagaggctgaggcaggggaatcacttgaacccaggaggcagaagttgcagtgagctgacattgcaccactgcactgcactccagcctggcgacagagcaagactttatctcaagaaaaaaaaaaagaaaaagaaaaagaaagatatcactctcctccccaaaagccaggcatgagcttgcatagaggggttcatttttcttctcatttgtgaggtgtgtgtgactcacacaaggagttggacaaaggggattcacttgctaaataccagctccatgacaaatctcgcctgtctcattcacagttgtatccccatacctgaaatatggtcgacattcagcaagtatttgttgaatgaatgaatgcataaaacaatgaacaagtgaactagctatttataatagatcaatccacctatggcaatctcaggaatgagtagagtgtatggctaaaaacgtagactcaggctgagtgtggtggctcacgcctgtaatcccagcgctttgggaggccgaggcggccagaccacttgaggtcaggagttttgagaccagcctggccaacatggggaaaccccatctctactaaaaacacaaa

SEQ ID NO: 914280 - DNA, 4001 bp, Homo sapiens
ccatgtttgctcatgaagcatgcatttattcattgattgattgagagacagggtctcagttgcccaggctggagtgcagtggcacaatcacagcttactgcagcctcgacctcacaggctccggtgattctcccacctcagcctcccgagtagctgggaccacaggcacacaccactatgcctggctaatttttgtatttttagtagagatggggtttcaccatgttggccaggctggtcttgaactcctggtctcaagtgatccgcctgccttggcctcccagggtctaggattataggtgtgagccatcataccagcgcacaaagcatttttagcttgctctaatcaactaaaaatacttttcaggacacagctttctataacatatcttcctttctctttagcttaaatcaacctttcccaaactggatgccataagaaattgatacctgttgctggtaaaacaggtcctgtggtcagttattgggagatgttgcattccacagcccctcaactcacattcataaggctcattaaaatcaaggatcatagagtaacattaacatacagaaccctttttgttttacagaacccataaaaatcttccgcagaactactaccagtgtcttaaatagttggtagataattcattccaagaccgggtgcagtggctcatgcctataatccaagcaatttgggaggctgaagaggatcgcttgaggccaggagttcgagatcagcctggtgcaatatgtcagaacctcatctctacaaaaaatagaaaaaaaaacagccaggtgtggtggcatgcacctgtggtctcagctatttggaaggctgagttgggagaattgctcgagtcctggaggtgcaggctgcagtgagccatgatggcaccaccgtactccagcctgggtgacagagcaagaccttctctcaaaaaaaaaaaaaaaaaagcaagaaacaacagcaaccacaacaaaataattaattccatatcttagtatggaccaagtaacccacttggggtgctgcaggccttagcagctgcccccacatctgctgccttctggatgtccttggcagacagctcccacctgccaacccgtccctccagagtgtctctcctctcagaccctccagacacctgccaggccaggcctgacaaggaaagctcactctgcagatgccaagcagagcttcagctccagctgcatgttcacgcctggcttccaaccctttgtcagctgaagccagcaggcttgggaggcttagctgtgaattcaccagcatcagtcagccaatgatacagcttatctcactgttacatgcaacacgctctgatgaacttgaagaagtgtcccaaagttagaaagttctaaaacactgccagtttcaacaaacagtaacttttcatggtgccacagtccctccagaaaggaagcccagtgccactgaaatcccctcgttatacgaaggaagctggttcctactcttgccagactccccttgcagaagccccgacacagacctgagcctggctccatgactggtcctgaagatgccactcaagtgatgcacccgggtgaggtgctgcctgccacccaggaggctcagctgagtcagtgcgtgcgtgcagctggctgggtcctgtctgccggctggagtaggaggtctctgttttgcatatctgtgagcagcagtgagccagagcaggaaaagcctgggctggaaattctctcgtgaatatgaaatatgagtggaaaatttccaagagccctgaagtccccaggtaatcccagttatccaaaacaaaatggctgtggtatcctgaatgcagtgtcctggccctcttcacagccctcacaagaggaaactaaagcggcggcttcctctttacaacagtaaactcagccgtcctgcccagctgcaggagataagccacagcctccctctaacgcccagcctcctcctgaaagctgagtagcaacgagcgatatcatcacctttgctgcttccgttctgaacgtgcttcaggcctggctgcattttatcaaggggattggtctcaggtacagcccgacctgcctcttctcagaaagcccccctaaagcagccctcccaagggcaccccataactgccagggggagcttcaatcccagttgctaatacaatcccctccatcccctcctcctctgaaagggaaagaccatgaactgcttccacctttcccaggaaaggacagagactcagggagcaggaactgcctcagcacagaggcggacagaggacaggggcaggctaggatgaaaagctgacagccccatcccactccttcctttcttcccagaaggaagcccacatcacaggtgactgcgaagcctgataagctttaccagaacccccacccccatccacacacacagaaaaggagtacaccccaactgacccaccggagcccaccccaaaccctcccctgcttacagccgctcactgctcccacgtgggcctccagctccgagcgctggctggactctgccactcctcctggggaaggtggagcctgcctcaagtgacccacaggagcaatcctctaaaaccaagcagggttgattaaaatggcatcacagggtgcaaagctctgatcttcatctgccctttaggagagtgggaaggctcagaacagacacatagcctcccagtgacttaggcaaatcctgtggtcctgggaaataaccatgagcaaaatggctatttctgtggtgctgttgaaatcctggggagaagagctcaggaaggatgggtcagttgtttaccgggaggctagctgtaaccctgacttgggcctgagtcacctccgcatgtccaatcgtgaggttgtgtcttactgagctcacatcataattcctgtgtgcacagagcagtattacagggttgacacatgatcctcgggctgctgctgggctttagctacccagagattacggcccacctgtcctcacagctgtttcataaacagtgcaaccagcaggctacaagcaacctagagggagggtaatatttattcattaaacaattaaatgaacttacagtatgagaaaaaaatccaagcccttagtactattctgccagaaggaggaggggcagatgactttttctgctagtgttttggggaaaggggaggtagagtggggactgcagtgggaggattccagcccaaggatttaagtccgacacgttcagggaattttattctgcacctttaaccggatcccagctagccttagtctaaacaagcatttttcaaagtgcagtctgcagaacatgaaaggtcagaaggcttggaaaacactgcatcctgtagtcccttatgggtattcatgcacagtttctactagcaaattcaacacctgagaagtcctgcagtaaagaaagctgcttaactttgtttaacccgacgcacttatttgaccatcctagaactgctgtcataggaaaaaaacacctattaatatcttgtggtatcggctttgggaaacaccctccaccttgagtcttcattttccaacttagagaaagctgccttcctggagcccagtttacaggtatgagacccattgcatcgggttcagacagaaaccagcagcagctccactaagatgacacaggttgtaacaatgaccaagggtcctgctgaagccaaaaggcgggaagactccccagaacatgggcagtttagaagaaaaatacagttctgtcccagaagagcaagctcttctcaggacctcacaattccaccttgagcctaacttgttgctgcttcttgcagccaagatgtctctgtggactgaagagcactgatcccaagctcaaagccttatttccctttcgaacaaacatcaagacaatttatgataaccagatacagggcccgcttctcctgcccgagactagactgcatccccttttatcacttaagcaccccttacaaactctaaa

SEQ ID NO: 914281 - DNA, 4001 bp, Homo sapiens
tcaaaggtctaccatgtcaactattgatgtttgcagggtaccgggcaggcagaaaatctgataaagcccagggtgagataaactgtgaaaggatgagggcttctcatttcacttagactccaatccaaacttcttatcagggagcacaaggccagtctgatctgggccccacaagtcctccagccctggtcacagcacttcttcctttaacagacctctaaccacatgggccttctggaagaaactggggggcctttgccctagctgattcttctatctggaaggccacatagctagcttctttataccctgaagcatccgctaagatgtcatctccttggagaggccttccctgacttcccagtctaaaaaaggattttttctctctctttcccggcctttctctcccctaaccccatctcatccttattcatctctttcatagcacttgcgctgctcctgggcctgtttgccctcagatccattcctcatcctctcctgtgtttcccaagtgtgccagcaggattctggctaggtttggcccatggcagccactgggagaacctggaaggtgcagaaagggtcaaacgaggtattgcctgcctccatctctgccttgggaggcatctctgcagctgccacctcttccccttggctccagtttccactggaaagtccaccacagttccaccttccccagggcgactccaccttggctccagaaacactactgctttccttgtcactcctgtcctgggtagtagctgctccttactgtgtctaatctctgagccgcctctctctcccctgtttggtttctcagctctctaccacctgtgtaaccaattccctgcattaaaattctaatacttcattggtttctgatcttctagttggaccctgactgatacagcacttattataacttgtaatttttaagttaatttgtccagttacttaattattgtctagacccagggactctatctatcttgttcattataacatctccagtcccagcacagcacccggcaaatagtaagctgtgttcattagtaatgcaaaatgcttgtcaagtgatgagaagaaatacaattgctgtctcctaagaaatcctcaaatttccaaaaagaaaagagaaatgccatttggaaatggtgtgtattttttcacatcagcagcaaagtgggttttgatcttttcagtgcaacagaggcaccgagacatccctcaataaataagaggtgagttaagtggtcttggttaaggaaccaacacagctctagggacataccagtccccatgaggtgcctcatatcaggacacacacccacagcctgcctgggtctgcatgactctatgtacacgaaaaccatgccttgggaacaaacctttttgcggtctccacagacttctgctctgccagctccttctgcagctccctctccttggcttccttttgcccgatggggcagtcctctgggacagtgaacagggacagggcatctttgctgtcctcttctcggagcactttagcaaacaccttctccgccaggagccggacttgctcatccacttcagagatgttcagcttgggaaactgccgcggcatctcagctagcaaagaaagaacaagcatgaattgcaggatgccctgagtcaccagcaccggggaagagaaggcactgaagtgagggccaggcccacctggtacttggggtcagctgtctacttaggaatgccccagaccaaacccagcatgccaatttcaaaattagctcaataagtaactggatgtgaagcatgtagggccacttaggtgtcaggagaaagcaagtgttcaaaattcaaagaatgaactgttcaactaggtgggcttccattttcccaaactcagggaatctgcagcacctggcagccctgccctcctgactttgttcccatgtttgagaagggacaagagagagttcagctctccctcctccagactatgaggatactgttatagctgcaacaataatcaaacctcactcccccacttcacagaggctttaacagctaaggtcgcacaagattacagcagagccctgggaaatccaaagctgcattcttcattacataaatcaaggccttttgctgaagagaaagaatctgctattgcagttccaaaccctctggaacctcctaacaagacacagcaaataaaataaaggttttagaacactctttacccagctgaaaactcactccctcaaagaagctttctctatccacctcctcgcatactgattccttactaacagtcactggcctcaaccacctgcttggttggttgggtttcattcttgcttgcttgctttcttcatttccttatttctttccttttttgcaattacttgtatagcacttaatatgtacactctggccaggcgcattggctcacgcctgtaatcctagcattttgggaggctgaggcgggcagatcacctgaggtcaggagtttgagaccatcctggccaacatggcaaaaccacgtctctactaaaaatacaaaaaaattagccaggcgtggtggcaggcacctgtaatcccagctgctcaggaggctgaggcaagagaattgcttaaacctaggaggtgaaggttgcaatgagccaagattgagccacttcactccaacctgggtaacagagtgggactctgcctcaaaaaaaaaaaaaaagtatactctggggccgggtgtggtggctcacgcctgtaataccagcactttgggaggtcaaggcaagaggactgcttgagcccagaagtttgagaccagcctggacaacatggcaaaacctcatccctaaaaaagatttaaagaattagccaggtatggtgatgcatgcctgtaatcccagctgctagggaggctgaggcaggaggatctcttgagccagggaggttgaggctgcagtgagttatgatcgtactactgcactccagcctgggagacagggtgagacctcgtctcaattttaaaaataaaatatatatatatatataaaatatatattatatataatatatattatatataatatatattttatatatgtatacatacatatatatactctgcaaagaacttcatacttattaactcagttaatcttattattcccacttgacagatgagaaaatgaaggcatagagagctaacatgcccagggtcacacttttaataagtcagcagagatttgtgctgttctcagcctttctctctcatccctttcctctctgatcctcagctcagggatctgaacccaggcacctggttcctgcctctgtcccctcacccaccatgctgtgctgcttctctttgtccacgtatgtgtccgggcaggggctcctcacagtccccagcataacacttgtggaatggattaatactgcacccttttcgacaagccaccctcgttgggagcagctctggaagaggagtttcccatctacctatgaccacagtttctttaaagttggtttaaagagagaagtggttttgtggaccagacagacaagaatggagatgagacagagccctgctgctgtccagcagggagaagtgcagctacaggggaggggaacacactaggccatcttgggacagtcattctccggcctcacaatgttctcatctgtgagataaagggattgaactaagtggtctctaaggccctctcagctctaagtggcataattctaggtaccagagagatttccggtgcctgaggagggcttgctgctctgagtctgagtggcatgtgggactaagtcatgacacagacaggaaggaagaaagcaggctagcaacaggcaatcagagtgaggtctgtggctcccttaactctgagacccaaggacctgccactccctgatgagaggagtgggagggagctggtggggaacagcctgtcaacacacaactgtctggggagcagacatcaagacagcgaggc

SEQ ID NO: 914282 - DNA, 4001 bp, Homo sapiens
ggcagctttaggggagaaagggtatctccctgttaacccgaaggctacatgttatctgcccatgacattttcaagacctgagacagattttgaggccatttgaagagtgatccagtcagtgtagaggcaaaaaaaaacaactacaaaaaacctcatctctcaaagagcttcttgacctagctgagagctaggagaaccttagaagacagaggctgagctaaggatgggactgagaggtcaaagagtctcccagccaccacctatgcaggtgtcattattcctagagagggcagccccataccatcatcctcagagcaagccaggccccatgaagctgcagccaggccaggccaactaccccagacctgctgtcaacactcctagaggtgtgaagtgacagaggctctgtctgtctggctcaatggctccactaacactcggccttagtgctgcacagccagggaaagaatttctcctctgcaggttccagctgcaggcagcttttccatgaagatggccaaatgttggtcactgcatcctgagggaaagccaacaggggctcaagaccatgctaaaatccctccttgtgctgcctgctttcacccagctcctttgctgatgtgtcgccatcaagctttcagccacatacagtttggggaaatgataccctagttagcaagcctctcctactccaaggcctctcaaaactctccccagggacctctgccagcctacaacagccattagcagctctgctggcaaagcagctaccagaagatcaagggcagaaagcagactgccagagcccaaggctgtacacctcccttgccgggagagagccaaagaggtaaggatgaaggcctcaaacgacctcatcaccctatcatccagtgcatccctcgcctccaggtagaagtccacctcagctgtccacatccagccagtcctcaagcacctaggaactttgcccagggtggcaagtcccaggtcccttaatttctctaaaccttgcgattccattctaggccgccagggaatcgggatgctgcccgctcacctgaggccgctggggctcgggccaccgcagaggcaggggtagggacagggacaggaacaggggacagggcaagggatcggaccggagtcagcgccaccgcctctgcgagcagggaaggcggaagccgcggttcagaccccagggcgctgctgattcccgcctgggccgcagggtccgcggggctggcccaaggtcagcagcgcagcctcgcgcgcactcaccgggttcggacgacagggccatgccgccggccgaaagggacggccgcagggctggagcaaaggggacgcgctgggcagagcggagcggggctgctgggcactgaggccagccggggccagggcccggccaggccgcgccccgcagcaggcgcgggggccgggcgttcagagggcgcagcgctgcggatccccggccaggagggccccgcgggaggagggagggccgcctcagcagggaggaagccggccagccgcgtgcagcccccgtcggtgccctacctgggcgcggagcggagcagagagagccgagaggctacctgaagcgcccgggccgcgccgccaacgggaaacttgagagcagcaggggcgcggcggccgccagggcccttggccggaagcacccgccgcctcctgggctccgcggggcccgcgccgcagcccggagcagatgccagccgggctccccagacctcaactgcgctggccccgccgggcttccacaccgctccccgtgccgcccgggcttgcccgacgtcctcccctccccgcacaacttttcccagcgcgagactctgggggtctcggccccgcacaggtgacttgctccctgtagttgcagcaacccgcaagcattggtttcttccaggcgtccttctggtcacttggatacacacacacacacacacacacacacacacacacactccctcgccaaccgtccactcttccaggcgtccttctggtcacttggatcacctacacacacacacacacacacacacacacacacacacacacacacacaccacgtgcacacgctccctctccaaccctcctcgctctgccttcacctgcccctcaaagtcctgaatgacctcctagttgccaaagccactgggtgccgtgcagcctccctcgctcacctcttcctggcatctgagcctgctgaccacgtcttccttcctgaaacgcttggagtgcagtttccagagttggcacccgcggcccccacctccagatttttcacatacctgggtacctacagcttctcggcctccgcggcctggcttttctctgtggtcccaccccagggtcccaccgtgccagcccgctctcccactccaaggcccactctgggcatctcagccactcccatggttttaacaacctcctgccggatgatggctcttgaatttcatctccagcccagaatgcccccgagctgctgaagatggtgaatctaactgcctagggaacatctcctctagatcttcctaggccggcggaagcggtccagacccaaactacctagttgcttcccaggaaaacgccagaacctgcttctgtgtttccagtctcagtgaatgataccggggtcggcaccaccacggggccacagttgggagccattcttgactcggtctccctttcctctctcaacgagtaagtcaccaagctcggagaggaaacttcattagtgagcacccactgtgtgtcctcactgtgtcaaccactttcacagagttgtctcatgtaagcaccaagttgtattccttctaccccatagtctgattggtctgatactcgcaattcgtgtattcataaacgttttgcacatgagactgcgttaatgagttacatattataaagaacactaaaaaaattaaaggatgtggtaaagatgaaacaataattttaaattgtttcatttttatgagtggtacaatatacctttttcttttcattttaaagttattagcaataatctgtttagtgattccactaatctgttagtgatttagtgattaaatcattaaaaatgatttaaataaatcttagtttaatactttatgagaccagaaagtgtacttgtaagttcagttaatgtccatacttggtcttaatggctattctttaaaaaaaaaaaaaaaagatatctcacaaagattaaatagacctgaatagaagaactgtatctttgcacttattaaatcatagttcttactgtttaaatttgatctatcaattttgcaaatgtgaaaactcttctttgtctatgaaatcaacattttcaatgatgttttcctcagctgttcttgcaaatcattttaacaaatgggacttttaaaacacttgaaattctgcatttgcaatattgtaaaatggatttagaagtatgcttctacattttgcagattgtggctatgagagtataggtgacactagcacgcttcgttttggcatgaaaatcacatgataatggaaacagttccaaacgtcaattttcaaagtgccttccctataacacaattcttctaaagcacatttgttacgtcagttcattgctgaaatatcacctttacccaaaaggatactgtgtgtgtgtgtgtgtgtgtgtgtgtgtgtgtatgtgtgtgtatatgtgtgtttctttctgctatgtatcacacttgtgacaatctcaggccagcacatcggaggtcagcaaatttggagcacttgttctttgttaaggaaactcatctttaaattcacagcgttcaagttgtttgccttgagataatcagtaaaccttggaatcataagaaagatttttagtctcattccacatctcaatacaaagtgctataaagattctgctatattttaattttttaattaaccatattattgacatcccatagtatttcatgatcttcttgcttcaacttcttgttgtactt

SEQ ID NO: 914283 - DNA, 4001 bp, Homo sapiens
caaatacttaaactctctgagccttcttttttttgtataattatggtgaggatgaagtgagagacttatcagcctagaaagcatcatctgctagatcctcaattaatagtcaaaattatttcctgtgctttagggaaaagagcttgggctgagtgtcagcagcctgggctctaatctggcccagaagtcacatggtacccctgtaaaatagggtaccacaagatgagaaccttggctccctggctcccagcccgattattcccagctcagggcaaaaagctcttcctgggtagatttctggagtaaggctgggtcatggcccactgaaggaggtctctgtctgtgctgaggtctctgtgctgtgctagctgctcactcacccaggcctgatgctgctgttcctgctgctgcagctctgtctcttccacacagggtcgatccagattaaaccacagagtctcagtcacacgagggaagagtgaggggaacaaagtggacatggctcctagactgagggaaagggtcaagtgaatgtgttttgctttgtttttgtttttaatttggttgtaatttgatttagggatagggtggaagacagcaggaaagcagcccctccccctaggaatcagacagacctggctttgagtcctggctccaccacttactagctgtttgaccttggctgagtcacttaacctctctgagcctcagtgtcttcatctgtaaaatggggataataacaattataccactgtcaaagttattctgataattaagtaaataatggatcaacaaagctgtttgcaggctgttcaaggagggatgagaatgggagtcaagtgtagggataggaatccagaatgcagactggcattatgaaattatacaaaattagaggtagcagggttctactgaaactatccctacctcctccacacactaaaacctgctttttgaccctttatgatggcccataccacacccacccagtgtcagaaatttaggacactaacgacctctcatgaatcacagccaaatgtcggggtggagggattgtagcatatgcaagcagggttcagtaagacattctaggaggcatgaataagtggataaataagtagatggaagattgaatggatgaactaacattataagggtacaatcagctttgagcggctgagggagccgaccaggagtgccagataatctgaattaaacttaggacaggcgaactgaggcccagcgacaggcagagactggctttaggtcatacagtgtgtcggggcttagaattcctccgtgaaagggatgagcaggagaaaataatcgatgcctggtcctgcttttgtcttaatttatctgaccgacccagggccagccgctgcccttccctgtatctcagattcccaacccgcgtaattaggcacgacggtaaacaccctcatgtccaagaagtactgacagaccagcgatctcggctccgaaagcccaacccaccgtcgcaaagccaccgccctttctttgctcattacgataatgaccatgcagttgaccaacagaaagaaagcagggcgggtctcagacagaaatttggccttatagggttgctaaacgcgaaaaaagcggggcctgggtaggaccaattaactgaaagaaatgctgggtgacaggaagtgacaccaatgaatgacggaccttgtgtgacggggtggggcttagtctcgaggaagcggccaatgagctggagctctttaagggttaaggactctcaatatggagctcctggggagtcgggtcaaaggaaatgggtttctctgggggaaaaaggaatgaaggggcaaggagacggttgcagccttgcgtctgtacttaccgcgccgggaggctgctgccggcggcgacccggaagcgcttcacccagcctgagcggaagaacccaccagaatccgggactcaccaaacgcatgcgtccttcgtctccttttgttttccccgctcccgcccactaaaccggatgtgacgttgacctaccttagtcacattgttagggaaggaagtgtgccgcgcctacctatctgccccgccttgagtctcagccagtcggcgtctccatcctggcgccagcactacggtctcgtttaaccactgccccgtttaacccctgcccttttgttgccagtcaccatttgcttgttaaccccttctgaagaagagctgacagcaaccttttagtgcgagggccattcgtcctgctgcatcccagaaaactaatctgttactacttcagaattgctggttgatgttaggcccctcctatctgtgctctctcagctacagtttcccgtttgagcatattcattcttttttatttttgctctgaacaaaaatattagagttacaatattactatattccaggccttgctagaaactggggataaatctaggaatatggtcgcttccctggaagacctcacagtccagggaagccaaaccctgcagacatgcagtagacttagtggtctctcttaaggttgcttgttgagttttgacattggagattatgtacagacttgaatgactagttagcctcaggcacagcattctgttgctgggggaatcagctgccctcctcaggcctgggccaagtacacttagagatcgccctcgtcacctctcccatcctttgctgatgcctctgttctagtaacctctgactcagcttcgcctttagagatactcatgctttctggcaacagaggtccttcaaacccaattcctattaaactccatcacttaccagcctctttcagggacagcagttatccgcatttccagtactgtcctggccagatgtgtgagttttggcaattccttttcctctctctggactcagcttctttgtcaaccagcatcataatctctgcccagccttccttctatcctgggctgatgtgaagattggataagaattgttcaagaggtcgtgtactgtgcatattgaatgtgattatattgccaaatagcactgtttgttatagtttttcattaaagagtaaactttgcctcttggaaatgactacctttttcattcattcaacaaatacctactgagtgccttagtatatgtccatcactattcttagtagtgggtatacaatagtaaacaaaacagaccaaaaaagtccctcttttcatgcagccttcattctgagagaggtaaacaataaagaagatagataaataaaatatgtagttgtaagattgcagtaaataagagaaaaaataaatctgagaagtgggaataaaatatttgcaggggaggtgttttatttcagactggggggccaaagtcactgggaaggtgacttttgagtaaaggtctgaaggagcagagagccttctgatatttgtggaagagcatttcagagagagagaatacaagtgcagagggcctagaatggcttgggcatagtgtcctctagggagagtaataggtaggagatgaggagttggggagccagtggagggttgtgagcacagggtccacacaatctgatttacagtttaactgagttactctggctgttctccaaatagactggggtaggggagacaatggcagaagcagggagaccatttgggagcctattatgataatctagaggtagtggatgagaagtggttgaattctgaatttatttagatggtagagactacaaggtttgctaacagatggacaatgccagaataagaaaggagccacgatttttgggctgaacgactagaagattggtgttgccacttttttgagttgggaaggaatggggaggtgatgaggggtttggtttttttttgacagggagcttaggtttgagtgtgttgagtctgagatgcccattagagtagagatgttggggcggcaggaaggcatatgagtctgcaggtcagggcagagatctgggctggatagatcatttgggagtcattggcatgtagatg

SEQ ID NO: 914284 - DNA, 4001 bp, Homo sapiens
tctctctagggccaatgaatgaccccctaccccgacactccctccttgagtctagcaggctggtgcatgttctgcaggaccttaatgctaggcccaatgcccaccccttctatctccccttttaggcttttacccagatctgagaaccacaactgctctgggtcagagacaggacattcagaattagagcagagcctcggtccactgcggcccccacacaggccccacctgctagagccactcacctctgaggctggcttgccaataggaaccaggttgttgtctttctccgcgatgctttggagctgtgggcaaaggcacagaggaacaaggccagagcccaagtagggcaggtcaggggcatgggactggcccattctgcccagaagacaacccacacgtgttggggagaagcttcctcccagttctcagggagatacaatccctttcttgtcatctgccatttatgaacttgatccaaatacttaaactctctgagccttcttttttttgtataattatggtgaggatgaagtgagagacttatcagcctagaaagcatcatctgctagatcctcaattaatagtcaaaattatttcctgtgctttagggaaaagagcttgggctgagtgtcagcagcctgggctctaatctggcccagaagtcacatggtacccctgtaaaatagggtaccacaagatgagaaccttggctccctggctcccagcccgattattcccagctcagggcaaaaagctcttcctgggtagatttctggagtaaggctgggtcatggcccactgaaggaggtctctgtctgtgctgaggtctctgtgctgtgctagctgctcactcacccaggcctgatgctgctgttcctgctgctgcagctctgtctcttccacacagggtcgatccagattaaaccacagagtctcagtcacacgagggaagagtgaggggaacaaagtggacatggctcctagactgagggaaagggtcaagtgaatgtgttttgctttgtttttgtttttaatttggttgtaatttgatttagggatagggtggaagacagcaggaaagcagcccctccccctaggaatcagacagacctggctttgagtcctggctccaccacttactagctgtttgaccttggctgagtcacttaacctctctgagcctcagtgtcttcatctgtaaaatggggataataacaattataccactgtcaaagttattctgataattaagtaaataatggatcaacaaagctgtttgcaggctgttcaaggagggatgagaatgggagtcaagtgtagggataggaatccagaatgcagactggcattatgaaattatacaaaattagaggtagcagggttctactgaaactatccctacctcctccacacactaaaacctgctttttgaccctttatgatggcccataccacacccacccagtgtcagaaatttaggacactaacgacctctcatgaatcacagccaaatgtcggggtggagggattgtagcatatgcaagcagggttcagtaagacattctaggaggcatgaataagtggataaataagtagatggaagattgaatggatgaactaacattataagggtacaatcagctttgagcggctgagggagccgaccaggagtgccagataatctgaattaaacttaggacaggcgaactgaggcccagcgacaggcagagactggctttaggtcatacagtgtgtcggggcttagaattcctccgtgaaagggatgagcaggagaaaataatcgatgcctggtcctgcttttgtcttaatttatctgaccgacccagggccagccgctgcccttccctgtatctcagattcccaacccgcgtaattaggcacgacggtaaacaccctcatgtccaagaagtactgacagaccagcgatctcggctccgaaagcccaacccaccgtcgcaaagccaccgccctttctttgctcattacgataatgaccatgcagttgaccaacagaaagaaagcagggcgggtctcagacagaaatttggccttatagggttgctaaacgcgaaaaaagcggggcctgggtaggaccaattaactgaaagaaatgctgggtgacaggaagtgacaccaatgaatgacggaccttgtgtgacggggtggggcttagtctcgaggaagcggccaatgagctggagctctttaagggttaaggactctcaatatggagctcctggggagtcgggtcaaaggaaatgggtttctctgggggaaaaaggaatgaaggggcaaggagacggttgcagccttgcgtctgtacttaccgcgccgggaggctgctgccggcggcgacccggaagcgcttcacccagcctgagcggaagaacccaccagaatccgggactcaccaaacgcatgcgtccttcgtctccttttgttttccccgctcccgcccactaaaccggatgtgacgttgacctaccttagtcacattgttagggaaggaagtgtgccgcgcctacctatctgccccgccttgagtctcagccagtcggcgtctccatcctggcgccagcactacggtctcgtttaaccactgccccgtttaacccctgcccttttgttgccagtcaccatttgcttgttaaccccttctgaagaagagctgacagcaaccttttagtgcgagggccattcgtcctgctgcatcccagaaaactaatctgttactacttcagaattgctggttgatgttaggcccctcctatctgtgctctctcagctacagtttcccgtttgagcatattcattcttttttatttttgctctgaacaaaaatattagagttacaatattactatattccaggccttgctagaaactggggataaatctaggaatatggtcgcttccctggaagacctcacagtccagggaagccaaaccctgcagacatgcagtagacttagtggtctctcttaaggttgcttgttgagttttgacattggagattatgtacagacttgaatgactagttagcctcaggcacagcattctgttgctgggggaatcagctgccctcctcaggcctgggccaagtacacttagagatcgccctcgtcacctctcccatcctttgctgatgcctctgttctagtaacctctgactcagcttcgcctttagagatactcatgctttctggcaacagaggtccttcaaacccaattcctattaaactccatcacttaccagcctctttcagggacagcagttatccgcatttccagtactgtcctggccagatgtgtgagttttggcaattccttttcctctctctggactcagcttctttgtcaaccagcatcataatctctgcccagccttccttctatcctgggctgatgtgaagattggataagaattgttcaagaggtcgtgtactgtgcatattgaatgtgattatattgccaaatagcactgtttgttatagtttttcattaaagagtaaactttgcctcttggaaatgactacctttttcattcattcaacaaatacctactgagtgccttagtatatgtccatcactattcttagtagtgggtatacaatagtaaacaaaacagaccaaaaaagtccctcttttcatgcagccttcattctgagagaggtaaacaataaagaagatagataaataaaatatgtagttgtaagattgcagtaaataagagaaaaaataaatctgagaagtgggaataaaatatttgcaggggaggtgttttatttcagactggggggccaaagtcactgggaaggtgacttttgagtaaaggtctgaaggagcagagagccttctgatatttgtggaagagcatttcagagagagagaatacaagtgcagagggcctagaatggcttgggcatagtgtcctctagggagagtaataggtaggagatgaggagttggggagccag

SEQ ID NO: 914285 - DNA, 4001 bp, Homo sapiens
agttcaagaactgacccacttgagcctctctctagggccaatgaatgaccccctaccccgacactccctccttgagtctagcaggctggtgcatgttctgcaggaccttaatgctaggcccaatgcccaccccttctatctccccttttaggcttttacccagatctgagaaccacaactgctctgggtcagagacaggacattcagaattagagcagagcctcggtccactgcggcccccacacaggccccacctgctagagccactcacctctgaggctggcttgccaataggaaccaggttgttgtctttctccgcgatgctttggagctgtgggcaaaggcacagaggaacaaggccagagcccaagtagggcaggtcaggggcatgggactggcccattctgcccagaagacaacccacacgtgttggggagaagcttcctcccagttctcagggagatacaatccctttcttgtcatctgccatttatgaacttgatccaaatacttaaactctctgagccttcttttttttgtataattatggtgaggatgaagtgagagacttatcagcctagaaagcatcatctgctagatcctcaattaatagtcaaaattatttcctgtgctttagggaaaagagcttgggctgagtgtcagcagcctgggctctaatctggcccagaagtcacatggtacccctgtaaaatagggtaccacaagatgagaaccttggctccctggctcccagcccgattattcccagctcagggcaaaaagctcttcctgggtagatttctggagtaaggctgggtcatggcccactgaaggaggtctctgtctgtgctgaggtctctgtgctgtgctagctgctcactcacccaggcctgatgctgctgttcctgctgctgcagctctgtctcttccacacagggtcgatccagattaaaccacagagtctcagtcacacgagggaagagtgaggggaacaaagtggacatggctcctagactgagggaaagggtcaagtgaatgtgttttgctttgtttttgtttttaatttggttgtaatttgatttagggatagggtggaagacagcaggaaagcagcccctccccctaggaatcagacagacctggctttgagtcctggctccaccacttactagctgtttgaccttggctgagtcacttaacctctctgagcctcagtgtcttcatctgtaaaatggggataataacaattataccactgtcaaagttattctgataattaagtaaataatggatcaacaaagctgtttgcaggctgttcaaggagggatgagaatgggagtcaagtgtagggataggaatccagaatgcagactggcattatgaaattatacaaaattagaggtagcagggttctactgaaactatccctacctcctccacacactaaaacctgctttttgaccctttatgatggcccataccacacccacccagtgtcagaaatttaggacactaacgacctctcatgaatcacagccaaatgtcggggtggagggattgtagcatatgcaagcagggttcagtaagacattctaggaggcatgaataagtggataaataagtagatggaagattgaatggatgaactaacattataagggtacaatcagctttgagcggctgagggagccgaccaggagtgccagataatctgaattaaacttaggacaggcgaactgaggcccagcgacaggcagagactggctttaggtcatacagtgtgtcggggcttagaattcctccgtgaaagggatgagcaggagaaaataatcgatgcctggtcctgcttttgtcttaatttatctgaccgacccagggccagccgctgcccttccctgtatctcagattcccaacccgcgtaattaggcacgacggtaaacaccctcatgtccaagaagtactgacagaccagcgatctcggctccgaaagcccaacccaccgtcgcaaagccaccgccctttctttgctcattacgataatgaccatgcagttgaccaacagaaagaaagcagggcgggtctcagacagaaatttggccttatagggttgctaaacgcgaaaaaagcggggcctgggtaggaccaattaactgaaagaaatgctgggtgacaggaagtgacaccaatgaatgacggaccttgtgtgacggggtggggcttagtctcgaggaagcggccaatgagctggagctctttaagggttaaggactctcaatatggagctcctggggagtcgggtcaaaggaaatgggtttctctgggggaaaaaggaatgaaggggcaaggagacggttgcagccttgcgtctgtacttaccgcgccgggaggctgctgccggcggcgacccggaagcgcttcacccagcctgagcggaagaacccaccagaatccgggactcaccaaacgcatgcgtccttcgtctccttttgttttccccgctcccgcccactaaaccggatgtgacgttgacctaccttagtcacattgttagggaaggaagtgtgccgcgcctacctatctgccccgccttgagtctcagccagtcggcgtctccatcctggcgccagcactacggtctcgtttaaccactgccccgtttaacccctgcccttttgttgccagtcaccatttgcttgttaaccccttctgaagaagagctgacagcaaccttttagtgcgagggccattcgtcctgctgcatcccagaaaactaatctgttactacttcagaattgctggttgatgttaggcccctcctatctgtgctctctcagctacagtttcccgtttgagcatattcattcttttttatttttgctctgaacaaaaatattagagttacaatattactatattccaggccttgctagaaactggggataaatctaggaatatggtcgcttccctggaagacctcacagtccagggaagccaaaccctgcagacatgcagtagacttagtggtctctcttaaggttgcttgttgagttttgacattggagattatgtacagacttgaatgactagttagcctcaggcacagcattctgttgctgggggaatcagctgccctcctcaggcctgggccaagtacacttagagatcgccctcgtcacctctcccatcctttgctgatgcctctgttctagtaacctctgactcagcttcgcctttagagatactcatgctttctggcaacagaggtccttcaaacccaattcctattaaactccatcacttaccagcctctttcagggacagcagttatccgcatttccagtactgtcctggccagatgtgtgagttttggcaattccttttcctctctctggactcagcttctttgtcaaccagcatcataatctctgcccagccttccttctatcctgggctgatgtgaagattggataagaattgttcaagaggtcgtgtactgtgcatattgaatgtgattatattgccaaatagcactgtttgttatagtttttcattaaagagtaaactttgcctcttggaaatgactacctttttcattcattcaacaaatacctactgagtgccttagtatatgtccatcactattcttagtagtgggtatacaatagtaaacaaaacagaccaaaaaagtccctcttttcatgcagccttcattctgagagaggtaaacaataaagaagatagataaataaaatatgtagttgtaagattgcagtaaataagagaaaaaataaatctgagaagtgggaataaaatatttgcaggggaggtgttttatttcagactggggggccaaagtcactgggaaggtgacttttgagtaaaggtctgaaggagcagagagccttctgatatttgtggaagagcatttcagagagagagaatacaagtgcagagggcctagaatggcttgggcatagtgtcctctagggagagtaatagg

SEQ ID NO: 914286 - DNA, 4001 bp, Homo sapiens
gcaggacagagcctgtaagccctacaggcctgcatggaccagttcaagaactgacccacttgagcctctctctagggccaatgaatgaccccctaccccgacactccctccttgagtctagcaggctggtgcatgttctgcaggaccttaatgctaggcccaatgcccaccccttctatctccccttttaggcttttacccagatctgagaaccacaactgctctgggtcagagacaggacattcagaattagagcagagcctcggtccactgcggcccccacacaggccccacctgctagagccactcacctctgaggctggcttgccaataggaaccaggttgttgtctttctccgcgatgctttggagctgtgggcaaaggcacagaggaacaaggccagagcccaagtagggcaggtcaggggcatgggactggcccattctgcccagaagacaacccacacgtgttggggagaagcttcctcccagttctcagggagatacaatccctttcttgtcatctgccatttatgaacttgatccaaatacttaaactctctgagccttcttttttttgtataattatggtgaggatgaagtgagagacttatcagcctagaaagcatcatctgctagatcctcaattaatagtcaaaattatttcctgtgctttagggaaaagagcttgggctgagtgtcagcagcctgggctctaatctggcccagaagtcacatggtacccctgtaaaatagggtaccacaagatgagaaccttggctccctggctcccagcccgattattcccagctcagggcaaaaagctcttcctgggtagatttctggagtaaggctgggtcatggcccactgaaggaggtctctgtctgtgctgaggtctctgtgctgtgctagctgctcactcacccaggcctgatgctgctgttcctgctgctgcagctctgtctcttccacacagggtcgatccagattaaaccacagagtctcagtcacacgagggaagagtgaggggaacaaagtggacatggctcctagactgagggaaagggtcaagtgaatgtgttttgctttgtttttgtttttaatttggttgtaatttgatttagggatagggtggaagacagcaggaaagcagcccctccccctaggaatcagacagacctggctttgagtcctggctccaccacttactagctgtttgaccttggctgagtcacttaacctctctgagcctcagtgtcttcatctgtaaaatggggataataacaattataccactgtcaaagttattctgataattaagtaaataatggatcaacaaagctgtttgcaggctgttcaaggagggatgagaatgggagtcaagtgtagggataggaatccagaatgcagactggcattatgaaattatacaaaattagaggtagcagggttctactgaaactatccctacctcctccacacactaaaacctgctttttgaccctttatgatggcccataccacacccacccagtgtcagaaatttaggacactaacgacctctcatgaatcacagccaaatgtcggggtggagggattgtagcatatgcaagcagggttcagtaagacattctaggaggcatgaataagtggataaataagtagatggaagattgaatggatgaactaacattataagggtacaatcagctttgagcggctgagggagccgaccaggagtgccagataatctgaattaaacttaggacaggcgaactgaggcccagcgacaggcagagactggctttaggtcatacagtgtgtcggggcttagaattcctccgtgaaagggatgagcaggagaaaataatcgatgcctggtcctgcttttgtcttaatttatctgaccgacccagggccagccgctgcccttccctgtatctcagattcccaacccgcgtaattaggcacgacggtaaacaccctcatgtccaagaagtactgacagaccagcgatctcggctccgaaagcccaacccaccgtcgcaaagccaccgccctttctttgctcattacgataatgaccatgcagttgaccaacagaaagaaagcagggcgggtctcagacagaaatttggccttatagggttgctaaacgcgaaaaaagcggggcctgggtaggaccaattaactgaaagaaatgctgggtgacaggaagtgacaccaatgaatgacggaccttgtgtgacggggtggggcttagtctcgaggaagcggccaatgagctggagctctttaagggttaaggactctcaatatggagctcctggggagtcgggtcaaaggaaatgggtttctctgggggaaaaaggaatgaaggggcaaggagacggttgcagccttgcgtctgtacttaccgcgccgggaggctgctgccggcggcgacccggaagcgcttcacccagcctgagcggaagaacccaccagaatccgggactcaccaaacgcatgcgtccttcgtctccttttgttttccccgctcccgcccactaaaccggatgtgacgttgacctaccttagtcacattgttagggaaggaagtgtgccgcgcctacctatctgccccgccttgagtctcagccagtcggcgtctccatcctggcgccagcactacggtctcgtttaaccactgccccgtttaacccctgcccttttgttgccagtcaccatttgcttgttaaccccttctgaagaagagctgacagcaaccttttagtgcgagggccattcgtcctgctgcatcccagaaaactaatctgttactacttcagaattgctggttgatgttaggcccctcctatctgtgctctctcagctacagtttcccgtttgagcatattcattcttttttatttttgctctgaacaaaaatattagagttacaatattactatattccaggccttgctagaaactggggataaatctaggaatatggtcgcttccctggaagacctcacagtccagggaagccaaaccctgcagacatgcagtagacttagtggtctctcttaaggttgcttgttgagttttgacattggagattatgtacagacttgaatgactagttagcctcaggcacagcattctgttgctgggggaatcagctgccctcctcaggcctgggccaagtacacttagagatcgccctcgtcacctctcccatcctttgctgatgcctctgttctagtaacctctgactcagcttcgcctttagagatactcatgctttctggcaacagaggtccttcaaacccaattcctattaaactccatcacttaccagcctctttcagggacagcagttatccgcatttccagtactgtcctggccagatgtgtgagttttggcaattccttttcctctctctggactcagcttctttgtcaaccagcatcataatctctgcccagccttccttctatcctgggctgatgtgaagattggataagaattgttcaagaggtcgtgtactgtgcatattgaatgtgattatattgccaaatagcactgtttgttatagtttttcattaaagagtaaactttgcctcttggaaatgactacctttttcattcattcaacaaatacctactgagtgccttagtatatgtccatcactattcttagtagtgggtatacaatagtaaacaaaacagaccaaaaaagtccctcttttcatgcagccttcattctgagagaggtaaacaataaagaagatagataaataaaatatgtagttgtaagattgcagtaaataagagaaaaaataaatctgagaagtgggaataaaatatttgcaggggaggtgttttatttcagactggggggccaaagtcactgggaaggtgacttttgagtaaaggtctgaaggagcagagagccttctgatatttgtggaagagcatttcagagagagagaatacaagtgcagagggccta

SEQ ID NO: 914287 - DNA, 4001 bp, Homo sapiens
cgactgcagagggaatgccagaagcattaccgagtggatgagagaatgcagggaaggaaaatttccacttcacaaagacattttaaagagacggtgtttggggatgatgatgccacagaaagactcacaactcaaaatctcacaacaggattcagtagtttaacaaattcaactccaaattgtcccccagacaatcactgcagactcctcccggtggcaattgcctgtatctgaggattttacatctgtctttcgtcactgtcggtactgccacaaaaacactctcataaaaagggaggcagaactgcatcaggctctaaaacaacactcagctcacccctcgcgcaacaacccgggtccctagggatgcttgggttgccacccgccgctcgaagctggaggggccgccggagcctgcgattggctgcttcgggcacatcgtcccgccccgacctgtagctcctcccaggtttccgttgtcaaggacgcgccgtcggttgttgtcaagatggcggctgcagggttgctgccgccccatctgctattgcccggcgaggtcgccgctgcctcagctgccatcgccgctacaggcaccagtgccgctgcgcgggagctagggctgtcgaggccaacccttccgcgcccgtgacgcggggcctgagagacggagtgtagggaggggccgagcaggaggaggaggaagccggagctgccatgagggaggttctgggggcgagcagacaggcggcgctgaagtgaaggatgctggcggggaggcccggaacccggagcgcggtcggggaactgggcactgaatcatcggacaacctcgacagagcccccctcggccctcgggagagcggcgggcatcaccgacctggctcttacctgtatccttcccagcctgtggctgccagggtagcgatgttgaaaacggggcccatctttttccaattagattcccattacctttgacgcagggtgatcaaaactagcaagtcatcttagtgcagatatttcctttagcaactgtcgtgtctcaccttagacctgaaattataccattttatctaattctgtggctgcttccccccatcaccctgttatcctactcccattcttcaactttgtaaaatttttgtgaattttaaaacacatcaactgtgtattctgtggggatatttttatgccattatgttctttacttacatattaactacttcctgatttatcgtactacttggagagagaaattacacaaataagtaaaatgttttgctatcctaaagagtccgttttaacagttatcctaacacagccctaaatgcatttaccagagctgctaaaggctacacagtttggtaagttgttttgttttccatctctgcccagtctgttgtcagagcgacagaaaagaggaaatgagaaacaggggacctggacgctttacaatctggattaactctgacttttctcgaagagttggttaagcctacctttgatgttgctgttggttgcattgtagaaaatggaaagaggagaagtattttgttatcaaaatctgtaaatcaggtttattcctttagagactgttgtgatgattaggatttaacctttgtattcccaaaggacttggttggcaatgatggtgttgtgtaatcatcttcagtcttgtcagagatgagtgtcttctctttccaagttaactctgttttcttatcccctttgtctccaatttctaggatgttctttgtactctgttacaattttagcagcaagtcaacaatttgtattgagtgcctgctctttggctgactctgttctaggttctagggatacaaatctagtgaggaagacaaatgtgtatagagcttcactaaaagtaaaatatctcttctccgatcatgctttctgcaatcttccatcccttcagtcttttctttctttgggcaggttctcaaaatggtagcttgcaatagctgcttctagttcctctcatctattcattattaaccccattcagtttggcttttgcccttgctgctccccaaaattgccctcttaaaggttactctgaaatgaacacaatcattttctgtatggatttaattctggcctcttgacattatattttcttggacacaactgctattacacgaccctgatttatctctaaatcagaaaatagggaagtattgtaaatggctcattgagagtgtattttctgttattttcattaataaaatggttgtaggcctcattttttaaattttatgtggtataaatttttgatacaaatgccaaagaaaatattcataaatagaatccagcaatactttgaatgaacacaaccaaatagactctattccagaattagaatgacatttcctataaagaaatacaacactaaaaaagatccttaaaggctaaatatatagttaaaattaggcaagttataaatgaacattttaatagatgaccaatagactttgataaaatccaacaatgtgtgtgtgtgtgtgtgtgtgtgtgtgtgtgtgtgtgtgtgtgtgtgctggtttatatatatttttgctagtttgcatatgtgtgtatatatatgtttagataatatatatttaaattggaacagaggaattatttttgaacataataaagattataacactaaatcaagaacattatgtttgctagctggaaaaacactaaagtaccttttatataagtttaattggaatgttctttgtgtctataatgtttcccattggatacctagcacagagtaggtgctcaaatttacatgactaaatgaaaaaaaggaaagaaagcaaatgaaaggaccacagccttaaaataagcaagtatgtggtaacatttacatttcaatttcaaatatgaacatgatactcagaggccatctggctttctgttgaagacattttctcactggagtcagaattttctgactctaaaggttataaaacaacaaaaccttatgaagtttatttaattaaaattagctaaagttctgtcatttcaatctctttttctcttttgagagttcaaatagaaatggaatttaaaaaaaaaaaaaaaaggaaggtctctcatgtccccttatacctgcctttttttcctcataaatatctctacccttcaaccctcccattttatcctagcacccaccttgcctctcctttcctctccagtttataccctattcttaactatttgaactttctctcaccaacatctttggctatttgtaccccaatcattctgcctcagccactcaataactactatagtcctgctcctttactccttcatgcgaataataaaaatgctgtcaaagaaaaatcacaaaacaatacagattgtaccactaaagattgatggtttccagcttcacctaaacaggaacagggttctttctttttcctatgaatgcctctgccaggtctctgtcaccttccatcacactcgatagactgtcttaccacttgataagacttggatgccctgacaggtctgttccaacaaacagcacaaacacacacactcccacccacctgtctttttttccccccaggctcactgatgggatcttacttttactatagaaagtgaagtgaacccattcagctgggcccagtggctcacatctgtaatcctagcactttgggaggccgaggtaggcagattgcttgagtccaggagttcgaaaccagcctgggcaacgtggtgaaaccatatctctacaaaaaatacaaaaattagctgtgtgttgtggtgcatgcttgtagtaccatctacttaagaggctgaggcaggaagattgcttgagactgcgaggtggaggttgcagtgagccgagattatgccactgcactccagcctaggcaacagagtgagaccctgtctataaataaataaataaattgtattttgctaatacatacataataaaacatagttttgtaccttgtgtttctaaaagg

SEQ ID NO: 914288 - DNA, 4001 bp, Homo sapiens
ccttttcccatctttgtacttaccatgcccctcttgccacagattctttgcacactctgttgtctgttcttggaaaactttctcctcctcacctacttaacttatactcattcttcacatttcagctgtagtgtaacttcttcaaggaagccttttctgatatcagtcaaactttctgttaatgagctctcctagagccacaaatctccccttcttaagcttctcacagtagcacatttacatttacatgtggggttatctggttaatgtcttcctccccctaggctgcaatctcccggagagaaaggacacatctgttgcattcatcgttaatcccagggtgtagaacagtgcctgacacatagtagaagagcagtaagcatttgtcaagtggatgaatgaatgaatagctggaaagaggatctagtaaagtaatgcacgtaaagctcctagtatagtaatccatacatactaagtcttaattaccattaattatcttaccccctccacccagggaattcccagaacttgggaagggaaagtggcaggagttagcatcaatgtctcacagtgtaatcatgtcactgccatctgtttcctttcgttctatattcaaaaggctataaatgatttagacaaatcctagcatactctgaccctcctccaaaaccaacaggcagatgttgagggaggaaggtgagtgggccttaggcgatcttatttttcctctcctcataaggtgggggaaggcctgggaactgagtgtgtggcacctgaggctgtatcttaagagtttgcatggtaatcctagagaaccacagatagcatccaagccagatgccagtcagagagacccccgtcccggactctctaattgatgtcccagagccttgggaggaggacatggttatcatgctcaggtttaacatcccgagtgtcttcttcatggctgcaaggtgcaagcacacagctagtatatgcaactccagtgggaatgagactggattccaaatcagtgggaagacagagaataatggaaacgtaggaaagaggtaggaagagaaaaataggggcatgtcaaggcgtcgctgtagtgcgcatgacagcaagggacaaaaacaaaaacagagatgagagaactccagacttgaccctccaagggcctggacaggccatcaggccgggcagtctccatcccctgacctcctcagcctgcactgattgggaggggcctcctccctcccgccaccgtgggaagagagaacatgattccctgcagatctgagcaaagtgccacagcctcccaggatgctcagccctgccctgagagctggggtgggtaggaggatggcagagagcggtcaagagcagttattgccacaggacaccgggggaagaaggcgctggagagaaggatggaagcaggcaggacaagttcggaaggtcagatgggataaaggcgtctttggtaggtagttcccgcttgcctttgacctctgttgagtctacaaacaggtattatgtgccaactctattttggttagggagacaggtatgggtgtgcctgggaggctcaggctactgggtggaattcagaaataccgcgggggacagtcctcagccccaaactcagcccactccttcctcgcaagctccctgggcccaaagcttgccgggcctcagtttctcctccgagaaaggggagggcgaggctggcagtacctggcggcgtcgggtggaaggcagggggcgcacttgatggcgtactccgtccgccagcgcctgtgccgcgcctggaacacctggctgaagccgccgctggccactaggcgccagtcgccctcgaagtcgtcgcgggtgaagacggggaggctgcccagccgcagctcggtggggtcggcagccattgcccctctcttcctgtccccgcgccgcgcactccccgctgtggctgctgcctgggtggccgaaggagccgccgcttcctgctcctcgggtccgggagaggggaatggggagacgagccggccctgcctccttccccgcccaagaggagccgctcctgccccgcaaaggtggggaaatcccagacatgagccctgaggccccagcagggatggagcgacctgggcctggggaagagggtatgtccctccgaagccctcgcatttcccctgtctcagcctttgattttccccagttccccctagggagggatgctgggagaaggtgtcccgaagctggaagaagtccagcctgagaagttggatccagtttatttaggcccagcgctaagtgaaatcggtttatgcattccttcagtgcattcaaggttttatggtttatgaaggattcaggcctggacccctgcccctatccagcaagtatggggctcaaacaattttaatggggattttctggtctgaatctgttggtctgactggtttcatgtttcctttgttcttgttggggttttgtttgtttgtttgttagccagccttggtgtgctataggttaccaaggaggggtcagcagggacagagttgcgggggaggctgggctcctgtctgcaggggactcccttcctgggctgcgctctatccaacctcagagggatggaccccagcctcggggtggccacgggggaggtggcctccttggcgcagttactaggggcagtttgttgccagggatgagaggaggctctagctggagcctgaccagtgctgagcttggaggttcccctgggtcctgggtccatgggattgccctctcaccttggagaccctcagagcagggaaaatgacaagtgcttgaacagacaggtctccccaggggcactgaccaagtgggccattgcccagagacaggcatacctggaggaactgtggccacggagtgcagagtcagccactatttgcctacagctgagtaagtccacaaggagccctcagagtgatcactgttaggtttgaggagcctacctaccagacaaggaagtgccttgccttcagcccaaacctgcagagcccctcgtccatgccacaagcccaccagactcccagggaacagtgtaggcatgataggcaaacagagactccctgtggaagctggagaacttgctccctctgtaacaacttacctgcaacttccaggatgaattctggcaagcagattaaggatcaaagattgggcctggagacagttgtcatagaaactagtgatagccactactaattgaacactcactttgttccaggatcagtgactatttcagttactgcattgctttacatatattatcctgtttatcttgcaacaatgttatgaggtcaacatcttctattcacagatgaggaaactggcttcaagacaataagtaatcaatggacacatagctagtaagtggtagttgatattcaaactcaagtctcttagtttctatggaaatggttggccaggggaggatcagggagtagccttttatgaatacaaaaaaggaagagagagagtcatgctccctggaagagggtggagatgatggaaactgcatcaggagcaggacgtatcccccaaacatatgtcagagggaggcccccagcttgctttggctggagcaagacagggcataacagaacccattgtctctggagtagccctgcctgcccaagtttaaagcctctgccagagaagtttggaaggtgataaaggacattgtcatcagggagaccaggaggtcaagaggatgtttcataccttctactgggagggtgaacatggagactgggaaggtgaccagccacccagctctgcggaagtttgactgaggcccgatctttgacattcagcgagacctatctcagctcctggaggaaataccaagggtgaatggcctgagtcatttcagcagttccccttgatccacttatacctgaagtggctctccagggagaggaagtaaccagaagctgccattgtctgcctgcagagactgtcacagg

SEQ ID NO: 914289 - DNA, 4001 bp, Homo sapiens
ctgcctccctgggctcaggtgattcttccacctcagcctcccgagtagctgggaccacaggtgtgtgccaccactcccagctaatttttgtactttttgtagagacggctttcaccatgttgcccaggctggtctccacctcctgggctcaagtgatccgcccactttggcctcagaaagcgctgggattacaggagtaagccacaacgcctggcccttcatcaagtcttgacgcactgctatggctcagctacgcccaaccactctgccctggagagggtgggccaagtggggcactacagtggtcttcagacaatgaggctgtaagcacctggaggtggagggccagcctcaacctggccatgagcctgtgcagagccctgggggagcctttgtttccactgggtctcagagtcctactctgtaaagggggcacagtggctccctccgagcctgctcctggggtagggggtatgagatagtatgctctgccagccaggcccctccgtgtgcttccagaagggtgcgtagtagcaagtattccagggtttcaggccataatccaccgagtcaacctgaagtccctgctccaggtaatctgcattcttcaggaggcccaaagctggcaaggcttctcttccaaagggtccagtctctcccacgtgagcctggccgtctctctttcctacgtgaccctgggctggggtcaagatagacagacctccttgctggtggcaggaggcacactgcacaaactgggtgcctttccaaggccaggcctggcacagtaaccagggtggtgccctgccatggtaccccacctccataactgtgccctgctgtacctggcgaagtttgttgagcagttccggaatgcccgccagcctctgcgtggccctctggtagtcccgatactggagcaccagctgcaccatctcggggtctccagtgctgactgcctcctgcaggactgcgggcaccaggctgctgaggggagccctccagatgaccccaggcctggctgctcactgccccccgcctgccagcctcagggggagccccttgtcctctgcagtacctgcccagccctggcggttctctttgcccacgttggcattgtgtcgaaggagcactctcacagactccaggtttcccagagacacggccagctccagtggggtccgcccgcgggggtcctcctgttcaatgtcgtgctgggggagacgggacactcacaaagggcaggagagaagagggcaaggcagggaggctgccagggcgagcagggttgggaatcgctgtgggaaataaggacggcggactgaccagggagatggcagagggtggcctgcgtgtcctggcaggggagaggagggggcaggagggaaggcaggggcagagccggggtctggcggcggggcctggtcaggcagagctgcaggttgtcaggagtttggcggaacctggggaccaggaccagagttcttgttctcagcttgggtcagcaaggatgcggaagcgagttcgggcgagcagggcaaggcccagcgcaggggagaggaggccagaggctcaggcgcgaggggccggtgacctgggcttgggatcgtgcaggggaggaaggcccaggatgtggctgcggagctgagcgggcggggggggggggggggctccaggacggaggccacagccttgggtgggggacccgggggaagggccgggtgccccagcggggcctcacctggtggctgtgcagtgcggcctccagttcgcgatgccggttcgcccagacgagccggtgcagcgggaaggtggggcccgggccggccatgctgggcctcagcgccgcatcccggccccgcctcggcttcgggcctggcacggccccctagcctcccctccgagccgcgccccagctgcgccccccgcggcccccgcagcagtagcggcggcggcggcggcggcggcagcgcgggcggcagggagggcggggcgggcggcggagcgggcggggctgcgccgggccggggcggggcttcgcgcgcgcccccgtccccccgcaaccatggcaaccgcggccaggccagcgcgcggcagagcaaccgcgagcgcccgaggagatgcccggccttgggtctgcgccccgacctcggtcgggcccgggtccgctggggcggcctggagggcggtgcccggttacagctccgcccgcggcccgcaggaggcgccccgagccctgcgcagacccccggagccgggtccggaagaggaaggcggggccggagggggcgggcactgggcccctcggtagtgcacgcgcgtgcgcggcgggccgcggtcctgctgcagccgtgatgcctgcgtttcccccgcggatccccttgctcgccccggtcttcctaccccaggtcccgcggtcaccgactctgctggggtgtgcgggtgaagtggggcgccccggctcccctcacccggcctggagacgagcaacgagcagacgccactaagtgcttgccggctgagcgggaagcaccttcccctgggacctggccggtgtctgcaggcccagcgatgcggggaggcggcccccggggccctgaagtcagggataggagttcggggagagaggggcgcaggcccaggcagcggcagagccgtcccggcggaggaccgcccgcggcgaacggctgccttcgcccgccgcacgagtcccttttgcagaggctgcggttggctgccagcgtcaggagaggaaggcgagtttcgaaatcagggccggcccctccacccacaccggaactagggtgcaggcctccgtcagctcagttccggcccttgattactggaggcccagcctggggtctggggccctggttttgctaggtggccaaggctgaccctctattctccctttccctacgtggaacatgattgaggagggccagctagcttgagcatcacttcctgctgtagggcgtcctcagttctgagactctgggctggaaggcctgattgccatttttaccctgccttctccctgtagtcacatggcgcctgtgccatctggggtcactttgccaccccacgctatggtgtcaatctgtgaggtcctggggttggtagcagcccgaaggcttctgaatgcccagagctcacctgctcaccactactgcagccctccctggccaccccttttctcagaggcggtcccttccctgagccctctccaaactcaaccccgacaggactttcttggttccagcctctcctgatttctgccatcttgaacacagctccccactggcacttaattccatgacagtgccttctcaaccctcttccacggcctcctctctctccctgacccccacatccctgggagagagactgtccgttcccattgtcaccctgatgccacccccaggtccacatttcagcttactccaggacatctctgtgcccagggatcccatgctatcccatcagtatgtccgaagccaacccaaccacacctaccctcttccccagactcccgcctcactcagccccaagtccagcctgtttctgctggaccacgttcttcccgtctggcctcttttcatctcttcctctcccactgcggaggtttgtctccctgcctcctgtccttcacctccctccccacatcctgtactcagtaaccaggcaatcactttagagccagctctcaccactctcagccctgttccgcaccttcaagggctccctgagcatggcaggtctggactccatgtcgtttgtatcttcattctgcaggccctgagcacacacctggctccgggataggttaagcctggcattcagtgcctccaggcatggctccttcctatagtcctccggccagcctgggccactcatgagtccctggctcttccctgcctcagaaatgtcctccctccttcccacaccaatgctggaggcctggctcaaaggccattgcccctgactcttgtattcagccc

SEQ ID NO: 914290 - DNA, 4001 bp, Homo sapiens
acaaatattaataaaattagaatgaactaaactggaatggatacagtgggtgaaacaagggaaaagtaataagataactccaaggtgtgtggctttatcatctgagtgctgtggtgccattagttgagacagcaaacactgaaggacagagaggatatatagatataaaattacattttggacatgctgctcttgaggtacccaaggaaaatttccagaagggagatatctatatatatgtttgcagctccgaggagagatacggaattcaggtctcagtgttacgtgtgtctctgtattagaatgctttttctgacacccatactcaccccctactggaatcagtggcattctaccgtcctttataacactgatctcacttgtcattatttgctcagcatttatcttcctcactagaaggtaaagaatgtgcctgtcttcttaagttccttaagacggagcacaaagtaggcatatgcagtaaatatttactggatggttgaatgagtaaccgatttgagggccaccagtaggactgaagtcacagtaaatgacaagaaaaagagaaccaatgatggcatcatcaaggggtaaaagctgcatttaagaagatggcagaagaaaagaaaacggtaagggaaagggtcactcaatggagtgaaagaagaaaactaagtaagtactaatttgtcacctccacagggtcaaatgctgcagggaagtcaaggaagaacttaaaagggtccgtccattaagactgaacaagagttgatgtcaagctgggcaagaagactcggaggaatagtgtggatggaaaaaaggaaagaaagcggaaataatacagaacaggggagagctgaacagctttggtatcccctgaaaataaattaaaaagggaaaggggggagtgacggctgagaaaaggaaatgccagaaagggctaaggctgttgcgggcttaagtgagaaaaggaatacgacagagatgaaggccaatgacagtctgactcacaggggtttgcagtctccctagaggaagtggaggggcctgaattggccaccccgggcatggcgcaacacctccgactctggggaggagttgagtccaggcccctgatgctgcggcggtcttcacttgctctcacccacgagccactgcagcggcagcggccctcttctccgtcgtcactaggacggggcccaaggtcctctcttgctctctcccagaagctgcagcggaaaccttcgtcttcactttctctctcccaaaagccactgaagcggtagctggcgtcttcactgccgctcacaccagaggagtcgctggctgcgtagccgcggtctccacttacttcctcccaagaactaccaacgctgtggccgccttcgacactccctccctcccaggagccactgaagcggcgactgcgatcgtcactgactctatccccgaagtcactagttcgcgggtcccgaatgtcactgactccctcccaaggaccactgaggcggaggcctcggtcttctctggctgttcccctggagtcggtagtttggtggcctccaacttcactaaaattcacgtcgctgctgcagaaggtgctgtctcccctaactctctcccaagagcagctgtgactgtggccactatctcccctaactctctccctagagacgctgcggcagtggccgaggttttcactgacccttctcaagtcactgcgggagaagccggcgtctgcacttaggcttcctgcagcgaccctggagcggcggtcgctctcttcacattttctttccccgtcgtcgctaactctttccctagactcggcgccggaatggccgtgtagaccgtttatcctccacacgtggtggctagtgcggcggccaccgtcttcgtctgctactccctgcgaatcgccgtagcggcggccgccttccgctggtactttctcggagtctctttccagcctcccgactccagccacttggctggagaggcagcagggccgtcgccttggaaacgagtacacttccgacgtgctgaggtcatttcccgttcctcacggcccacgctacttccggtttcctttccctcagctattccatggcttttcgtgtggacaaatcgggaggtggtgtaaactggtttttggtgaaattcggctcggcctcatgcgaacctatctaggtccgtctctggagtggcctgtcatcgatcgcgccctccatcgctgagcgacacaagtggaaccccccaggactgcattctgcgtaggtgacctgtgtggcgcgggccgggcggggcctttttgtccttgggcaaacgtggtatactttctcagtggtggttggaaggaaatttgttgccctgtcatttcgcaagtatggaaaaagacctaaaggagaatttagcagctgcagccgctgtttttattgcgtactttactagcgccaactctttaataatcgcttgttagttgttacccctgttttatgggtcaagagactcaatatatcagtactttggtaaggccaggcagcaggtaagttgtaaaaccagtaaaaaaacacaggtcattagtcaaaagagtgcttcaggtctcctgactccaaatccgagaatcctttcactgtagcatgtttactgctcaaatatttctacaaccctattgcttaacaacaggaatgaattatttcaccatttgttgcaaacgtatgggtcacgttttgtgccagcagcagaaaatacagaaattagtaagaattacctgccctccaggggcatcaccaacctggattcccctctcggcccagtttttccacccttattgccttctcccttcaggaataatgaactcgtcctggaagcgtaccttactttttaatatctctgccttgtcatgtgctgttcgtcttaccaggaaactaccctgcttttcccccagttttggtctgtgaacacatttgggaaattcttctgatcctaccgctactctcttgaggtacagtaaattgtctttgacttccatcaccttttgtaatattacaattgccatctactgagttcctatgatctgcctggcattgtactaagtgctttatattttcttgttcatttttttatgccaacataaatgagtttgactcaattcttattataacctgccaaaataagtattcctcttcctttttacagagagagaaacaagggaaaaaaaagttaattgcctgaggatatactgctagtgttgcgggacaaatagagacgggagaggccaaacagaattcaggacaaccctttattattaaggtgatcactggctcagtcggactggggtccagaaagtctgagcccggaacaaagggatcaatcaccttttaagcaatttgtggcgggagtttggtgctacaggaagcctacttgcagaagcaagaacaaaggcagttaattattcttttacatttgttacaccacatgtcttacatccttgggaatgcatgcttttgtagcaattgcttatcaaccttgtgactttacagcgcgctagggagggaagcaggaactcgtggtgcctcaaggaacgtgaaacggtggaacacagataagcctctccgtgcgtagaggagaaataagcggttaatattctctcttaacccaggcctccggagggtggggggctatatttcattctacctctaaggaaaagaataaacttcttgactaatatacttataaaattcattaattcccccttcactagtaaataataaatacctgacttaggattccaaaataggtcttgaatttttctgcaggagctcctcaaagtctctgaattcccacaaccttttattagatcacttatcccattgtattataattatctgtttaacaatttttcctcacccctaaaggaccctgagcttctggaaggtagggactgtatcttaaaatcttggcatttctgatgtctagaatatttcatttaagagaagggc

SEQ ID NO: 914291 - DNA, 4001 bp, Homo sapiens
gttttcaactgaattttggctgtcattcattccttcattcaactaatatgaatagaatgtctggtatgtgccaacttctgggtactgggattcaataatgagcaagatccatgtcttcacctcaggaagcttactctagtgtaggtgactggcaaagacatcatgtgtctggcaaagacaacatgataagtactactacaagaccttgtctagaaaccatgagtatacaggaggttcataattcccctagtcctaagggattaaagaaggcttcctgaaggaactgatgtttattctgctaagctgccatattaatttttaaaccaatatcagcttaaagggttacacaacatataaaccttaatcaattaaagaaaaggagaataaccaatagataatttacaaatacgaattcccagcctctcaactctatttgttgaaatataatcagtctttcaaggctcttctctgatgttatctctttcattctttcttgatcctctcatttagatcgctttctgctttctactttttttggtgctacatttcacctctaactttgttcttgttttagccccttaaaagattataagctgaaagataaggaccacatttaacttatatttatctcctacttgtctatagaaggcattaagaagtatgtgtagcattacatttaattaaagtcttgtcacttgattttgcctggaatggattctgagaagttccagagttaggcataaccccaagatactgatttcttgatacctaatctcacaagtttaacagtatacaatcttaatgtggtattaaactttattactagtggcaatagcactaaactcaagtttaaatgtattactcatgtccagtaacttttctggtcctgttactttattgtaaaatgtaagaattttactaaagtattcctaaggccaatccggcttttcagtcacccaatcagagacacccttggaatcagagatatccaatcagaattgctctgtgttttattaattctcctggagcttccactttttctttgattctcaaactaattcctgaaccttgcaacacaaaaatgaccatacatcaattcattaaacacttaacagatgctaataaataaaagttcacttgtaattatatcaaatatagtaaccttataccacagatcttaccctctcccccaacatgcttttcctttcaataaaaactccctttatataaattttgagtttacagatccagatacaaaaaattatgtacaaaattttactggtatatttagtttaaaaagccaagcctaggcgcatctacccgacttacagttaagaaacaaaactgatgacttgatgatgatattcctgatattccatcaggaatgtcagggtatgtttcctaacttaaagggcatatcctattttgagagagatccgaactatgtcaactccttacaaacaactcagtgataggcggggctataaaccttactggtgaaggaggttcagatagattaaaacaacttgccctagatcaaggacccttcaatggaactgaaagggcagacgttctaattcaaaagttctacattatttttcgctgcactatacatcttactgctctcagcacaaagcagtgcagatgtgctgaactcaaggacctaggggcgacacctgtagagggtctggcgactgggagggagggagaggggatccagctccggcactctgccaccagccgggagctcacaggcccgtgagctccgcctgcggccttccaaacagccaagagcggagaagcggcttcggtcctacctggggaccacgaagcggcctgacctgcagggctcggcctgtgtccacaggctacccacccccacgggctcaggagttcttagatggcgccggtccatcaaaaagcgaggtccgggacagggaataacaacccacctgacagaagggaaaatcgccgccttgcatctcacttccgggttcgtctcctagcctgctcaggattggctcctgcgtgagggcggggcctcgccgctactttccccgccccctcactgcgtgcggtagccaatgagagccgaactggacttgaagcatctacgttatccatgaagtgtcgcgagagaaacggacgccgttctctcccgcggaattcaggtttacggccctgcgggttctcagaggcaagttcagaccgtgttgttttcttttcacggatcctgccctttcttcccgaaaagaagacagccttgggtcgcgattgtggggcttcgaagagtccagcagtggggtaatttaggaatcgcattcgtctcctgtttctgcaggttcccaggcggaagcccagagttaactggaacctcgggaagagcgggccgagtgggcaggggaggggtcctggcgggctcagcgttctgattccgaggttccctgcggtgagggcgtgttgaggcttggaatcccgacggaatctggagctccagatgtggtgggggttgtctcgcggtggcagccactcttccccaaacctggctattttcagtcatcctgctggtgcttaaaggtgttcctccgcagaccacgtgtttgtttatttacactcgctttaaacgcgggcccgttcccttttccaaactagccaggtcctttaaaaaaaatcgtggggtttgaataggaaatacaggattgcctctgttctccagagtaacctatgcgtgcaacttaaaaatatctgcacatctagagttgtttgtgtgttgaaccagaaccgtatgtgaccctttctgcccatttatttagcatacattaatttcccataagagcacgggaaaggaaaataggagtttaatcatcttggtgaaactaggaaacaggatgtacactggagatatattattttctatgctcagttcattaaaaaaaagtatagtgggtgcttagatgaaaatgagacttctaaatttgccagtctaattaagacgtctgtaccttgtgcagcgtaaatcatgttggttaaatacgtgcaggcttttaaaaaatgtgttttatgatgtaattttgtttttagaatttctagaatttggaatcgagtgcattttctgacatttgagtacagtacccaggggttcttggagaagaacctggtcccagaggagcttgactgaccataaaaatgagtactgcagatgcactgtaagcacctgacttctggaatcccttgttatttggggtttctaaagctcgtcaactgtgatcacagtaaaagaaaacttatttaataagcagtaaataaggaacctgtttatgaacagaaatattagtcatcaaaaagggtatttggaatgttttaaatatttatctgtttgttaactggaagctaatatgcagctatagattggagtcttgcagtaatttgatatattgatatagtattgtttatgttcttaggcttcatcttaaattattgaagtgataaatattcttgaattttcctgacaaattcttattagtcaatgcagttctgtttaagatttttagagtaaattcctctagtattaaataagctggaaatgaatttgaatggaatgggaataaataaaaggactgtaaaagttatgtgcactttgggaggccgaggctagcgggatcatctgaggtcaggatttggagaccagcctgaccaacatggtgaaaccccgtctctactaaaaatacaaaattagccaggcgtggtggcgcatgcctgtaatcccagctactcaggaggctgaggcaggagtatcatttgaacccgagaggcggaggttgcagtgagccgagatcgtaaaaaaaaaaagttatgtgggaaagactttagacttggagtcttttaccctagtttcaagtccttggaccctactagctgtgtgaccttgggcaagtcagcagttctctgagccttgcctcaattttgccattggtataattggaataattatacctttttca

SEQ ID NO: 914292 - DNA, 4001 bp, Homo sapiens
tcctaactgtcctcccagctgatgggtgacttggagctggtcacctgcccctctgggcctcagtctccttgcctgtagcaatagcacctacctcacacgttgtgagagttcaatgagctaagacacagcactggcccagcactatggaatagtccctgtcactgccgtggataacgggtaacgttccatcaccatttcttaagtaagctccagatgggcggagccttccctgtctcattctttgagggtgcccaggggccagcatggcctggcacatggctttgatcaaatggcaatccctgagctcctccggccagtcctgtgagtcacaggtagactccctctccatctacacctgttcccagtgctcctggcagctctgtgcaatctcatttcctgaagagatgcccccaggccacccccctccactgtgacccaaggggtgcaaggcctgaccaaggccagagtccctgctgtcgctggaacagagactcaaagcaggagctttgctcccgcttcattccctgcctctctgtgagctccagagactagagggacaggccagggccatcctcatcctgcttgaagcagccctgctgggcctgacgcctggggaggggctttgatggggtctgcatgggaagaaggtagaagggagcttctgtccttaggtcccacaaattgctgctgagagcttccctcaccccaagaggagatagccagtcccagccctgtcctatcctcttccggcaaactttgtccttcaagccaaacccttcctgggagaattctgcccccctctctaaaacatagggttacctagacctctgggtctggccctggggagggtggtggggatattggggacctcaggatggggtccccaacttacatgactggcttccaaccagtgcccccacctgaaccaggcctgggcgcccaggggagacaggggcgagggtagaaagcaatctccaatgattgacaccctgggctttgagagtttcggtgccaatgccagggtaccaggcccagtgccctgggcacaatatgcgtttctggcaagtgaggactcgggactctggccccagaggatagtgaagcagtggggcctggcagttaccatcatcgtggagtggcgaccaacttggccttcacccaagacccccaccatcaccctcaccctggctgccccaacaggtacccctggccgcgagccaggaagggaaggtcccatccagggcgccagccgtgagctcttggttgggctccgagctgcagccccgggtgaggcggcttcggggccgcagagctccgaggccgggccatgcctgggggcccggcgctgcgctgggcggagtgggcgccgcgctcggaacgctcagagcgcaggcggggcgcacgcacttggccagggccggcgcgcccttcccggcacgcacgtgcgcgggtgggcgccgcgaaccctgcgcggagggtgcggcccccgccctggggtcccaggaggccctgccgccgcccggttcccgccctcgccaaggcgcaggtgcgcggccctcccgcccgggtcgcggccgcccgcactcaccgtgccctcggacggcaggtagccgatgtcctcgatggcgcagatgttgatgatgtggacgctgcggtcctcggccgggagcgtcgagtacttctcgttgaccctcatcgtggccgcctgtgcgctgggaccgccgggcggcgcgccctccccatccacggccccggcggcctctgcgggcggagaccgcagcgttcgcggcgcgctcgcagggggccgggcctccccgcgcccaggcccgccggggacgtggccgcctcccgctccgcccgccgccctggcccgcccggcccgcgcgctcgatgcggggggcgcctgagcctctcggggccgatcgcgccgccacccggctgctggtcccgcgggccggcccgcgcctggtcaggaacttggacgccagccggcccgcctttgccttaaagatataagcgctctccgcccgcctatggcaggggcggtggccgcgccggtcagattttccgtagaaatttaaacacaggaagaaaaagtattccattcctgcgggcccctccaagttttatttttatccagggaaagtgcccctttggatttttgagggttttcataccgggtgtgaaaggggggaactttcaatagccccacctgaaataaagtccccgagtggcaggcgcttctgtggcgcgtcacctccgcctccggggggagtgaagcttctgagattggagtctggatctctgcccctttccctccaccctggcaaactcctgctgtcactcagcactcacctcctccggggagcttgcctggttcctgccgacccgccccctccagctgcccgcgctcctgggggagtctctcccggggcagtcatctccctggagcccactgatgttaccggtgcccccgagtttacggagtgcttagtgttctgtgcccaggtgcgtgcagcgtccctgatgtagggcgtgagtgtgtatcatctcatttaaccccgcacctgcaaggttggaatgcgggtcctcattttgcagaggacactcaggcttaggagggccaaggaccagtccgcatcctctgaggtggggcggggctcctgcagagctttccccactgctgggcaaggctgtcctgctttctggaggggcggagcgggggggatggtggctttgatctctcttacccccggacctagcaggggtctggcacactgcagatcttcaagtcttcttcccctaaggagaataaggcaggtccccaggggacgaccatactcaggttaagccccaggggccatgctggccaccacatccagtggaaataaagtgtccctctgcctctcacatcctatgagttcttcacggtgtgcatcagatagcacctcctgcaggaagtcctgctggattctcccctactgtccccttcccacccaaatatgcaggccttcctgtctatccaaagaacctgcctgaaccccaactagcacttcatttattccgtctcattttacagtgggttgtctaccaggttcacacagccgatgctcaataattgcttgttaaatggccactggggaacattcaaggcctacagaagtgattagaaaattgtctttaaaggccacgatgtcgtcagcgtgccatggttccaagcatggaacctggagtcagctaggatagggttggagagaaggggtggggtctagctccagctctggcaccttccagccttgtgaccttgtgccagcctccttggcctcagagcctcctgggcctcagagcctctgccttctcatgggagttttaagcgtgcctgaagctgccaggcttagcaatggtgactgttgtcactactaatgtcatcttgtcatgacctaccctttcctggtgcctcagtgagactctcccatttaggcacaagtctgtgacttccttgaacttggggcggtgcaggaaggctatttggttctcaggctggtggtgccaacgggcactgagtggccctaaaggaccctttgtctgcaccttggacagcgagagagggtttggagaagtgccccaggctggccaaatccatgccaggaacagtgctccacagcctctgctccttaaaagttcaagtgtccagggctgggagaatcccacacgcatgtacagaggattatgtaactccatccacttatctttgttggtaaacaaccaacattgtgtaatactaatgtactgtcttttcaaatttgtgttcgagtgccaacagaccttccagagctctatgaggtgcagtttgcatgaaaaaaaaaaaagagtaaaaatatacttggccaaatctggacacactggtgctcccaaaggtttgggaagtgacatttctggcctgagagggctctggggcttgggggctgcctgctggggggccatctcctaggcaaggtggc

SEQ ID NO: 914293 - DNA, 4001 bp, Homo sapiens
atgccagcaattgcacaatttcttatcactctctttgagcaatgacggtcggacctacagttgtcaattatttccttcttaaaaacacaacatgtatccatacataatacattgttgtgggggccatttgaagcttccagatcccagaaatgagtcacccatagccaatgcatcagtggaggtatttattctgtgaggctgttgcaaagttcctatcatctttgtcttcattctgaaagtttatgtatgtttaaaaccatgattaaagagaacacaacttcttgaagcagtttaactttatttgaaatgtttagagttgaagtagaagtgcatactaggtgaaatttttgtctacccctacagtctcacacatcactcccaatttcaacatatatttgaaacatcctagagaacttgggcttgaactgagtacagaattatggaactggaaactcagtcagtcccatattctgtcttacgcaggaatcccttcgaaattgtttcttgtgtgttaatctagtttttgttaaaaacaaacaaaaaagtcaagggccgggtacagtggctcacacctgtaatcccagcactttgggaggctaaggcgggcggatcacgaggtcaggagatggaggccatcctggctaatacggtgaaaccccgtctctactaaaaacacaaaaaaattagctgggcttggtggcgggcgcctgtagtcccagctactcaggaggctgaggcaggataatggcatgaacctgggatgcagagcttgcagtgagccgagatcgcgccactgcactccagcctgggcaacagagcgagactccacctcaaaaaaaaaaaaaaagtcaaagagctacataaaaacaactgttgatgaaagaaatacaaataatatctggagggtggggatgagaatatttaagtaaatatttactttgaatgaacaaattcagcattccagaattcacacatctaaggcactctatggttaactgtatcataattaccattattaattcagcaaagtggcaattgtgttaattaatgcttctggataataaaactccaaaaactgtgaatgtgcctcaaaataaaaatgctctgtaaaaagccttttaaaccaaataagaaacaaagatcaaagagtgaggataacttgaacatacagattcttgtcactatgcccagcaagaaacttgagggagaaactaaaagacataatacgaagcccctagaagagaaacctaacctcaagaacttgaaacccagaatcaagcatgggacatgggcaaacaataaattttcccaaggaagtgacagagcccctttaactgcaacaggccaactctggaactcccccaagaattcatttatcttatgattgtgtaaatgcgtctcaaggagtagacacacttttgtgaagattactcaacatttgaaccacagaagacggcagatattgttgaacatttctgtcctcacccctcagagctctactgagctattcggacaatccctactaagcgggtttactgcagtgcattgaaacagtcttcacagagatatacattaagtcaagtcctgaaatgacgaattccgatactcccaggcactgtgcggaggctcagaaaatcactcatctaggatgcagagtgaagaggaatttaattttttttttttttttaacttcacagagttccccacctctgtgtcgcataagcctgcaaaggatgctcctacacaactgcaagggcatgcaggggggaagtgacgcccgcagggagaggggagcaagattccaactgacctttttgctgtttaaaggactgaatggagcctgaatggtggaccattttcactctgcgcgtcccagccggcttagggagctgcccgagagggaggcggaggaacagtagccagactctagacgctccaaggtccggagcctcagcgagcgcactgcaatccgacacctgctgtagccggcacttcgctctccaggctacgcgcccgccggtgtcgttgtcatgggaacgcgggagggcggtctagcgtccggctccccttagcggctactctgggaacaaccccgcatcccccgcgcgtccagtgccacagtgaggggtgggcgttgagcggggttggctgggagtgggagcagaagactttactggaggaggagatataaatcggagcaaacctctagagctgatactgatgccctctttgccaagctttgaggctggttatttatttcctaaaagttggtaggtaaaccctgggacttttaaggaagggcaaagttggtctgtgctctgagagggtatgcagtggcagatgcagagacgtttctgtttttctttcttaaatttaagtagagggggcagaaagccaccccagcttagttagccagtagcatgttttattaggtaagctgtgttctatgtctagcacttttcacttgagttttcctcttcttcttctgccattcaggccttgaatcatttatgatgatgatgactgaggaccatttataacctacttagtcacaggggctgaaaaaacactacccacgatgctcgatttaatcttcataaaagccctgtaatgtaggtaaactatgattctaatattataaaaagaaacttaagatcagagcaacaaagatttctcaagaccacataaatcaacaccttatttgaaagagaaggcacccgatacccaaagaagtgaagtaactctttttgtttagtttgagaagttttattttattatttatttatatcttcaccatgtattttaagttcgtggtacatgtgcaggatgcgcaggtttgttacataggtaaacgtatgccatggtggtttgctgcacagatcaccccatcacccgggtattgagcccagcagccattagctattgttcctaatgctctccctccccctccaacaggccccagtgtgtgttgttcccccattgtgtccgtgtgttctcatcattcagctcccactttgaagtaacttttgaaagaccaaactgcagtggccaaaataggaccagaagctagctgaacacatttttcagtaggatctcctttcctccatctatctctgctccctgattcaaagccctaagttcttcctggaagatgtaagatgttattgaacagacacatcgtgagagtccgttgcttcctcagttttgaagttttatggaatcaactcagaatcaggtgaataatccaaataaaagcagataaaaaatatgcagaaatttccaaactttcgatacctcaaaaatattgagttattattgtatgctgtttgattcatctgtggtgcatgatacaaaagaatgaggggaatatagctttgaacaaacagatgctccaattatttatggatgcataacaaactaccctgaaactaagctgtaaactaaaatttattattattacttatggattttgcaggtgggctagattcagacaggcagttatctctcagagtctctcttgattgttcagtaactggtcttaaagtcatctgaagcaaaaagcgaaattggattctactctcagtgggaggaagagcaaacaatgtgctaccttctttaatgtatcataatggtctttccagaaagaaatgctgagcattcaataagagctcagtatgcaggcattgaagaaatacttggttacagacaatgaactcagtgtgagttcacctccaaatgaagatctaaaacacagttcagagactgtctccgtaagggcttttaatacagatattgtatagatgagggcattgaaaccgagaagaataaatgacttgctcgaggatgttttttttaaattttgttcatccagagttaaaattctgatagaactcagcttacagatcattctgatgtgaaccaactcattgattctaatgcaacccaattctcctacgtgaggattagacaatgaatttaagaatggcagaaaactaacaccc

SEQ ID NO: 914294 - DNA, 4001 bp, Homo sapiens
gaatcaaatcacaatagaatcaaaatcacactgagataccactttacaaccactaggatggctataataaaaaagacaataacaagtgttagtgagtatgtacagaaattggaaccctcatacattattgatgggaaggtaacatgcagatgcctggaaaacagtttggcagtttcttaaaatgttcaatataaagctaccacataatccagcaattccactcctagatatatacccgaggaaaataaaagcatatgttcatatgaaaactgatacatcaatgttcatagcagcattattcatagaagcaaaagaaagtggaaataacacaaatcctaccatcgatgaatggataggtatgctatatctctacaacggaatagtatttggcaattaataagaatgatgcactgataaaagctgcagtatggattaacttcaaaaacgttaatctacgagaaagaagccagttacaacagaccacatgttgtatgattctatttattcgaatggtcttgaataggcaaatctatagagacaataaagagattactggtaggaagtggggaggatgggaagtgactgcctaagaggtttctatttggggtgatgaaagtgttctaaaattagattatgatgatagttacaaaactctgtaaatacactaaaaaaaatccaactttacacgtcaaataggtgaattttacagtatatagattatatctcaataaagctgcttaaaaaagggaacgaggaggatgcagtaacacacggtatttcccggtgcctttgaagactgaatagtaatgatcagatcttttgtcactttggaaaactgtttctgtgtttaaatccaacactaaacaagacatgaaaataaaatatcattgaaggaactggggtcctggagatagcagcaaaatagtatgtgcattttaaggaaaatacatgtattaaaataggtccacggaatacaggtggtgtaaaggctttggcaaacaatggataaatatttctcaacggaactaaagggcttaatgaaagctgttgaaaagcaacagcagcagcagcagcagcagcttttccaagtgcctatggctctcagtatctcaaactgatagattttaggatctgctactcctacaattaacaagcatctcaaagcatgataagtaacgggcagagagagtgaggtaataagactcaaggaccagctccttacacgtgggatagctgtcttgcactctatactgctgctttttttgggaaagccttcgtttccattggctgggttcggagacccaagcactgcagcgctagcctagcagccctgaattactcggcggttcccaggcctgcaggggagcaaggagggtgttccggaaccataggggtcacaggtcgcaggtccctggcgcgcaggagcagcagagaaatctgtggggcgccgaaaccaaccccactcaccccaggcgggggactctgccccgcagtcccggtttcgcgctgagcacgccacgcagcgaacctccctaggactcaggccgcagggccgccaacgtcccccggggcctctgcgccgcgggtggaggggtgcaggcagccagcctggctctcccttgacgcctcttggcgcggtcctaccttcctccgccaacacttccaggagatccgggtcgcccatcttcgccagctcgttaatggcactggtgcctgagaggcagcaggagaggggcagctgagacagacgtggagatctgaggcaggtgctgaatctgactgtgggccgccggagttgctgctgctggacttctaagggcctgctcttccttctgcaggcctccttctcctcctcctcggactccaccgtctctgggcgccacagccagccggccttcctctccggcgggtacttccactcgacccggtcccccacaacctgcttcgcgcgcttggccctgcgcttccccaccctcagccggtagcgctcctgggcgctctcccagtacttctccaggcacctgtccctgtgcctgctcggcagctgatcccgcagccgccactcctcccggtgctcgccaggatcctttccactcctgccctctggcagctttcctttccccttcgctgcgtccctgtttccacgcctctttccccgcctccagaccgcaagaccggccggcgccccaccctcggagaccgccatctccccgccccccggcccggctggctccacgctggccccctcctctccgctcaagccgtccccaggtccctgctctgccgcctcccgcacctcctccggacatgcagcctcccgtccctcctcgggacccgccgccccccggccctgttggccggcctgctccattctgtacaggcttcgcacgtccttttccactgggtccacccacgaccaggaatcctggttccccagggctgccgcttccctcctgtcggaatcctcctcctccgatccccaaagggggtcccgatgctccctcagccggttggccgggtcttcatcgatccgctcatgcgtgccactcggagagaacccctctcccagttgggagttacttttggtctcgtggggaaaagtccctctcccttaaaggaacccctcccttttaaggccggctcatggcccgagactccaaggtgccagcagccccttccccatagcgtctggagcgggagtattgacttttctcctggccctgcctgcttcctgggttcccagcaggatctctgccctctacaggtgggggaaggtcatcccttgtggcctgagttccaagtcagcctctgccccttaagagttggatagtgtggggcaagtttctctaagtttcagtttccacatatttaaaggagaatgataatagtacccacctcctaggctgttgagagaagcacggtgcacagtccttgccacagaatgtgttaaacatttagctgctattaagattaacccatattatagtccagctgggatgacgcctgtcatcatctcagctggacgatatcgcttgaaagctcaggagttcaagactagcctgggcaacatagggatacccctgtctctacaaaaaattggaaaatagccagtcatggtggcaggcacctgtggtcccagctactcgggaggctgaggtgggaagatcgcttgagcccagaagattgagactacatagagccacaatcatcccgctgcactccagcctaagtgatggagagcaagaccctgtctcaaaagaaagtaaagaaaagaaaaaaagaagagggaggaaggaagaagagaaaaaaaaaagaaaagaaaattaactcatattacattgatccctactccatttcaaagggttactttgtttcccccctccacttcctgcccaccccaaccagaactttaacctcaagcagaatgggtcgttctactcctcacaggcccctctgcattggttctgtgtttttgagacccgatcaactgccaactacacaataattgagagactagattcactgtctaatggcggggaaataagactgatgatgaactaacagtgaggtagaggtctcagctgagagccttgagtgatgaggagggagtgactgtattagtctgttcttatgctgctaataaagacatacttgagactgggtaatttataaatgaaagaggtttaatggactcccagttccacatggctggggaggcctcacaatcatggcagaaggcaaaggaaaagcaaaggtgcgtcttacatggggggagggcaagagcttgtgcaggggaactccgatttataaaaccatcagatctcctgaaacttattcactatcactagaatagcatgggggaaaccacccccattattatctccacctggccctgctcttgacacgtggggattattacaattcagggtgagaattattacaattccctgggcatgccacgcagcgaaccatatcagtgactctgagtttaggataaggat

SEQ ID NO: 914295 - DNA, 4001 bp, Homo sapiens
caagaggttggcaaaaggtgagaaaatgggggcagcattcccgggagaaagaacatgtgtgggcacgccctgagaatcagggtgcagttggtgtctgggactcagcagtcagcacctcccagggactcagcactcagcacctccaaggaggacttggtagctactactcctggtgactcagcactcggcacctacggaaactgagtccagggactcagtccttggtacttcagctttgcagaagcataaagggcaagaagggagctgccagaaggggaggctggaggttggcagaggccaatcaggggaggctgctaggcttcttggccaaatggagagcttggacttcagcagggggcagtggggagccatggaaggggttagagcagaggaaaggcacgcccagatccagcctggagctgggactagcaagtcctccccatgtctgcaactgtcctttttgatcaccacaggagttttgacctgctccgtttccgacctggaccggttcacccctccttaggcaacttggtggtcccctgctcctgggaggtcaccatactgatgtgcggacagccagtcagcctaacacactacagcccagaactcccaggctcgagcaaccctcctgcctcagcctccggagtagctgggaccgcaggctcatgccaccacgcccgggttccagcagtcctcctgcctcagcctcccgagtagctgggagcgcaggcacgcgccaccacgcccgggttcgagcagtcctcctgcctcagcctcctgagtagctgagactgcaggtgcatgccacgacgcccgggttcaagcaatcctcttgcctcagcttccggagtagccgggaccacaggcatgcgccaccaggcccggctgcaactgtcttttttgaaggactgatgctctcacttccaacaaaccaggtgctgcttctcccaacccaacccctggccagccccaagtctctcctctaacccccagcatgggaggaaggggctggcagaggggaccctgagctcaggctaaggggcatcaggtgctgggctgagcagccagggtgtcagacctggatgtggagggccgaggagagccctgggcggagatggagcaagaggccgccggcgcagcccacacgtggaggccctggcaggccgagagggaggctggtttcactccacacctcaccactgcctcctccctgggccgaccaggtgctgacctgcccaggtgttggccctggccccaggtgacctcttcactggcagaggggagaaaggatgtctttctacgtgttcacctgcactccctcccccagaatcggaatccagcagcagcagtcagcgcccacccccagaatcggaatccagcagcagcagtcggcccccacctgtgctgggcggggtccttggggagcagagagcccacagcccgccggccactctgcagctcccaaccctggggcagcctgcctggtgcccacagcccgctcccccttaggggccagctgcaaggcaaagctgccaggtctggggtcctcagcagcagcccccgcctcggtgggcaggccctctccatctcgtgttcaggactctggtagaggttcctggccccacacactagctgagagcccagccctggtgccctcagaatcccgggctggagggaggaacgccgcccgcctccagcacttccaacccccagcgtgccccaggagtccaggaggcagcttagctgagccgggcggtcaccctcgcctgaccgggcagcctgcagggaccccccccacacacacaggcgccttccaggtggggctggcggggggctggggccgggggccccaggtgtgggcgtggctgggggccttgaaggtgtggacccttttgagcgcaggactcacctgcatgctggctgtggccggagttccagctggggtttggcggccaggagagtggctgccagcggcgggtgctcctacctgacttccgcgtggggctcgcccctccctcctcctcctccagcgtcctgcagctgccgcgcctgggtgtagtcggggcggagccagcatccaggccaggagagtaccccagcccctggagcctgggacaccttcctggagcccagatggcgggtcaggggccagaggggaattcctaggctggagttcccgggaagggggtttccactgtgagatgggtctcatgacacctggtcctagggggaagcaggatggcacagagcccctgacagagccagcaccaacgcccccacttgccttgcctctctcacccccgctcacacatccccatgttccctccaaaagcatcccaccccaggccatgccccccaccccgggccacggccccccaccccgggccacggcctcccccaccccgggccacggcctcccccaccccgggccacggccccccaccccgggccacggccccccaccccacaggtccagtgctgattcccttagaggagaaactggggcaaggaggactgacgacgagacagactcccaaagaaactgtctgctcctacccaagcccctgctttctgggccccactggggaatccttggagtcctggggacacgtggctggccccaggctgtgtagacaacggaggaggagccctccaccccgcatccccagtccctgagcacgttctgtgcagcctgggctgagggcggcagctgggcaggctctgggtgtcctgagagtgaccgtccagtggagtgccctgaggagggaagggctgcggggagtgggggcccaggccgtgggctggcacacattatctgcagcgtgtgtggcgaggagtctgcttctgaaagctgctgcaaagctggggaggcagggccagagctccgcaggcagacgctgtcacacggaacggctccaggcccactggggccagagcaccccccggcaagcccagcagccctctgctgtggtccaggcccagggccaacagtcggctctggtttccccaaggggtaacatggtcccacccatgtttctccttgggggacctcctggcaggctgggatggcagcagagaccacagctttgccactttggcaaagacaagcgagtgaagtggtggccgaggacctgtgagctcagatggggcaaatccaaatggaacacattcagatctgtgtgcaaaatggtggtggcttaaacaagctgtgtatttctcctataagtgaaatctggagttggccgggcgcagtggctcatgcctgtaatcccggcgctttggcaggccgaggcgggtggatcacctgaggtcaggagttcgagaccagcttgcccaacatggtgagaccccgtctctactaaaaatacaaaaattagccaggtatggtggtgcacgcctgtaatcccagctactcgggaggctgaggcaggagaatcgcttgaacctgggaggcagaggttgcagtgagccaagatcacaccactgcactccagcctgggtgacagagtaagactctgtctttaaaacaaagcaaaacaaaaatctggagttggctagtcctggactagtatggccgaactatagtcatcagagacccagaatgccttcagcttgttgctctgccaccttaaatacatggtcccagcacctggtccaaaatgactgctcaagctccagtcatcacatccacgttccagccagtgggaagaggaaagggcgaaggagggaacctcacccttcacatggttagtcacgtgaccacactctatggcaaggaagcctggggcatgtgagctcttttcccatggaagaaagcagggtaagcgggagagggaacatccggcagtctcaccagggggtcacagctgccaagttagatctagttcagaaacagaatgtgcaaggcttgttgagtatgggaggaactcacacgcaagatccacgttcccagcccctgcaccgtccgtgacgggtgtcgctccccagtccccagctcagcc

SEQ ID NO: 914296 - DNA, 4001 bp, Homo sapiens
aggtctcactctgtcacccaggctggagtatggcgcgatctcagctcactgcagccttaacctcctggggtcaagtgatcctcctctctcagcctcccaagtagctgggactatagatgtgtacaccaatacgcccagctaattttcgtatttttttgtagagacagggtgttaccacattgcccaggctggtctcaaacttctgggctcaaaagatccacctgcctcagcctcccaaaatgctgggactataggtttgagccaccgcacccagctctatgctttttttttttttttttaacagagtacaggaagggttagatggtcctctacccttccacagagtgtgggagaaccactatcctcctgatcctccatcccgtctaaggagatgagaattcaaagggaagatcacaacagtccctcaaaatacacattaaaaattatgagggtgccgtggctcacgccagtaaccccaggactttgggaggccaagacaggtggatcacttgagctcaggatttcgagaccagcctaggcaacatggcgagacccccccatctctacaaaaaacacgaaaatcagccaggcatggtggtggtgcacgcttgtagtcccagtgactccggaggctgaggtggtaggatcacttgaggtgggaggttgagtgcgccgtgatggaactactgcgctccagcctgagagccagagcaagaccctgtctcaaaaaaaagaaaaacaaaaatcatgaagtcaactatttgctggataacaaggaaaaaaatcaacgcagcagacaggaaactggctttgtttctccctcaaattaaataaggagatggcctctgaaagccaagaggaggttctgcacaccaaagtcaaattaattggtggaccggtgcacccacccagccaccctgcacatccttctaacaggcccagccttcctggcttgtttaacggtttggtgtggatttttcccaccccgaggggacaggcacggggctgagaacgaggtctgtgattggagcagcaggcagcgaggccatcccacaccccgactgctgctcgtgtccagattccctccgggaatgagtcattttaatcgtcgtaggtgagatctaatcaggggttaataagcctccagaacccaggtcacaaagctgtttcctgggaagacactgatttccagatttctgctcccaaagctaaaatccacgccgttttggaaaacgctgggttaaacgctccagtactagaaagaccaaggtgacatcatgctggggaggggcgtcttggcccggaacccccttggtggtgccgcagccccccgcacggaccagcaaacgggagtggagatgtggatgaagggccgtgccctaaacccctagaccccgcacccctagaccctggacaccccaccccgcacccccagacccagggccccgctctgcatcctgacccgcacccccatacccgataccccaagactctgagcgccgcccgcacccccagaccctggacccccaccccgcaccctggcccccacccccagacccggtaccccaagaccccgagcgccgcccgcaccctcaggccccgggccccgcccgcatcccagcctgcacccccgcctcgaggccccgccccgggcctccgctcccagaccccgtctccgccggcggccccggccccggccccacgccgcccccgccactcacagttgcggatatccgagatgaagaccgccaggccccgcatcccgtcccccttggacacggccggcatcttccgacgctcgggagcggcctcggctggcggacccgggcggaggagcgcggggagcgggaagcggggagtgcggtcgccgtcaccgccgcggaggagccgccggggagccgcctaaccacggccgcctcagggtcccagcgccgctttctgggccgccgcgcgcgcgcacgtacggcgcccgcaccagcacgcacgcgcacgcacgcgagcgacgacggacggcggccggggcgggtgtcgcgtgaggcagcgcgcgcgcgtccgcggcacgggggcgagccggtcgaggcaggcgcgggggcgccccctgcaggcggacaccatggacggagccgctgaagccacgcgttcgcgtcccggggccgcgccaagctggcgatgccgcccgcgtcccccacgggaagggcgtgggtccgggcgggaacccgcgtgtgcagcgggccgcctctgtcgttgttggtggtcactgcaaaagaggcggccacgcaggcacacgcgtacggcctcgtcctgggcctcggccccgctagcttgccccgagcagtctccgttttcttacttggaataaacgacctgtgagcgctgggcggcggggcagctccgaggccagggccttgtttgttccgcgggggccggggcgggagggcggcgccgggaggaagctggggctccaggcgaaggggtcacagccgctggacggcctttggcgaggaaaccctcccctagcacggtatcctgagacggtggggctggcccgcccctcctgccgccctgagccgccagggccacatctcttgcggtccctgagctgggggcgaggcaggccccgtgcccgacccagcccagggtctgtgtggcagcccaggtgccccctccacatcacctgggcctgcagagaaacaaccacccaccccaccccagtgacagcggccgggggcggcagcccctgcggaatctagtccctcggcggcgccaggacttttggccactgttgccagggccccctctgctccccagccctctgcaccactgcaagctggaggcctaggcccacccctgtggacacatcgcaagggaggacctgctgggccaggctgcacagctccaggtcccggccaggaagagaccccagggagtggggaagcagatggccctgcctcactgtccttcccagagccagatggctttgaacaggaagctccctcctgctgcagtggggggatctggaccctgtacctggaactggcccagacccaccagccagggctttgtccccaccctggctcacttccgcagccccagatgagagcttagccctggtggagcccggccaggaggagggcacaggacccatgcccctccccaatgaaccgggtgccgcacccaggctctgggcctccagaactcctggggaaaaccaagatctgtgacagaccccagtcagcataaggcaaccaagtccatcacttcccaagacagaggcacggagccgacccagcagagggcttcctggaggacggtacacccctccggagtccctatcctctcccagtgccacctcctggcagagaaagtggtcccggggctgttcattcttcagcctctcccttccaccaagaagcttccctcccctgtccctgacaacaaataaaggccattctggacacaagagcatcttgtgccatgtgaggggtcctgggctgctctccaggacagtcccagcagtcacgaggaccgtccactaacacacgtgggcagagcatgggctctgggcgtcaggaggctggcatgcctaatccaagctcccattggcagtggcagtgcagaagaccgagacaagcagaccactgtgcccccccaccagcagccactcacagagcagggcaatgggggtgctgcaggggctgcccacaggagggcttgggcctggcaggcatccccctccgcccactcggaagactcctcctcagtgccagctctgggattcccacagacatcctcccgtccacacaagagtgtttaggggtcccagaaggcccgacatgcagccatgcaaaagacttcccacctccttccagcgtcgttgcccttgcagacacgcaagccctccagatgattcactccagtcccagccttgggtctgagtccatgtgggcctctctgaccactgccactcctcggctcgggagaggccagcttcgggagtgcgc

SEQ ID NO: 914297 - DNA, 4001 bp, Homo sapiens
gaggggcccagggccacccccaacttgggtgctgccaggtgtgccagcaggatgtagtagaggcgggcgtggtcacgcccatcagggtcctccagctgcctggccagcacctgcagcaagtcgaccaggccgcccctcacccctgcccgcagcagcgcccggcagacccgcagcaggccctgctgtaggtcccagttcgtgcagtgggcagccgcggcctgtagaaagttgagggtagcactctgggcatctccatctgccacctttgccagcatttgcaggtgccagcaaagagcttcatccctgcccggcctggacaccaccacctgccgcaacaccaccttcaggggctccctcagctcagagtccacctgatccaagaggtccacaaagtggggagccagcatgggccgggcttggtacagctgggccagtccgtggatcaagggggtcagcaccgtaggttgcccagccaggcagcaggccaccagatacgaggcctggaagcagagagtggccaaggcccgggggcccccatccagggctgcccgctgccgcaagccagccagcagctcttccaggtagtgccgtgggcttggaagctggcctttctcctcttcttcctcctcggcacagagcaggcacagtaaatgcaggcgggccaggagggccattgggtcatgcaggagactgggcaggagaccacggcatagctggggccctagcagcagtggggcagcctcctcaccttcagggcccagcggccagttctcagggaagctcaggacgcagtgaaggtaaaagagatgggtgggcggaggcagagcagggtgctgggcagccaaggtgagccggcggagcagcaacgcttcatcctgggctgtgaacaaggcctcaccaaaggccgccttgagcgcaagcatggcgtgcaacagtgtcagctgtgctgtgcctagcagccgtaccagctgcggcttgaagagtgccggtggctgtccctgcagaccccgcagggcccagcccagcagccacaggagctgggcctgggccacaggagtgagcagataggaggtgtccagaagctggatcaccgcagcccgcagctcccgcgcctcctcagggctgtgctctcgtgctgtaaggctacgctccccctctccctcctcagctgccggccagctgggtgcctggggctgaaggcgtccatcgccctcctccactagtgtccaatcccagggaccacccccagttggggagaccttatccgtgagcagtccccccaggccagccccaacccgggactggagcaccaaggtgttgcgcaaagcgagggccagcaacaggctgagtggctggacagggccttcctgccccagcaggccccgcagcaaccccagggagccccccagcagcccgggcttgcagctctctagctctcgcaggcactcgcaggccgtggcctgcaaggggcgctgttccgaggcggggacaaagcctcgccccagatcgctacccgcggccaggccgagcagtaggggcaggagccggcaggaggcgcccgaggtggggcccagcgcgccgcccgccgccagggcagtggtggccgccagcagcagtggccgacggagagctgagggccgcgggggtaggaggaccaaggtgtccaacagggaggtggcggccacttcggccgcagaggcgtcgggccacagctgcgcagggtactccatgctcagggccagcagggaaacctggatgggggattaggagggaatcacgaagatgaggttcatgacgcggcgggctggggtgaccctgcggaacggcgcaggggacgcgtgggggcctaccttggtctgttcgctcagcttctcacttctcaggtcgctcagcaggtcgcgacccaaatcctccccctcgggacctgccatgaaggcagacgggctggcccggaaggcccccaagcgctgggcccaggcgtcccggctcaggggccccatggtgaggcgcgcgggcccctgcgcagggaagagggaccctcaggccgcagccaccgggagcgcggggcccgctgccgaccccgaggggctgcggtcacccccagacgccgcgcagatgccggcgggacccgcgcccggctcccacggtgagaccagggctctcggggccgacgccagagctgggcgccggggccctcgcgggacaggacaggagcagggcgggggagggtgcgtgccgagagctcgttaggccgcctccctcccgcccgcggcccgcaccgaaaccacagcgccaccccggcccccggcgccggcggtaacgggccgcgctcgccgcctgactcagccgccgcgggcactcaggccggccggctccttccgggctggcggcgcggggcggggcgcggcgcgggggcggccgagtccgggcggggaggggcggggcgtaacggggccaccgcctcccgcaggtgtcgactcgcaggtttcgcgggggctgactaactgtcccgccgcgcaggcccccttccccgaaaccgccgcaggccggggcaggaaaggcggaggggagtgggtaggggtggcggagcggggtgggcctgggccccagatgccgggtaccgcggcgcagggctgcgatcccgcggccctcggcggacagcggcccggtcccaccagcgcccgccaagccgcgcagggcggcagccagcgcgccccccgccggcgcccgggcacaccgcaccctgcgccagacgcgcggccccggggggcgtgggtgcgggtcctggggctcccggagtggcccctgggggtgaccaaggtgcggtcgcagggcgcccgcaggaaaagcgccccagctgaaccggtccggcgggcgccgcagggcttggcttcgcttccctgacgcctgcccgggcccccagcccgctcggcttgggggcgaggagccggcgccgcggttgcggccagccaggagcttctgacctttgtttgcccgaggccgcgctggcggcccgcaggggtcgtgacggcgagggcggggcagggccctaagtcgaaaacaacgggatccatactcgggaagtgcgggctgtcagggcctggccggtcacggggctcgaggcatgcctagcgatggggaaaacaggcccaggaggagggcggccttgccaaccgagatctggggccaagccgggccggaacccagcactccagacttcagtgggctggattctggctgtttgggggcattcgggggtctgggcggcggtctctcccaggccagaggcccaggttgcaggtgccccacagaccaccggtttccagggcacagaaccgccggcgcccaaacctcaccacccctctggctccaattagccgctttgaagatgaaacaggcctgagcccccatgcaagccagtgccagctggcctctccctaccccatcctgctccagatgggaggtggtggagagttgaggggtggagagtgccaaaaaggaggctgtctgggtgcccttggggatggagagatagagacccactcggagggacaggtccagccagaaggcccggtcccggctcctctaggccctggctccacagttgactcacaggcagcagccccaaactacttccctctaggtgcctcagtttccccatctataaaatgggagtgataactcccacccaagaggctgtggggtgaggcagcctggctaattaaacccaagatgaaagaggcaggatgagagcagccctggggaggggaggcagcctgcagtaggagccagtctggtttctctgtctgagcccagagggtgctggtaactgcacatccccggccctcaccaccctcacggtgaggcaggaatgatcattaaacttcttgcagagttgagaagacaggtttccaaggatcagggggcctgacactggctctggccccggctcagcctctgacagcgtggcctctgcacacctcctgcctgagtcttgactc

SEQ ID NO: 914298 - DNA, 4001 bp, Homo sapiens
cccctggctttggtcacactgctctgcagcctcagtagccttcttctgattcctcgaagacatgtgttttccttctacaaggtgtttgcatgtgatttccatgcttcctgggacctcttctcctactctctaagctgaattaacttctactcatccactatattttagttcaaacgtcatgttctcagagaagctgtcctccaaccctctctccctatccccgagaccagtttagctactgctcttgtgcgttctcaaggcaccatacagcttttcttcatggtacatattacatttgtaatgttattcttatttgatttttctcctagattgtcagctccaaggactcagtctcttttgctcacaattatatcttcaggacataacacagtgcctggcatatattaggtgctgaaatcatatttattgcatgaataagtgattggaagcatttttcaaaggattactctgggtactgtgttgagaacagttaaagggaggtaggcaagagggtatgctattaaagtagtcaaggaaaaaaaatggtggtggcccagattaactttggtggcagtgaggaaagagcgaaatgaatggatttgagaaatatttaggcagtggatgtgacagaacttggtgaaatgagatgcagagagtgagagaggggttaatctcaagtcttgctcatgactccagattggcaaagagccatttttgagattcgaaggaagaacagatttggaagtggggtacagagaaaaccacagaagataatttagcttggaatctataggtttggaactcctgtttgtctttcaaggagatgtcaagagagcagctggacatatgagtctggatttcaggaaagaagtctgggctggatatataaatttgggaatcattagcatatatatgaaatttgaagctttgggagtagataaaatatctggggagaaagaacagatactgagagaagacagctcgggacagagccaagagcctcaccagcatctaaagagaggaggagaggaagcaaatgagattgagaagagcagacaatgctgtagggcagaaagcaggaaaatgcttcaaggagagtgagttgacataccccaccgaatactactcaaaggtaaaggagataacagtgtccactggagttctccacaaggaggtctccggtgaccttggcctagacagtttcagtgggtgtcagggacacagagtggagtgcttttaagaatgaatgggaagtaaggaaatgaagacagcaagcgttgactctgaagggcggagagagctgggactatagctagaggggctcagaatgcaagagatacacaggccgatacaaaacaggttaggaattggcagtgggaaaactgcttctaatcagtgttcttggcagtgctaggcctcctggctgagctggggacacagccgccccagggcacacccctcggtcgctgagggcaacagaatgcggcttgacagatccagggcctgggacccctgctggaatcggcgcggcctgccagcccaccccaccccacgtccccttcccggacctgggcctcccctcccccaacacccactgcccctcgcttcgcgtcctccatacccgcccctagtcaccccgaggggcaggaggtaaagggcagcggaagggacggtgtgagggcccgagtggaccctgcgatggtgggtatgagaggacggtctgcgggcgcgcggtggaagggcgacccggggatgggggatggggccggccgggggacccgggctgccgcagggtaggggctacagggtccgccggccgctggtgatcgggacgcagccaccggggctgggccggggcagggacacctcctacctgcgcggtgaggccccgggcccagatgacggaggtggctcaggctgcggggttcgggctccgccgcggcttctccatcacaacatcccccgcccaggagcgcgcgggccgcggggccgcgccccgagcggcggaggcgcgcgcaaggggagggggaggggcgccatcttggggcgggcgcgggagcgagctcggcgggcgcggcacttgccgcagcttcttgggggcctcaccctgcgggcggccctcggacctcggtgagccccgcggtccagccctcccagcagacacccctgcagccgactccctgggacccccgcctagcgcggcgccgtcctccactactattccacagactcaccctgcgcgccccgcagcgccctggtcccgcacccacgccgggagacgcgcggacggggctggagcccgaatggcggcggctgtgcggcgccgcggccgcgcggggaaggattcccgggaggcactctgcgccgctcctgctgcaccgctccctgacgtcctggtggggaggctctgaggacacagcgttgctcataataatagctcgtatttattgaccacttacaccgtgccgggctctctattaaaccgttaacgcgcattaatcttcacatcagctctgtaaaatcaccagaattattatcctcatttttcagaggctgaggctaagattaagagaggtaaagcgacttgcccgcagtcacagttagtgatgaatttagactggaactccgatgtttcttgacactgaaatacctctgctgctgagcataaagctgacatcaaggcctggaaaatgtcaagaatacattgctccccggtagaaattcacaaggaaggggatattgtgaatgaaaagtgtaaagatgtaaggaagatggtggggtgcaatacttactacagaccctccctggatagtgggatacatcccaatggtcagatcagtgacccagaggccatcaaggataatgagaggttatattaccatccagaaagcctctacatgctaatccctctcaggtgcctaaaactaaagatatccaaatctgagttcgttctttctttcaaggcagggtctcactctgtcacccaggggcaagatcatggctctctgaagcctcagcctccagggctcagattcctcccgcctcagcccccggagtacctgggccacagacatgtgccaccgcgcctggctttttgtattttagtagagagggggtctcactgtgttccccaggctggtctggaactcctgtgttcaagcgatcctcccacctcggcctcccaaagtgctgagattacaggcgtcagacacagtgtccagcctcaatttattgtttcatccccctttattagtcttttaaggagtttcactggggtgaaaaagaaccctcttcaacacacacaacacaacacacatcccacactggacacaactccattccatccattccaatgaatgacaccaactactggcttcccaagccagaagcttcaaagtcatctttgaatatacttttattttacttgtggtaaatataaatgttttaactttttattatggcaaatttccaatatatactaaagcagacagaacaatataatgaaccctcatatacctatcattcagtttcaacaattatgaattcacaaccaatagtttataatgatttgacaaatgcctatgatatatgaaccatgtatcaggtcccaagccaggccctagggatctaaagacgaatcagatttgactgcatctcacctggaggaaatgacatctgacctgggttcttgaaagatgaagaagaattacccagaagaacaaaagtgtcctcattcattcattcattcattttctttcatcaaataattactatgtatgaggtactgtccttggtgctagcaacaggtcaagaaacaagatacagttccgtctctcatacagcttgaaatttaacaggggaaagagacattaaatatgtaattaggaatgtgatgagtgtcttgaaggagatgtaccgggagctatgtgagtgggcttaatttggcctgggaagtttaggaggctttcataggaagtgacaattcagtgagggaaagggat

SEQ ID NO: 914299 - DNA, 4001 bp, Homo sapiens
gactacaagggcccccaacctggctgttgggctggttgatttaaaaactgaagtgcctccagctcagacacagggctctgtgctgagactggaagaactcctaactcaggacctggggaactgcgctgagacccctcagagcacaacattaggggctgtctgacaaataagagggccccagactcagaatgggtgtcagtcttgaacaaaccttgatccctgggttggtattccgtgggggaagcttctcctcctcttggggcaacggctctgggctgaaggcagatggtaatacttggcacagggctcccataaatggagctgtcccaaggccccttccagacagatccatcccactgccagctcactgcatctggcagctcacctgaggctctgagctgggaaggtcaacgtcccctcctcaggttccttcagtcccagctccattggggcctcatcactgggttcatccttgggaaggggattgaggaatcagtatcaaaatgatgcccctcctccagctatcccgtggtaaagcaggtccccttacccaccttccaaaattctccatcctcaaagccttctccatgagcaaaacctgtccaggtgagctaggaggagggatgggagtagtgagtgagtgtcctatcctactccagcagcacacactccctccacccctggcccaaaatcaacaggcctgtgagcctcacctgggactcctcttgggggctgctcccctgtgagggggaggcccggccggggggttcccactgggtggtccctgttgggatgtgccagtaataggtccctgaggtgtcctggaccctcatccatccagccggcaggtcggaatccgtctcgaaggcgttggggttccagaaggaatctgccaggtgggaggcttggtgagggtcagcctacccaaagagcagacagctggtgcctatgcccggtcccctctgagaccccatggttgagaaggggtggtggaagagctataccacaacacagttcctgcttctgcctagagcctatagtctggagtcaccacatgtggggccaccagtaggggacatggctcaggtctcctcctgggccctgttggtggctaatgtggccacactgtggaaaggaggaaggcagggagggaagaaggaagggagcaatgaatgttgggtgaccccaattaacctcctttcatacatatctattatctcagttaacacgaaggtgaacactttctagctcctgcacacgtacatgtatacacagacacacaacacatacaagccctaccacacacctgtgcagccacaaacaccagggtatgcaacacagaaaatgccagcacagatggcaggtatcacacacaggtgcacatgtatgtgcaggggcacacacacacaaactttagccatacacttatgcagacaccacagaggtgtgtgtgcatgcagctaaacatacgagcccctgccacacaggtgtgcagataccacaccacaatggccccaacacacgtgtgggtaccacacacacaggcggacccacactcagacacacggcacacgtcaaaccctgccaaatgtgtgcagacaccacagacgctcacttcctgacccttgctgcacacagatgcaagcaaacatgtcatgcacatacacacatacctcgcatctgtgtcatacacccttgtctgccggcagagccacaccactccaaccctgtaacccgctcatgcgtcctctaactcttctctccctgtcagccccaccccacatgaggcccaacctcatgctgcccctcacctgcgctgctgtcctgcaggataatggccaggaaaaagtcctgggagaacatggcgctcattcccggcccctcctgcctccaccctccctcctcacagcccctccagcccagccagctgggctcacagcctggtgctgggctgcagagaaaagctcatcccgcccccttctcaccagggcagagcgtctgccaggcaagatcctcccccgcttggagcttgctagggaggggccaggaccaccatgctagggaatctccttggggggtggggaagggaggagaaagggaggttcatgagaccccagccccttctgctcacacctcttcttcctcgccctggctcccctcccccaatcctgaatctccatcccaccctccagtggttacctcagtgcctaagccaagcccagtcttagggataccaggagactcagcccctaaggaataccccagctgcctggggccctgcagagcctatagctgtcagcataaatagggtgtggtttcaaggccttcagggatcccgcccctgtccaggacctgcacagcagtttgaacccaagggtgggctttgaggtcctgagccccagcaagcttgaggctgggcttggggcttcccagcaccaccccccacccctcacctgccagggcccagctaggctgcagcgtctcctcggcaaccgcagcaccaggaccggctgggagcgcccagactgctgacgtgcttcccgttaccagggaaaccaggaatcctgactggtccaagaggcagtactaagggacaggcagtcccaagaccctgctgctgggcaaccagacacagcagggctgggagtgggcgtggttacgccaaggtggctgcacacctgacgagagttattcaggcagggtgcttcaccatcctcagcttccaaatgacgtgggcccacagacacccaaagaggaggggctcttgcccatccaccttctaggcagccatcaccgcctctcctcacccccacttccccctaactcacactctatggaataaggttttcaataggcacctgaaacttagctgaggctcagggaatacctgctgttccctagagaccctccattgcctcaggactctcctgctaaaaccttccaggaacagcaccctagggcctccatgccctccacagccacagcctgcttcatgagggctggctggacacttctggaatctggggaccagttcaccatctcctgactgagtcacacacaccaatccatctgccatccctgtcagcctgtaccttcctgcttcaaagagcttcatccttccgatctgtcctggaagggcagtttctccccccttggccatctgggaggcccttctggagcttggcacatctccctccaagcgcagcccaccccggcctttgctttcacacacatgcatttattccagaacgcacaccttcactcctgcatcgattcatgcgacacttacatataaaatacattaaatgttcacgtatcattccttccttccttcattcgttcatccacaaatgccttagtggtgaagccaggtgtactcacttgctcaggaatcagtgattgacttaaagctttccccttctctccaccccacataactaacatagcccaggctactagcttttttttttttaacctgcatcattgcaaaaacatcataactggtctttctcttcctatctggtctcctccaatctcagctgcacagtacagcccaaatgattcttctgagatgctaaactaatcaagtaattttccaacggaatcctcttaattgttttgtcactgccctcaggataaagtccaaattcctccccaggttttatgtgctgtcatgaacccctgtctgcctctcagccttacctccagccactccccttctctctctttgcttgggacatgcccccttgtcctctcccagcccacctcccttactctcgattttcacctggctatcacctacctctccttcagacatcagtatacaggtcccttcttaaaactgacccattgccctctcccccaccactctcacaggcagggtcaggggcccctcctgtacttccccagccccagagagctcatcgcactgatcataaccacttgtttctttctttgtctcctcaccaggctgtgaaggccaggaggtaagaacatctttg

SEQ ID NO: 914300 - DNA, 4001 bp, Homo sapiens
ggctgctcccctgtgagggggaggcccggccggggggttcccactgggtggtccctgttgggatgtgccagtaataggtccctgaggtgtcctggaccctcatccatccagccggcaggtcggaatccgtctcgaaggcgttggggttccagaaggaatctgccaggtgggaggcttggtgagggtcagcctacccaaagagcagacagctggtgcctatgcccggtcccctctgagaccccatggttgagaaggggtggtggaagagctataccacaacacagttcctgcttctgcctagagcctatagtctggagtcaccacatgtggggccaccagtaggggacatggctcaggtctcctcctgggccctgttggtggctaatgtggccacactgtggaaaggaggaaggcagggagggaagaaggaagggagcaatgaatgttgggtgaccccaattaacctcctttcatacatatctattatctcagttaacacgaaggtgaacactttctagctcctgcacacgtacatgtatacacagacacacaacacatacaagccctaccacacacctgtgcagccacaaacaccagggtatgcaacacagaaaatgccagcacagatggcaggtatcacacacaggtgcacatgtatgtgcaggggcacacacacacaaactttagccatacacttatgcagacaccacagaggtgtgtgtgcatgcagctaaacatacgagcccctgccacacaggtgtgcagataccacaccacaatggccccaacacacgtgtgggtaccacacacacaggcggacccacactcagacacacggcacacgtcaaaccctgccaaatgtgtgcagacaccacagacgctcacttcctgacccttgctgcacacagatgcaagcaaacatgtcatgcacatacacacatacctcgcatctgtgtcatacacccttgtctgccggcagagccacaccactccaaccctgtaacccgctcatgcgtcctctaactcttctctccctgtcagccccaccccacatgaggcccaacctcatgctgcccctcacctgcgctgctgtcctgcaggataatggccaggaaaaagtcctgggagaacatggcgctcattcccggcccctcctgcctccaccctccctcctcacagcccctccagcccagccagctgggctcacagcctggtgctgggctgcagagaaaagctcatcccgcccccttctcaccagggcagagcgtctgccaggcaagatcctcccccgcttggagcttgctagggaggggccaggaccaccatgctagggaatctccttggggggtggggaagggaggagaaagggaggttcatgagaccccagccccttctgctcacacctcttcttcctcgccctggctcccctcccccaatcctgaatctccatcccaccctccagtggttacctcagtgcctaagccaagcccagtcttagggataccaggagactcagcccctaaggaataccccagctgcctggggccctgcagagcctatagctgtcagcataaatagggtgtggtttcaaggccttcagggatcccgcccctgtccaggacctgcacagcagtttgaacccaagggtgggctttgaggtcctgagccccagcaagcttgaggctgggcttggggcttcccagcaccaccccccacccctcacctgccagggcccagctaggctgcagcgtctcctcggcaaccgcagcaccaggaccggctgggagcgcccagactgctgacgtgcttcccgttaccagggaaaccaggaatcctgactggtccaagaggcagtactaagggacaggcagtcccaagaccctgctgctgggcaaccagacacagcagggctgggagtgggcgtggttacgccaaggtggctgcacacctgacgagagttattcaggcagggtgcttcaccatcctcagcttccaaatgacgtgggcccacagacacccaaagaggaggggctcttgcccatccaccttctaggcagccatcaccgcctctcctcacccccacttccccctaactcacactctatggaataaggttttcaataggcacctgaaacttagctgaggctcagggaatacctgctgttccctagagaccctccattgcctcaggactctcctgctaaaaccttccaggaacagcaccctagggcctccatgccctccacagccacagcctgcttcatgagggctggctggacacttctggaatctggggaccagttcaccatctcctgactgagtcacacacaccaatccatctgccatccctgtcagcctgtaccttcctgcttcaaagagcttcatccttccgatctgtcctggaagggcagtttctccccccttggccatctgggaggcccttctggagcttggcacatctccctccaagcgcagcccaccccggcctttgctttcacacacatgcatttattccagaacgcacaccttcactcctgcatcgattcatgcgacacttacatataaaatacattaaatgttcacgtatcattccttccttccttcattcgttcatccacaaatgccttagtggtgaagccaggtgtactcacttgctcaggaatcagtgattgacttaaagctttccccttctctccaccccacataactaacatagcccaggctactagcttttttttttttaacctgcatcattgcaaaaacatcataactggtctttctcttcctatctggtctcctccaatctcagctgcacagtacagcccaaatgattcttctgagatgctaaactaatcaagtaattttccaacggaatcctcttaattgttttgtcactgccctcaggataaagtccaaattcctccccaggttttatgtgctgtcatgaacccctgtctgcctctcagccttacctccagccactccccttctctctctttgcttgggacatgcccccttgtcctctcccagcccacctcccttactctcgattttcacctggctatcacctacctctccttcagacatcagtatacaggtcccttcttaaaactgacccattgccctctcccccaccactctcacaggcagggtcaggggcccctcctgtacttccccagccccagagagctcatcgcactgatcataaccacttgtttctttctttgtctcctcaccaggctgtgaaggccaggaggtaagaacatctttgccccatagtatacatttccagcatttacgataaggcctggagcagagtatgaattcaatacaggtagtaaagtttattcattcatcattcatttaattcatgaattcatgcatttatgcattcaatccatagctctatgaatatcctacaataggaaggagaatataatttttgctcaattctagcctcatttctgcaggagcacaaaccttctctgcagccctcatggtcatagcaacacagttgtaaaagagtgacttggcccctttcctgggctggcccccacctctatcctcaattcacaatgtctccaccagtgcatgatccttgagaatcctcttgccactccaacatccttgctgaggtcactgcccagcaaacccgccccagctcttcagcagtactatccccctactcctagaagcttcataggtagttcagagttgcagcccccacagtgaccatcccaggggcaagtgagcaactaggcctctatttggtcactgactcacaccccctagtcttgcaaacttccaacctacaacctgcagactgatgcaagcctcagatagattgtgtgtggcctgcacagtgctttttaaaaaatagaatttgttgttaacgtttagaaattgggctattttacaccaatatctagttttcagtttccctttaactggctgcattgagactatatttttcctcaccccaatcccaaaaataatcagct

SEQ ID NO: 914301 - DNA, 4001 bp, Homo sapiens
ttgaggaatcagtatcaaaatgatgcccctcctccagctatcccgtggtaaagcaggtccccttacccaccttccaaaattctccatcctcaaagccttctccatgagcaaaacctgtccaggtgagctaggaggagggatgggagtagtgagtgagtgtcctatcctactccagcagcacacactccctccacccctggcccaaaatcaacaggcctgtgagcctcacctgggactcctcttgggggctgctcccctgtgagggggaggcccggccggggggttcccactgggtggtccctgttgggatgtgccagtaataggtccctgaggtgtcctggaccctcatccatccagccggcaggtcggaatccgtctcgaaggcgttggggttccagaaggaatctgccaggtgggaggcttggtgagggtcagcctacccaaagagcagacagctggtgcctatgcccggtcccctctgagaccccatggttgagaaggggtggtggaagagctataccacaacacagttcctgcttctgcctagagcctatagtctggagtcaccacatgtggggccaccagtaggggacatggctcaggtctcctcctgggccctgttggtggctaatgtggccacactgtggaaaggaggaaggcagggagggaagaaggaagggagcaatgaatgttgggtgaccccaattaacctcctttcatacatatctattatctcagttaacacgaaggtgaacactttctagctcctgcacacgtacatgtatacacagacacacaacacatacaagccctaccacacacctgtgcagccacaaacaccagggtatgcaacacagaaaatgccagcacagatggcaggtatcacacacaggtgcacatgtatgtgcaggggcacacacacacaaactttagccatacacttatgcagacaccacagaggtgtgtgtgcatgcagctaaacatacgagcccctgccacacaggtgtgcagataccacaccacaatggccccaacacacgtgtgggtaccacacacacaggcggacccacactcagacacacggcacacgtcaaaccctgccaaatgtgtgcagacaccacagacgctcacttcctgacccttgctgcacacagatgcaagcaaacatgtcatgcacatacacacatacctcgcatctgtgtcatacacccttgtctgccggcagagccacaccactccaaccctgtaacccgctcatgcgtcctctaactcttctctccctgtcagccccaccccacatgaggcccaacctcatgctgcccctcacctgcgctgctgtcctgcaggataatggccaggaaaaagtcctgggagaacatggcgctcattcccggcccctcctgcctccaccctccctcctcacagcccctccagcccagccagctgggctcacagcctggtgctgggctgcagagaaaagctcatcccgcccccttctcaccagggcagagcgtctgccaggcaagatcctcccccgcttggagcttgctagggaggggccaggaccaccatgctagggaatctccttggggggtggggaagggaggagaaagggaggttcatgagaccccagccccttctgctcacacctcttcttcctcgccctggctcccctcccccaatcctgaatctccatcccaccctccagtggttacctcagtgcctaagccaagcccagtcttagggataccaggagactcagcccctaaggaataccccagctgcctggggccctgcagagcctatagctgtcagcataaatagggtgtggtttcaaggccttcagggatcccgcccctgtccaggacctgcacagcagtttgaacccaagggtgggctttgaggtcctgagccccagcaagcttgaggctgggcttggggcttcccagcaccaccccccacccctcacctgccagggcccagctaggctgcagcgtctcctcggcaaccgcagcaccaggaccggctgggagcgcccagactgctgacgtgcttcccgttaccagggaaaccaggaatcctgactggtccaagaggcagtactaagggacaggcagtcccaagaccctgctgctgggcaaccagacacagcagggctgggagtgggcgtggttacgccaaggtggctgcacacctgacgagagttattcaggcagggtgcttcaccatcctcagcttccaaatgacgtgggcccacagacacccaaagaggaggggctcttgcccatccaccttctaggcagccatcaccgcctctcctcacccccacttccccctaactcacactctatggaataaggttttcaataggcacctgaaacttagctgaggctcagggaatacctgctgttccctagagaccctccattgcctcaggactctcctgctaaaaccttccaggaacagcaccctagggcctccatgccctccacagccacagcctgcttcatgagggctggctggacacttctggaatctggggaccagttcaccatctcctgactgagtcacacacaccaatccatctgccatccctgtcagcctgtaccttcctgcttcaaagagcttcatccttccgatctgtcctggaagggcagtttctccccccttggccatctgggaggcccttctggagcttggcacatctccctccaagcgcagcccaccccggcctttgctttcacacacatgcatttattccagaacgcacaccttcactcctgcatcgattcatgcgacacttacatataaaatacattaaatgttcacgtatcattccttccttccttcattcgttcatccacaaatgccttagtggtgaagccaggtgtactcacttgctcaggaatcagtgattgacttaaagctttccccttctctccaccccacataactaacatagcccaggctactagcttttttttttttaacctgcatcattgcaaaaacatcataactggtctttctcttcctatctggtctcctccaatctcagctgcacagtacagcccaaatgattcttctgagatgctaaactaatcaagtaattttccaacggaatcctcttaattgttttgtcactgccctcaggataaagtccaaattcctccccaggttttatgtgctgtcatgaacccctgtctgcctctcagccttacctccagccactccccttctctctctttgcttgggacatgcccccttgtcctctcccagcccacctcccttactctcgattttcacctggctatcacctacctctccttcagacatcagtatacaggtcccttcttaaaactgacccattgccctctcccccaccactctcacaggcagggtcaggggcccctcctgtacttccccagccccagagagctcatcgcactgatcataaccacttgtttctttctttgtctcctcaccaggctgtgaaggccaggaggtaagaacatctttgccccatagtatacatttccagcatttacgataaggcctggagcagagtatgaattcaatacaggtagtaaagtttattcattcatcattcatttaattcatgaattcatgcatttatgcattcaatccatagctctatgaatatcctacaataggaaggagaatataatttttgctcaattctagcctcatttctgcaggagcacaaaccttctctgcagccctcatggtcatagcaacacagttgtaaaagagtgacttggcccctttcctgggctggcccccacctctatcctcaattcacaatgtctccaccagtgcatgatccttgagaatcctcttgccactccaacatccttgctgaggtcactgcccagcaaacccgccccagctcttcagcagtactatccccctactcctagaagcttcataggtagttcagagttgcagcccccacagtgaccatcccaggggcaagtgagcaa

SEQ ID NO: 914302 - DNA, 4001 bp, Homo sapiens
tctctacccagcctagggagcgcacggcgaaacactgccagacacagaagaggggcaggaggtagaggatctgagtcaaaactggagagttcctgactacagagtgtggcaggaggcagggtgttctgaactaagacggagaagctccccaaacaggatgtggttagggagagggggatgtggttagggtgagggagatgtcagatgagaccccagctagtacaaaaaagcacctgaactaagactacaagggcccccaacctggctgttgggctggttgatttaaaaactgaagtgcctccagctcagacacagggctctgtgctgagactggaagaactcctaactcaggacctggggaactgcgctgagacccctcagagcacaacattaggggctgtctgacaaataagagggccccagactcagaatgggtgtcagtcttgaacaaaccttgatccctgggttggtattccgtgggggaagcttctcctcctcttggggcaacggctctgggctgaaggcagatggtaatacttggcacagggctcccataaatggagctgtcccaaggccccttccagacagatccatcccactgccagctcactgcatctggcagctcacctgaggctctgagctgggaaggtcaacgtcccctcctcaggttccttcagtcccagctccattggggcctcatcactgggttcatccttgggaaggggattgaggaatcagtatcaaaatgatgcccctcctccagctatcccgtggtaaagcaggtccccttacccaccttccaaaattctccatcctcaaagccttctccatgagcaaaacctgtccaggtgagctaggaggagggatgggagtagtgagtgagtgtcctatcctactccagcagcacacactccctccacccctggcccaaaatcaacaggcctgtgagcctcacctgggactcctcttgggggctgctcccctgtgagggggaggcccggccggggggttcccactgggtggtccctgttgggatgtgccagtaataggtccctgaggtgtcctggaccctcatccatccagccggcaggtcggaatccgtctcgaaggcgttggggttccagaaggaatctgccaggtgggaggcttggtgagggtcagcctacccaaagagcagacagctggtgcctatgcccggtcccctctgagaccccatggttgagaaggggtggtggaagagctataccacaacacagttcctgcttctgcctagagcctatagtctggagtcaccacatgtggggccaccagtaggggacatggctcaggtctcctcctgggccctgttggtggctaatgtggccacactgtggaaaggaggaaggcagggagggaagaaggaagggagcaatgaatgttgggtgaccccaattaacctcctttcatacatatctattatctcagttaacacgaaggtgaacactttctagctcctgcacacgtacatgtatacacagacacacaacacatacaagccctaccacacacctgtgcagccacaaacaccagggtatgcaacacagaaaatgccagcacagatggcaggtatcacacacaggtgcacatgtatgtgcaggggcacacacacacaaactttagccatacacttatgcagacaccacagaggtgtgtgtgcatgcagctaaacatacgagcccctgccacacaggtgtgcagataccacaccacaatggccccaacacacgtgtgggtaccacacacacaggcggacccacactcagacacacggcacacgtcaaaccctgccaaatgtgtgcagacaccacagacgctcacttcctgacccttgctgcacacagatgcaagcaaacatgtcatgcacatacacacatacctcgcatctgtgtcatacacccttgtctgccggcagagccacaccactccaaccctgtaacccgctcatgcgtcctctaactcttctctccctgtcagccccaccccacatgaggcccaacctcatgctgcccctcacctgcgctgctgtcctgcaggataatggccaggaaaaagtcctgggagaacatggcgctcattcccggcccctcctgcctccaccctccctcctcacagcccctccagcccagccagctgggctcacagcctggtgctgggctgcagagaaaagctcatcccgcccccttctcaccagggcagagcgtctgccaggcaagatcctcccccgcttggagcttgctagggaggggccaggaccaccatgctagggaatctccttggggggtggggaagggaggagaaagggaggttcatgagaccccagccccttctgctcacacctcttcttcctcgccctggctcccctcccccaatcctgaatctccatcccaccctccagtggttacctcagtgcctaagccaagcccagtcttagggataccaggagactcagcccctaaggaataccccagctgcctggggccctgcagagcctatagctgtcagcataaatagggtgtggtttcaaggccttcagggatcccgcccctgtccaggacctgcacagcagtttgaacccaagggtgggctttgaggtcctgagccccagcaagcttgaggctgggcttggggcttcccagcaccaccccccacccctcacctgccagggcccagctaggctgcagcgtctcctcggcaaccgcagcaccaggaccggctgggagcgcccagactgctgacgtgcttcccgttaccagggaaaccaggaatcctgactggtccaagaggcagtactaagggacaggcagtcccaagaccctgctgctgggcaaccagacacagcagggctgggagtgggcgtggttacgccaaggtggctgcacacctgacgagagttattcaggcagggtgcttcaccatcctcagcttccaaatgacgtgggcccacagacacccaaagaggaggggctcttgcccatccaccttctaggcagccatcaccgcctctcctcacccccacttccccctaactcacactctatggaataaggttttcaataggcacctgaaacttagctgaggctcagggaatacctgctgttccctagagaccctccattgcctcaggactctcctgctaaaaccttccaggaacagcaccctagggcctccatgccctccacagccacagcctgcttcatgagggctggctggacacttctggaatctggggaccagttcaccatctcctgactgagtcacacacaccaatccatctgccatccctgtcagcctgtaccttcctgcttcaaagagcttcatccttccgatctgtcctggaagggcagtttctccccccttggccatctgggaggcccttctggagcttggcacatctccctccaagcgcagcccaccccggcctttgctttcacacacatgcatttattccagaacgcacaccttcactcctgcatcgattcatgcgacacttacatataaaatacattaaatgttcacgtatcattccttccttccttcattcgttcatccacaaatgccttagtggtgaagccaggtgtactcacttgctcaggaatcagtgattgacttaaagctttccccttctctccaccccacataactaacatagcccaggctactagcttttttttttttaacctgcatcattgcaaaaacatcataactggtctttctcttcctatctggtctcctccaatctcagctgcacagtacagcccaaatgattcttctgagatgctaaactaatcaagtaattttccaacggaatcctcttaattgttttgtcactgccctcaggataaagtccaaattcctccccaggttttatgtgctgtcatgaacccctgtctgcctctcagccttacctccagccactccccttctctctctttgcttgggacatgcccccttgtcctctccca

SEQ ID NO: 914303 - DNA, 4001 bp, Homo sapiens
tcacaattatatcttcaggacataacacagtgcctggcatatattaggtgctgaaatcatatttattgcatgaataagtgattggaagcatttttcaaaggattactctgggtactgtgttgagaacagttaaagggaggtaggcaagagggtatgctattaaagtagtcaaggaaaaaaaatggtggtggcccagattaactttggtggcagtgaggaaagagcgaaatgaatggatttgagaaatatttaggcagtggatgtgacagaacttggtgaaatgagatgcagagagtgagagaggggttaatctcaagtcttgctcatgactccagattggcaaagagccatttttgagattcgaaggaagaacagatttggaagtggggtacagagaaaaccacagaagataatttagcttggaatctataggtttggaactcctgtttgtctttcaaggagatgtcaagagagcagctggacatatgagtctggatttcaggaaagaagtctgggctggatatataaatttgggaatcattagcatatatatgaaatttgaagctttgggagtagataaaatatctggggagaaagaacagatactgagagaagacagctcgggacagagccaagagcctcaccagcatctaaagagaggaggagaggaagcaaatgagattgagaagagcagacaatgctgtagggcagaaagcaggaaaatgcttcaaggagagtgagttgacataccccaccgaatactactcaaaggtaaaggagataacagtgtccactggagttctccacaaggaggtctccggtgaccttggcctagacagtttcagtgggtgtcagggacacagagtggagtgcttttaagaatgaatgggaagtaaggaaatgaagacagcaagcgttgactctgaagggcggagagagctgggactatagctagaggggctcagaatgcaagagatacacaggccgatacaaaacaggttaggaattggcagtgggaaaactgcttctaatcagtgttcttggcagtgctaggcctcctggctgagctggggacacagccgccccagggcacacccctcggtcgctgagggcaacagaatgcggcttgacagatccagggcctgggacccctgctggaatcggcgcggcctgccagcccaccccaccccacgtccccttcccggacctgggcctcccctcccccaacacccactgcccctcgcttcgcgtcctccatacccgcccctagtcaccccgaggggcaggaggtaaagggcagcggaagggacggtgtgagggcccgagtggaccctgcgatggtgggtatgagaggacggtctgcgggcgcgcggtggaagggcgacccggggatgggggatggggccggccgggggacccgggctgccgcagggtaggggctacagggtccgccggccgctggtgatcgggacgcagccaccggggctgggccggggcagggacacctcctacctgcgcggtgaggccccgggcccagatgacggaggtggctcaggctgcggggttcgggctccgccgcggcttctccatcacaacatcccccgcccaggagcgcgcgggccgcggggccgcgccccgagcggcggaggcgcgcgcaaggggagggggaggggcgccatcttggggcgggcgcgggagcgagctcggcgggcgcggcacttgccgcagcttcttgggggcctcaccctgcgggcggccctcggacctcggtgagccccgcggtccagccctcccagcagacacccctgcagccgactccctgggacccccgcctagcgcggcgccgtcctccactactattccacagactcaccctgcgcgccccgcagcgccctggtcccgcacccacgccgggagacgcgcggacggggctggagcccgaatggcggcggctgtgcggcgccgcggccgcgcggggaaggattcccgggaggcactctgcgccgctcctgctgcaccgctccctgacgtcctggtggggaggctctgaggacacagcgttgctcataataatagctcgtatttattgaccacttacaccgtgccgggctctctattaaaccgttaacgcgcattaatcttcacatcagctctgtaaaatcaccagaattattatcctcatttttcagaggctgaggctaagattaagagaggtaaagcgacttgcccgcagtcacagttagtgatgaatttagactggaactccgatgtttcttgacactgaaatacctctgctgctgagcataaagctgacatcaaggcctggaaaatgtcaagaatacattgctccccggtagaaattcacaaggaaggggatattgtgaatgaaaagtgtaaagatgtaaggaagatggtggggtgcaatacttactacagaccctccctggatagtgggatacatcccaatggtcagatcagtgacccagaggccatcaaggataatgagaggttatattaccatccagaaagcctctacatgctaatccctctcaggtgcctaaaactaaagatatccaaatctgagttcgttctttctttcaaggcagggtctcactctgtcacccaggggcaagatcatggctctctgaagcctcagcctccagggctcagattcctcccgcctcagcccccggagtacctgggccacagacatgtgccaccgcgcctggctttttgtattttagtagagagggggtctcactgtgttccccaggctggtctggaactcctgtgttcaagcgatcctcccacctcggcctcccaaagtgctgagattacaggcgtcagacacagtgtccagcctcaatttattgtttcatccccctttattagtcttttaaggagtttcactggggtgaaaaagaaccctcttcaacacacacaacacaacacacatcccacactggacacaactccattccatccattccaatgaatgacaccaactactggcttcccaagccagaagcttcaaagtcatctttgaatatacttttattttacttgtggtaaatataaatgttttaactttttattatggcaaatttccaatatatactaaagcagacagaacaatataatgaaccctcatatacctatcattcagtttcaacaattatgaattcacaaccaatagtttataatgatttgacaaatgcctatgatatatgaaccatgtatcaggtcccaagccaggccctagggatctaaagacgaatcagatttgactgcatctcacctggaggaaatgacatctgacctgggttcttgaaagatgaagaagaattacccagaagaacaaaagtgtcctcattcattcattcattcattttctttcatcaaataattactatgtatgaggtactgtccttggtgctagcaacaggtcaagaaacaagatacagttccgtctctcatacagcttgaaatttaacaggggaaagagacattaaatatgtaattaggaatgtgatgagtgtcttgaaggagatgtaccgggagctatgtgagtgggcttaatttggcctgggaagtttaggaggctttcataggaagtgacaattcagtgagggaaagggatgaaggagctagaggtcagccaggagaagagaaaagtattccaagtagcaggagaaatacaggaaggtcagtatgggtgttgatatagtttggatatttgtccctgatcaaatctcatgttgaattgtaatccccaatgctggaggtggggtctggtgggaggtgttcaggtcgtaggggtggatctctcatggcttggtgctgtcttccccatgatgagtgagttcttgtgagatccggttatttaaaagtgtgtggcatggccaggcgtggtggctcaggcctgtaatcccagcactttgggaggccaaggtgggcagatcaacttgagaccaggagttcgagaacagcctggtccacat

SEQ ID NO: 914304 - DNA, 4001 bp, Homo sapiens
caccacgcctggctaatttttgtatttttagtagagatgggggttcaccatgttggccaggctggtctcgaactcctgatctcaactgatctgcccatccacgccccttaaagaattgggattacaggcgtgagccaccgtgcctggcagtttttaccttcttaatgaacagaatattcctccttcacaaccgacctacacactctatccacatgtacagcagaacatccgtatacatttcttactgataaaagtgaaattccctactgacagggaatgaaggaaaaaaaatcatttgctatttcaaactggtatattcttaattctagattaagctacaataaatctccaacatgaaattttttttttttcgttcagctcagaaaagtcctatttgaattatgttaagaaaaggggacgggaaaggtactcccacgactgttaatagactagaatcttccactttctccaagaagggatgcgtaagcagaaaaatcacaaagttctaagcgctgaaaagctatggtgtgggatttctaaaacaatgatcaaggttacctccaggagagcctggttcttttcccaagaacacacatacccaaccacttatcaagttcaatgtactccagtacttgaaaactcatacagggaacaaatgacttgtatggataattcaacactgctgagaaactgtgtatcgggggcaagcatcgttaagagagctcttccagacaactccattcagagctgcgcactcacactctccttcgcccagccctgttttattttcttcaaacatgtttcattaaaaagaataaatttttaaaaaaaacctttttttttttttttgagacggggtcttgctttgtctcccaggctggagtgcagtgaagcgatctcggctcaccgcaacctctgcctcccgggttcaagcaatcctcccacctcagcctcctgagtagctaggattacaagcgcgtgtcaccacgcccggctaatttttgtatttttagtagagacagggtttcaccatgtgggtcaggctggtctcgaactcctgacctcgtgatccgcccgcctcggcctcccaaagtgctcggattacaggcgtgagccaccaagccgggcctcacaatgcctatctttcttactacactccctcctaactgtacattctgggagagcgcggacctttccatctgtatctccagcgctcggcactcaaaaaaatgcactgaataaatgaaaccgtgagctctcatcaaagtctggaccaaagagtccctcttctgtttctcacaaacttctgtctcctaaacactcttcttcaattagtagcagaattttgcctcccccccaaaaaaaacacatcttgacctcatgaagaaaactcccgatctaatcttggaagcactgagctccaccgaaaaggagaaaggcttaagagaatcctgtagagaaaagctccgtgagaagaattaacgtgagcctgaacgggctgagttaggttacgccacggtgagaaaaggctgggcaagggaggcaaggaagcctggaaccctggggaccgcggtctccctggtgaaaccagagtctacactcccagagaggcccaccccgacgagacggcctgaggaggctaggaggccccgggaggatgaagccgcagcccccgctcggcccggggagtgcggcgggaagcgctttcgaaaggccgcggagcgccaggccctgcaggccgcccggggactcaactcacctggcccacttgctccgtggcatcggccaggatgccataattgcggtaaagctcctctactgtcggcatggtgagcgacaagcccagggcccggttccgctatccttgtcctgaccggcgccaccgccgcctcggaacttctccaaacccactacccgcactattacacctccagctgccgccagtgcagccgccagtcaccgcgcacagcgcggctgcgcccccgacgtctacgtaaagacgcgcacgtcgggagcggccttcagtagacaccccccaccccaatgcgcctccgcggtttttgtcgccctctacagcctggaggagcaaaaaagcggcaaggatgattgaattagctcacgcctttttgaaagcttgagcttggctgcaggctctccatggaaggggtgtgggtgggcggggaagtgaatacaaagacaattgcgtttctgcccttagaagatcttacatatgagaagtcacaaatggtttcctcctgattcaaggaaggtaatattaatcggtggcactagaggctagtgggtccggtgggaagcaaaaaacattcctatgctattaaaaaaccctctgtgtccaccacgctcatcaagtgcggggtcaaatttggcctgctggaagaatttgcttatctttgctgccagtgtaaagaattggggccacctgattatgtccagtatccaaaagaataataaataaatgaaatcacgtacgcttactgataagaatttctaagatacaagtttaaatgaaattatatatataatatgatataatatataatattttatatattatataatatataacattatatattaatatataataattttatatattatataatatataatattatatattaatatataatattatatattatataatatataacattatatattaatatataaatatataatatataatataaatataataatattatattaatatataaatatataatatataatataaatataataatattatattaatatatattaagataataatattaattaatacattaattatataatataattataatatatctatatattgagatataatattaattaatatatcaatattatcaattatatattataattatcttatattatatataatatattaattatataattaatatattaatattattatcttaatatatattaatatattattatatttatatatcatatataatattatgatattaatattataatatatattatatattatattatatatacaattatatatataatatatattatatattgtatattattatataattatatattaagataataatatatattaagataataatatattatatatattaagataataatatatattatatatattaagataataatatatatttatatattaagataattatatttatataataatattatatatatatatagccgtgtgcggtggctaacgcctgtaatctcagcactttggaaggctgagttgggtggatcacttgaggtcaggagttcaagatcagcctggtcaacatggtgaaaccctgtctctactaaaaatacaaaaattagccaggcgtggtggcatgcacctgtagtcccagctgcatgagaggctgaggcagaagaattatatgcacataggaggcagaggttgcagtgagcccagatcatgccactgcaatccagcctgggccacagagcaaaactctatctcaaaaaaattaaaagaaaaagaaaaagaaaaagaaaaagaaaagttaaaaggcaggtataagatgatcccattatgtaaaacatacaaagcatacaaaacaaagttatgtgtgtatgtgtaaaaggatgttaaaggatgttaacatttcaggattgaaatatcaaactataatagactgtaaatttcaaagccacatccacttgtacagaacatacacgggaaatgattacaaaagaactccccggctcttgtacttctcagttagattgaggataaatctcacatcctaaaaaggattagagctgagcgtgatagccaacagtcccagctatttgggaagctaagcggggagaaccacttgggcccaggagttcaagtccagcctgggcaacacagcacgacccctgtctgaaaataagaaatcaagtgtaaaattcaatgttaaaaaaaattgcaggccaggcgcggtggctca

SEQ ID NO: 914305 - DNA, 4001 bp, Homo sapiens
cattgcccatgaccccctaaaactacaatgaaattttatgacttcttaaaacttttcttattgctgtttttatgtatttgtacaaaaccagacaaatacaaatatctagaggggctcatgtatttaactagatatgcaaatccagtgtgagtagtggaagctgtggtaacctggccagcaccctctgtaaaggtggtgttcactagtaaccgcaatccagatcccatgaaaaaataagggcccaatgtcaccatgtgttctgaggttttaaaagaagctgaaatgattctggattttgaaatgttggcttggcagggcgtggtggcttacacctgtaatcccagcactttgggcagcttaggggggtggatcacctgagataacgagttcgagaccagcctggccaacatggtgaaacccagtctctactaaaaatacaaaaattaactgggtgtggtgacatgcgcctgtaatcccagctacttgggaggctgaggcaggaaaatcgcttgaaccaaggaggcagaagttgcagtgagctgagatcacgccactgcactccagcctgggcaacaagagcaaaacgtgtcaaaaaaaaaaaaaaaaaaaaaaaaaggttggctcaaatttttcatgaacattgagtgcagcaaaaaaaaaacatgcctgtccaccaagctgtctgtgggccatgtttggtttgagaatcctagtttattctcgggtcccttaaggctctctttgatgctcattctgatgacattacactaagatttactgattgagggtacggacacttctccatacacacttgcccaggaacgatctccagttacctgtcctgtctccaagatcttctctctctcatccaatcttgcctatgcagcattctattttcagagtcgtctttgctaatttggggaagtcacttattcaaacaagaaagtggttgacaaatgtttagcaatgaaatctcccgcgagttactactttttaattaggattttcaaccctaagaaagatatagataggaggaataagatagggggaataaggaaactaattttgaggggtttccctgcctcttaggtggggtttatcatattgtgctgaaactgcttattcgtctagttctccagaccctgggccatttatcttacgtatccctatctctgagcgtgtagaaggcgctccataaaactgttggtttgtgtaaatgaccgaaaactacatgcagcgtgagggtggatttccctttgacttcggcttaaggaagaatcgttcccatgatcatcccacaattcatctaaacggagataggcaaggagcaactgctcaaaggcaaagcgctggcagctgaggcacagctccggttcggcaaacgtctcccgagtgccaaacgtccccccaaacgcctaactggtcgtcagggcgcagaaaagaagcttggggggcgcggtcttcgccccagctccacttcggtgcttcacgattccttctctggcctgccttcctgataaatacccggtgaggtcacctaaacgctctcctctctcagttatttgcttctttccaacgtttggcgcccagctcccgccatcggagcgccccgcccgagaccactgatctcctggggcctcgcagccttgcttccgaacgccaaggtcgcggtgcgccggggtagcgaacggccaggcccgaaaccccgccccgcagctaaacgcccggcccgctaccctgcgcccagctccagccgccgggtcccgcctgggcctctcctcctgggaataccgggcaccggtggccccgcccctacctgcgcgccgcatctccgggaacaacagtctccctcccgagcatcacagccagacatggcccagaccagggacccgcgcggcctccaatctccgcacggctttgcgcgcggcgcttagcctgggatacggcagcgaggccgcaaatgcaatcaggcggcgctgagggcagcccgggggcggggcgaacggggcgggggccggggtctggtaaggccccgccggctgagatatccagcggcgcacctgacttcccgggaggcaaggccaacgtggttggaggcggggctgggttggggggcgggggttcaagtctgagagacctaaaggcaccgctagcgtctgggggcgtggccaaccatgcgggaggcggggccttgatgctggacatcaggctgtgctgcgggcagccagtgagaaggccgtcaagatggcggcctcctggaggctgggctgtgatccgcggctgctgcgttatcttgtgggcttccccggccgccgaagcgtagggctggtgaagggggctcttgggtggtctgtaagccgcggagctaattggagatggtttcacagcacgcagtggcttcggggtgagtggccggggctcgctcagcttctctgtgtagctgagtgatgggcctgggacaggggcagttatgattgagggcctgcttttgggtgtgaaggtgcgcgggctccttattccctttcctctttctccggttggggtccgccgacttggcctaatgcatgctgtgaagggctttcttggcagctgagagaactcgactctgccctaggccccctggtttgtatggctttgtgaccttgccttggaatttgggttatttgtgaggcgcagagagggttcccaaactctcctccctcagccccctttccaatcaaggctcaggtttctttagggttgtcaaacgtctcggacgagaaaaagctgcccaaggttgccgagattgaaaagccactgttgggagttcttacttattctctaggcctctctctgttaggaggtgttttcattgaggccagtcgagttttaccccacgccatgactcgtggaagacttaaatttgtaaattcctacggcatcacgatagacaaaggtccaggagaatgtttcaagcaaatattcgcttgaaagagcaaacatttaggagataaatcataccaaaaatttattatagaaaattgttgtttagtaatgatattgatgcagttaacacaattcttgcagtatttaacagtatgcaaaatggcaggccgggtattatttttccttattttgggagaaggttggagggaggcggggatggagaataggactgacgttttttagtgtgacgtattacctgccaatcatcgttcctggcactctacagaatgaattttaatttaaataggtctagtagacgttgccttcatattctgagctaccttaggctcagaaaaaaaaaatcacacaaagtcatatggtaagatgagtgtattggggttcctaaaggttccttaatgggaacaatttatttcatttttggtgtaatgtttcataacatattccttggagcagaggtgctttaacagtgtgtgcagaattccttctcttccctcctccaagtttgttgaaattaaacttttttccagctcctagagattcggtctggtctggtgtggggctcaggaatctgcattttacaaatgttggatgagttttgatgttttattttgacatttaatggaatgagctttgagactcactgccttagaaaatcatggaatattaaaagtttagtattggatataatctaggaagagtgctcttaatcttgtttatcaagcagatccttttgagaatctttgaaaatgttacagactctctgtacagaggaagtaccataaatggtcacacacaaaaatgtgcacgtagtggctcacgcctgtaatcccagcactttgggaggcgaagctggaagattgctagagcccaggagttggagaccagcccgggcaacaaagtgagacccccgtctctacttaaaaaaaaaaaaagaaagaaaaaaagccaggcgtgctggcatcccagctactccaggggctgaggcaggaggatccgttgaacccaggagttagacgtttcattgagctatgatcctgccgctgcactttagcctg

SEQ ID NO: 914306 - DNA, 4001 bp, Homo sapiens
cagctgcagagagtggtgggggaaaaactacaaggaaagaagggaggaaagacgattgcagatctaagaaagcagcagagggaaacaagcttttactgcgtccagactcaggcttcaacattttaggatcaatatgactttcccccatttcataccaatggagaaactgaggctgagtgagattaaatggcttgtgcagggtcaggtctgtagagcccagtctctttcccctaaaccacaaacctctgagaaagaataaagcagtagaggaggacagggcggggcagaatcaggggacagttaaaggatgtgcataggacaaggagtagccacactacctgattttcagaaagcaagggcaaaggccggggagggccgagggcgccaggcttctctctgctcccagccctagtcaaccacaagggtctcctggctgtaggggatggatttctcgtgcatctgttctccacccttgcccatgttggggccgggcccctggctgtgccccgaagagtagctggctgacttctccccactgctgctgtgggaggtgcctgcgcacctgctctggccacagcagagcatggaggtgcaggcctggcggaagcgggggtcgaaaaaggcatagaggaaggggttgaggcagctgttgacgtagctgatgcaggtgcagtaggggaagatgttcatgaggaagaggtcaaagtcacagggccagtgcagcaggctgcccagcatgtacagcgtcttcaccaggtggtagggcatccagcacagggcaaaggtcaccaccagcaccacgatgatgctgagcagccggcgccgcttccgcaggccctcgatgcgttccttgcggaagtggccagcgatggtttgggcgatgaagaagtaacaggtcagcatgatggtgaagggcaccacaaagcccacggtggtggacgagaccccaaggcccacctcccaggcccactctgagctcacagtggccaccatggagtagtccatgtagcactgcaccttagtggtgttctccaagtccccggtggtgcgtaacaccatgacaggcatggccaggagggcggccagcacccaaagaactgccgtggccacggccccgctgacccgcagcctcagccgagcattggccactggcctcacgatggccaggtagcggtcgaagctgaggccggtgaggcagaagacgctggcgtacatgttgacgaagatgaggtagctgctgagcttgcagaagaaggtcccaaagggccagtcatagtcccggtacgtgtaggtagcccacaggggcagcgtcaccacgaaggtcaggtcagccaccgccaggctagcaatgaagatatcagctgagcgcctcttctcccggctgctccgaaacacggtccagagcaccagaccgttgcccgtggtgcccaggaggaagaccaacatgtagatggcagggatgagggcccccgaggatttccagtctgtgtactcacactcagactggttgtctgccccatagtagttgtcaaaatcaccaccttcctccatgctggggagtggagagaagacgggcagagggtcccagggacaccagctccgtggctctgtcacccactctgcaagcagcctgaatttctggcttgagcctcagagagtaagaagggctgaagatgcccagagtccttcccagcactcaggaggagctgcctctgggttctccagaccctggaggaagcctgtctcctgcagaatttcctccaccctctcttgccttacccccgtctcagttaagacacttccttgcaccctcctgcgtccctgtctcctccttgactcgtcactccctcctcccacctccagaccagcccctctcttgtgagtcaaaatctttagtgacagcccactttttttttctttttgtcactgagcaagtggaccaaattgacccctactgtgctgggctgaacattatctgtggttttgcaagtcggctttcctggccccgcctctcctttctggctgccacccaccttcaccccagcccctatccctccactttcctctggccaccacttcctgcctgccctttagggcactccctcctcagtgctctccgccctcctgttctcacccccttccatccaatctaaatgggacacattatgcagattgcaatccagcttgagctggagccagggctggtagggagcaaggagggtgtaagatttcgcaggatgggcagggcatctggcaggtcctcctggcaggcaggtctggccccctcggctcccttcctgcacccccagcccccacccagaccaggtgtcacaggagggtcttctcccactttgcctctcgcttcatctttctctaccccttggctttgaccctccctctgagaacttttgtggtttctagagaaatacccctacactagtgtagactgcagtttgcagtttgcggaaggcacaggatgctttagaaggttgagggcagtcacaggatggaagaaacccaggacaaaattatctctaaacaagtcattaaatctgtaggaaacaaaggcccaacaaggtcaatgttttgcccaaggtaataaagtgaattatgctacagttgattgtttgcttttcttcttctccaaacacgaacataatacagtacctggcatgtcgtaggtgaatggctgttttgtttgtttgtttgtttgttgagacagagtttcactcttgttgcccaggctggtctaggctcactgcaacttctgcctcctgggttcaagcgattctcccgcctcagcctccctagtagctgggattgcaggctaatttttttgtatttttagtagagatggggattgaccaggctagtctcaaactcctgacctcagatgatccacccacctcggcctcccaaagtgctgaaattacaggcatgagccaccacgcccagccaggtgaatggctgttgagtgagtaagtggatggatgatgtaggaggtgagtgaaaaggggaatccatagatggaagaacaagtgtaagaattactacgtggtgagaacatggatacatttcagttctcaggtttttactatcctccatggaccaagaggtttctgtaagaccacagggggtcaggaagttgagctagaggaggggggtctctagagaaagactcagtcactggaggatactgtggggaaagttccgtagacgctcactttgccccagctcatcacctctccaggacctctaggaaggaaggaagatgcacgacgtaagattttttttaaaaaatacgcaccctttccacaaccttgaagagttggggaagccacctgacgttgggtaatagtgagatggaacaaaagcaggagctgagccttagccacttccaaggcaaaagacttacaaaagctggaattggccaggcaaggtggctcatgcctataatcccagcactttgggaggccaaggcaggaagactgcttgagcccaggagttcaagactagcctgaataacacagccaagaccctgtctcacgatatatatttgtcttaagttactacaaaagctggaatccattttctggagggagagtggatcagaaaatcatatgcagagatcaaggaactcaaactcaaatacctgcaaaaaaaaaaaaaaaaaacaggccaagagtgtagtttgagacaacagagaatggtaaagactgtggcaaactggagggtgcccattccatcatagggaggcctcttcagctctagtctctggttgccacgcagaaagctggaccccagcatgactgtgtcttaggatttttccaagataatttcaaattatggatttttgtaagaaattttcatatttgtaaattttggaaatcaattttcatttcaaaaaaaagcacagaccatgataagtaaaacatgtctttggcccccgagtttgtgttctttaaacaggagcttgccaagaatagaaggcaggagaagaa

SEQ ID NO: 914307 - DNA, 4001 bp, Homo sapiens
caaagaacaggagttaccataaaaccatttttcagaaatgtttaattcctactttcttcaaccatacttttcaactgaacaacgctgtggctaacaatcaaatttaacacacaacaatgaattctcatattattttttcccgctacacaagtattaacgaattctttaaaactgctgagtcttctactgtgaattcactaatgcctcaaattagtcatagcagtgggaagtggagtgcgagtgtgaacgatggtttctgacacccgacccactagtgaagtcccatcttccatacgaaagcctttattttttcttcccatctcactcacctagctgttttcatgcgacatatcagggatcacagatacaactctgaccattgtgtggacacactgaaacaatcgcaatccaaaatcctctgtagataaacgttaactatttctctttaaagctgaactcctttcttaccctcacagtcacaaagctttaaactggatgaatacaaaggtgttaagccgttccatcagagaggctttttattagatttatttttacccgtggaaatacttgaacattctgtagaagtaaatatattctaaacctgaggtctttaaaagaaagctctcaattaatgcccaatcaaatccagtcttcaggtctctctgaaattagctaagtatgcagaaaccagttgtaatttttaaaagagcgaagagggagaagaaataaacgacaccagaactacacattccagaccagcagttcaagcaccacttcgagaagggaagtaaagatcaagctcgccgtctccctcggccacagcagggctcctccaaggctgcccgctccggcccgcaccgcggaccccgccgcccccgccccctcccgcggcctccccaacccccggccctgccgcttcgcctttctcgcagcggggatgctcagggtgcgacctcgaagcacaaccactgatggaattctgacacccgaagaggacgatttttccaacagtttacacgccttcgcgggcaccttccctactcactgaaaccctcacgaaagcggtcaacgcacccagagcgggtttcctcggtctacggacgcaggcaaacagcgccacttaaaaaatgcgcgtccgcgacccggccccaggcggcagagggagcagcgggcggcctggcgcgggagctcccccggggctcgcagcatccctgccgcgcgcgaaggccggggccgcgtccacctggcaacaaaggcgaagcccgccgctcgcaggtgggaggcccggagccgaggccccggtgccgcgcgagggagcgtacggggtccgcgcggggccgcccctggagaaagcccagccgcggactccggcgggagaggagcgccctggcattgtcccgggggagggcggggcgggcgcccgggggcactgggtccccggaggaggtggcggcgccgcgggcgggttgggggctgggtcggccgaggcggacggccgcccccagcagccccgacgcctttcatttggcctctgcggcggctgaggcagcccgacctccagcgctaagcactgcgccaagcagggacgggcgggggagggcgcgccagacccgccgcagagccggacccccggcgccgcaccgccggcccgccctgccgcggaccccgctgcccgcccgcagtccgcgctcctccggcgggcgaaggagacgactctccggcgttcgcccggtccccacctcgatgtagccggccagcgccaaggcaggcgccgtgagccccaccagcagcagaagcaggagcctgcccgtggctgcggcggccgcggtcccggtggccgccatccctcgccgggtcgctctagcgcgcggctctcaagctcacacactcggactcctcgcttagcacaccgcgacccagaagcatctaaagccagttcgccgccgccccgggggttttacaccaaccggaactgacttcatattaccacgccctccttctgcggctcccaatgccggcccgcagaacccctcaagaccccgcccccttgcggtccagacccaatcaggagatggaagagcctgctcctcccgcccggtccaaccgcgcgccccccgcccggccccgcccccggccgcggatggccccgcccccgctccggaccctgtggccgccaggcgcgggggcgtgcgcgcggcgggtctggggccgcaaccctgtgggcgcggggctggctctggcctccgccccccggcgcggttatctgtccctgctgcgctggtccgtcagccttcagcctcccgatacgggcacgccccgctcccctgcccctgctgggcattcttcagactcctttgggtaccgccctctttttgattctggaaatggttttattaaaaacaggatgaattaggagtccgggacggtctgccaagggccgtcccccgaggcagggggaggaccgcaggaggcagccatcgtcctcccccgagccctactcagggcgcgcctctcccgccctgctccgcccaggcctctccgccgggtcctcgcctctgagtccggccgcgctccgcacccttggcctccggtctttaggcctcttgccgacccttccttcccagcagttgcccaggcagggatagagaccaggggtgcaagaaccacgccggcctcacagcccaggcccccttcctcgtgtgttttaggaagagatcacgccgcttcttcggttgagacgcactagcgggagacctgctactctgccttcctgctccgcggcattgccacttcagtagagaaaaacgtcctgctgccccatttagcaattggcacagcctcgccaccgccagggctccgctggccttgtttcctttcagtcgcctgtgagttaggtactgccttctgagagacctggactagtcccttcaggttcaactaaatgcataacacaaccctacccccaggacgctgacaatagaaaggaagagactgtccgcggagtagacgagtgcgcctgtaagaactcgggattttccagccttattctgcaccactctcccctacatgcccagttccctgtgggtaaactggctctgcccgattcctccaagacgacacctttccatttcacagcccttcctaacactcttctgcgcctgcaatgtcctctccccaacatctgcctgttggaagcgttttcactgttcctcggctcagtcggctgaaatatcgcttctgattgctcagagggatgtttcccactgtggcactcgctccctagttattccatacctctctcaggtcactgacaagacttgggtctgtcatgccgcagtgcccctcacagtgcagtcctcgataaatgtttgcccagtgttattgaacccagttatcttgggtgctgatactagttctggaactggcatgaatttggctcttgctatggaccgaattttgtccccacccctaatgtgtgtgccgaagcgctgaaccccagtgtgatggttatttgtaaatggggcctttgggaggtaatcggatttggatgaggtcatggaggtagcaggtcatgatgggatgagtgcctttattaggagagacaccaaagagcttgcttttctctcacactctctgtcccctacccccaacctcagccctcacctccctcctccatgtgcgaacacagcaagaaggccgccatctgcaaaccaggaagaggtccatcactgaggggccaaagtggcaccttgagcttggacttcccaggcttcaagaactgtgaaaaataaatccctgttgttgaagccccccagcctatgttattttgttgcagcagccggagctgactgacacagccgcatgatcaccggcaagttcctccatcgcttgggactctcttttcttctctgtcaaatgtgaatattaaaacctgtctcactgcaccgctttgtgtgattgaacttaaaatgaatgtacaatagtgaaaagcatgaagtgac

SEQ ID NO: 914308 - DNA, 4001 bp, Homo sapiens
gaaggcggaagttgcagtgagcccagagatcccaccattgcactccagcctgggacagagcgagactccgtatcaaaaaaaaaaaaaaaaaaaagacgatattcctatcagaagcacaccaaggtttctctccaaggtacaattacacatctcccataccacctgtcagaaacaccaacacaaagccttctctactctgcctcagttgacatcctttaatttgggtttgagtttccagaaaactggcaatcaaatggccttctttctttcaaatgtgacagaacaaactcaagttccggttctcaggagcctagtcatccactgcacagtatgcggggtttcagcacaatactgtctcagtcccaaatgggagcatgcacacaggagaacttgtctcggatttaagagaggaagtgaccctgagtccagaggtgagctttttctttttaaacaggtgtaagagattaattcagtcaacaccaagcaacactaaagatttgccaatcaataattctgtgccaagcaacttgatcagggatttggccagaatccctttcgctaatctcaatcagggccttcccaaagacatcctgatttaggccactctcatctaaattaagcttcgacagtcccttgcctgacagcaaataaacaaaatcaaattatattcatatgaataaaattctgatagcttgacaaaaggccccttgaaagatcatttagtaagtgtgagcaaaaatacagctccaaagaacaggagttaccataaaaccatttttcagaaatgtttaattcctactttcttcaaccatacttttcaactgaacaacgctgtggctaacaatcaaatttaacacacaacaatgaattctcatattattttttcccgctacacaagtattaacgaattctttaaaactgctgagtcttctactgtgaattcactaatgcctcaaattagtcatagcagtgggaagtggagtgcgagtgtgaacgatggtttctgacacccgacccactagtgaagtcccatcttccatacgaaagcctttattttttcttcccatctcactcacctagctgttttcatgcgacatatcagggatcacagatacaactctgaccattgtgtggacacactgaaacaatcgcaatccaaaatcctctgtagataaacgttaactatttctctttaaagctgaactcctttcttaccctcacagtcacaaagctttaaactggatgaatacaaaggtgttaagccgttccatcagagaggctttttattagatttatttttacccgtggaaatacttgaacattctgtagaagtaaatatattctaaacctgaggtctttaaaagaaagctctcaattaatgcccaatcaaatccagtcttcaggtctctctgaaattagctaagtatgcagaaaccagttgtaatttttaaaagagcgaagagggagaagaaataaacgacaccagaactacacattccagaccagcagttcaagcaccacttcgagaagggaagtaaagatcaagctcgccgtctccctcggccacagcagggctcctccaaggctgcccgctccggcccgcaccgcggaccccgccgcccccgccccctcccgcggcctccccaacccccggccctgccgcttcgcctttctcgcagcggggatgctcagggtgcgacctcgaagcacaaccactgatggaattctgacacccgaagaggacgatttttccaacagtttacacgccttcgcgggcaccttccctactcactgaaaccctcacgaaagcggtcaacgcacccagagcgggtttcctcggtctacggacgcaggcaaacagcgccacttaaaaaatgcgcgtccgcgacccggccccaggcggcagagggagcagcgggcggcctggcgcgggagctcccccggggctcgcagcatccctgccgcgcgcgaaggccggggccgcgtccacctggcaacaaaggcgaagcccgccgctcgcaggtgggaggcccggagccgaggccccggtgccgcgcgagggagcgtacggggtccgcgcggggccgcccctggagaaagcccagccgcggactccggcgggagaggagcgccctggcattgtcccgggggagggcggggcgggcgcccgggggcactgggtccccggaggaggtggcggcgccgcgggcgggttgggggctgggtcggccgaggcggacggccgcccccagcagccccgacgcctttcatttggcctctgcggcggctgaggcagcccgacctccagcgctaagcactgcgccaagcagggacgggcgggggagggcgcgccagacccgccgcagagccggacccccggcgccgcaccgccggcccgccctgccgcggaccccgctgcccgcccgcagtccgcgctcctccggcgggcgaaggagacgactctccggcgttcgcccggtccccacctcgatgtagccggccagcgccaaggcaggcgccgtgagccccaccagcagcagaagcaggagcctgcccgtggctgcggcggccgcggtcccggtggccgccatccctcgccgggtcgctctagcgcgcggctctcaagctcacacactcggactcctcgcttagcacaccgcgacccagaagcatctaaagccagttcgccgccgccccgggggttttacaccaaccggaactgacttcatattaccacgccctccttctgcggctcccaatgccggcccgcagaacccctcaagaccccgcccccttgcggtccagacccaatcaggagatggaagagcctgctcctcccgcccggtccaaccgcgcgccccccgcccggccccgcccccggccgcggatggccccgcccccgctccggaccctgtggccgccaggcgcgggggcgtgcgcgcggcgggtctggggccgcaaccctgtgggcgcggggctggctctggcctccgccccccggcgcggttatctgtccctgctgcgctggtccgtcagccttcagcctcccgatacgggcacgccccgctcccctgcccctgctgggcattcttcagactcctttgggtaccgccctctttttgattctggaaatggttttattaaaaacaggatgaattaggagtccgggacggtctgccaagggccgtcccccgaggcagggggaggaccgcaggaggcagccatcgtcctcccccgagccctactcagggcgcgcctctcccgccctgctccgcccaggcctctccgccgggtcctcgcctctgagtccggccgcgctccgcacccttggcctccggtctttaggcctcttgccgacccttccttcccagcagttgcccaggcagggatagagaccaggggtgcaagaaccacgccggcctcacagcccaggcccccttcctcgtgtgttttaggaagagatcacgccgcttcttcggttgagacgcactagcgggagacctgctactctgccttcctgctccgcggcattgccacttcagtagagaaaaacgtcctgctgccccatttagcaattggcacagcctcgccaccgccagggctccgctggccttgtttcctttcagtcgcctgtgagttaggtactgccttctgagagacctggactagtcccttcaggttcaactaaatgcataacacaaccctacccccaggacgctgacaatagaaaggaagagactgtccgcggagtagacgagtgcgcctgtaagaactcgggattttccagccttattctgcaccactctcccctacatgcccagttccctgtgggtaaactggctctgcccgattcctccaagacgacacctttccatttcacagcccttcctaacactcttctgcgcctgcaatgtcctctccccaacatctgcctgttggaagcgttttcactgttcctcggctcagtcggctgaaatatcgcttctgattgctcagaggga

SEQ ID NO: 914309 - DNA, 4001 bp, Homo sapiens
gacgtccagtctgggcacggagttgttgagatccggcaggaagtccctgctccagggccaaaggccccacccgggctcccccggatgtccccgcacccccctctattctcccaaaagaaagaagctgcttcccactttggaaacgtttattctgagcaccgggaaggggggcggcggcgggcgcctcactgggtgttgagcttcttagtgtactcctcgagagcgctcaggaagctgaccttgaagctctccagcacgggcagcaggccttggcggaggtcctcgagcgcgggcttggccttctcgctgagcgtgctcagatgctcggtggccttggcgtggtactcggccagtctggcgccgccgttctccttgagagcctcaaggcgcgcggccaagcgctggcgcagctcgtcgctgtagggggccagatgcgtgcgcagcgcgtccacatgggcgcgcgcgcggtcgcgcatctcctcgcccagtgggctcagcttctcttgcagctcgtgcagcttctggcgcgcgccctcttggagctctgcgcgcagcggctccaccttctggcggtagagctccatctcctcctgccacttcttctggaagtcgtccaggtagggctgcaccttggccttcacctcctccagatccttgctcatctcctgcctcaggccctctgtctccttttccaggttatcccagaactcctgggtcacagggccgagctgttcgcgcagcttgctgaaggtggaggtcacgctgtcccagttgtcaaggagctttaggctggagggtgagacagaagggttgagggctggcctcccagcgccccagcctatcaggggtgagccctgggtgacacctgtccgcggaggtgcagtggcctagcatttccagtacactctcaaccaacacccctgccccgccaggccatgccccgttgtgcagctggaccgaggcacagagaggagctaaaaaggagacagagctgggactagtgcccagttacgttggtctccaaagtgggcccttgaaggacctcgcttctatgcctccagcgcattctcctctccgaagacagcccacagtcttgctgggcaggagcagaggaggtggtgaagaagggaaaggggcttgctacacttgcaggcacaatgtggctctgtgatcacgcatcgggcagccctggtctgtcctttgcaggggacatgggctgtgaccctgcctggagatcccattccagtttctccatccagaccatctgtggggcccagctcatcagatattaggtgaggactcggccagtctggcttcaacatcatcccacaggcctctgccccctacccctgccctcaaccccaggctgggtccttactttagctgttttcccaaggcggagccttcaaactgggacacatagtctctgccgctgtctttgagcacatccacgtacacagtggccaggtccttcactcgatcccaggggctctgggggggttcatcttgctgccagaaatgccgagcctggctccctgagggtgggaggggagacccagatcaggccagctgtgggctgagatctgagccgaaaggccaagcttggaggtgggggagagggggccagtgagaaacctgctgcctctgcccaggagggtgggccacggggatttagggagaaagccccccgatggttggctccctaggttaggggacacctacccgtcaggaagagcacggccaaggtcagcaccgcagctttcatcctgaagggccgtgggggacctggaggagaagaagggcctggctgagtggggtgccttcagcatgcagaagccccgtgctcccccactcattgcagccaggtgaggagaagggcacagagcgggagaagacctcaggtacccagaggcccggcctggggcaaggcctgaaccttgagctggggagccagagtgaccggggcaggcagcaggacgcacctccttctcgcagtctctaagcagccagctcttgcagggcctatttatgtctgcagccagggtctgggctgggaggctgataagcccagccccggccctgttgctgctcactggtcctggcaatgtggaacttaagagttcaaggatcagctctgtccctggggctgggcaaatagagtgggcaaacagcaagctgcgggggctgcagggcaggggtcaagggttcagtgggggcgggaggggagtgtctgcaggcttgcaggtctcccgggtggggtcggggttccctgcactcatccccttcccctccatgggagtgtgtgggcagttgccattgtccattgtgttggcagaggaggggaggggagggacgctgggactcctccaccaaggagactgcctcccccaccaccagcattccagggagactacttcactcccctcccccttcccccgccctgtcctcccaccagtgctcttctttagtccccagcaggtcctccaggcctctctccaagcctcccaaactggtaaacctggggagaggggagagccctccgtggctcccagactgaggtttcggagacctcttgcatttcaaaacactccagagatcaattcggagctgccaacttttaattttgtcatgtaaagatattgtccgcctccaaaaaaccctcaccatctacagtgaccatcacttcaaaaaggaaaggctttaacaaaaaagggcataatctcagaattacattacagaattgaagccccttagattgaagacgtctccctttgcattgttcacacttatatttgatcacgcacaggtgtgactggatctcagcccttgggaagccctggtgtggggagaagacctctgggcaaaggaagtggcaggagacctgctttctcatttcacttggcctccatcttgctggaggaagatcgtgggcaagttatataatctctctgagcctcggttttctatctgcaaaatggggcaagaatggtcagggttgttggaggcccctgagacagcctgtgaatgtaaagtgctgtgtgtccgttggtgtttgcagcaccatcttgtcaggtttctcctggaaggcccagacctcccccagcaggttactgataggacctgagtcctagagcctgtgatgcaggctgagaggaactgtgacatcactccagcctctccccatgccaccatctcacagatgaagagactgaagagcacagagggactttgcccagaggctgtcatctctcagggagttagaagaaaggctggacctagaacccagtctctggacttgggatgcagggcagaaatgtaccctgtaccatcactccaggaaactccctaacactagaaaccaggctgacatctctgtttaccagatcagggagtggtcggcctcatgcctttcacttcagagaagattctggagccagaaaacctcaaatctaagggtcaggcaggttcaaatccagctgcctgaccctggatgagttatgatacatcacctccccacacatcagtttctgattgaagataatgatagaatatgccatcgccctgagttatggcaggggttactgtgtggcaagcagaataacgctccccaaagatgtccacagcctcatccctggaacctgtggctttgctaccttccatggcaaaaaaagattttgctagtgtgattaaggacctggagatggggtggttggcctggattctccaggtgggcccattgtcatcacaggggtccttaattatacaagagggaggcagtggcctcagagtcagagaaagagatgtgaggatggcagtggagatcagactcgtgactgctggaagggggccatgagctgagggacatgagcaacccttccctagaagctggagaaggcaaaggatttttccctgcagcctccaggagcacagctctgctgccaccatgattttagcccagtatgacccattttggacttctgtcctccataactgtaagataa

SEQ ID NO: 914310 - DNA, 4001 bp, Homo sapiens
ggccttgagctcctcggcgttcttcttcatctggaaggtcaggccctcaagctggtggttgagcttctcctgcgtgtcctgagcatagggagccaggctgcggcgcagctcctccacggtctggtcaatcttgactttgaattcgtcagcgtagggcgtaaggcgtcccttgagctcctccacgttctggtcgatcttggccttgagctcgtcggcgtggggcctcagcgaggcctgcaggctgtcggcgttctcccgcagcactctctccatgcgctgtgcgtagggggtcagctggcgccgcagctgctcggcctgcgtgctgacctgggtgcgcagctggtccgcgtagggctccaggcgctgctgaagctctcgcaggttgtccccgatcttctggctcacctcattggcatggggcagcagccgggccctcagctcctccagctccttcccaatctcctccttcagtttctccgagtccttggccaggcgttcatgcagctcggtggcaaagggcaccagcttcttctgcaggtcacctgcgtaagtgttcacttctccaagtttgtcctggaagagggcactgtggggaagggcacaaggaggccacgttacatttggcatttacacggcaagactttgtctgcttgtataccactcgccttatgcacacgtgctaggacaggtgagtgctcagaggtaccgagttcaccctccctatggtggtgcagattggagaggatgggtgtcacagactaagttacgatgctgaatttctatctcaggatctcccacatagtttgtctcagaatctacccaccatgtcacctccagcagtttgctttcccctccttgtctgcagagggtgggactttgaggtccttcccagagggagtgttctgggccataggatcacattgtgtaacacaatgttgtcttcttgacctctgctggggtcttccagtggcacaaggtgctgctttccttgcctgtgcccaggggcctcccaaatattcccacctccctccccttgattccactggggcctgtctttctgaaacgtattagaaatcagctcacgtgacattttcctccctccctctcttccatgagcctgaatgataggatgtggccatttgtcaaactctagaacgtcaaagcaaaaggacatggcagggattattcggtccaaacttccggtttacatatgtggatcctaggttcagaggcccggccagttagtggcagggcagtgggtatcctaagctcagggctcctgtctctaagctcaacccttgccagtacattgcatggcctttaagaattccccgtcaccaccgcacactgtagtccctcttacttgagttgctgggtgagttcagatttctggagatgttccacggcctccttggcattgttgctcagctggctgaagtagtcccacatcaccgtggccacctggtcagcactgacctcagccctggctcctgggtggtaacagagagcaattcatgaggccccgtctcctgtgtggcccctctgctccagctctgagctgcagactggatgatggtgggggtgcctcaacctgccattttccctgtctgagcttagctttttggaagccacagggatatgtgaaactggtatagcaccaatgccaatgggcccaccactgggactgggccagctctcctgtgagccacttggcagccaggcagacctcatgtccagctgggggctgatgggcactcagaagtgtccttttgctttggctcagcctccatcctgcactactcagagcagcagcccaggagtgccatccaaagacagcttctactcaccggcgacagccaccagggccagggtcaggaccacggccttcaggaacatcctgagctgcttgctgggctggaggagtttcttgccacactggatcctccctacaatcaggggagctgacagagaggtcctcaggagagctcacctgcgctgcagtgggaactgactgaagctcagagccagccagacatttaaactctctccctatcgccacccccctggctgccctcccctcctccttcctcagtgtgactccacgctggaaggtgacacattcccaagaggcctcttggacttttgtgaccctgagactacgtggaagctgacagcagatcagggctcaggcgatagttagaagtggtggctgttccgtgcgtgggcacccccacccccaccccaccaacctcagcatggaagggaggaggggaacggaaaacagtaggagaaacacctcagggagcccatgagcccgggactgatgcctcgaggccctgctggcggctctgggtttgtgccgggctcatggggggcaaagtccacatctcctctgtctaccccagtgaagacaggtccccccagtctccacatccgccactaatgctgactccatctcagagcaccagacactggagtgggaccatccaggactgcagacagcatagtgagctaaaatctaggtctcttgtcaaggtacacccaagaggagggggccctggagagcctttgggcagatgggtgtgggagacagggccttgtcctgaaagggttaattgtagagtgcttcatgtcccactcccatgctgtgcctccttggtctagttattcaaagccctgagcttcagtttctcctctgaacaatgggatggttcagtacattaaagaagacattgcttgcgaagtgggtagtacggtcatctctcagtctccatgggaaattgattccaggaccctctgcagataccaaaatccatggatgttcaagtccttgatataaaatggcatagtatttgcatataacctaagcacagcctcccacatactttaaatctctagattacttataatacctaatacgacggaaatgctgtgtgaatggttgttatactgtattgtttaggaggtaatcaccaaaaaagtctgtatatgtttagtacaggtgcaattttttttttttttgagatggagtcttactctgtcacccaggctggagtgcagtggcacgatcttagctcactgcaatctctgccccccaggttcaagtgattctcctgcctcagcctcctgagtagctgggattacaggcacccaccaccacgcccagctaatttgtgtatttacagcagagacggggtttcaccatgttgctcaggctggtctccaactcctggcctcaagcaatcctcccatgtgggcctcccaaagtgctgggcttataggcgtgagccactgcgccctgcccagatgcaatttttttaaaacattgtttttaatggagatggggtgtcgctatgttgctcaggctggtctccaactcctggccttaagtgatcctccaatctctgcctcctaaaatgctgggcttacaggcatgagccactgcacccggcccacagatgcaatttaaaaaaaaaaatatatatatatatatatatatatttttttttttttttttttttttgagatggagtcttgctctgtcacccaggctggagtgcagtggcacgatctcggctcactgcaagctctgcctcccgggttcacgccattctcctgcctcagcctcccaagtagctgggaccataggcgcccgccaccacgcccggctaatttttttttttttttttgtatttttagtagagatggggtttcgccgtgttagccaggatggtctcgatctcctgacctcgtgatccgcccgcctcaacctcccaaagtgctgagattacaggcgtgagccaccacgcccggcctaaaaaattattttcaatccaaggttggttgaatccatggacacagaaaccaaggatacagagggctgcctatagagctcctggcacagagtaagctctgaaaaatagttgctgttattataataatcatactgtataataatcatactgtgttcctgatttggagcaaagcagggagggtagcag

SEQ ID NO: 914311 - DNA, 4001 bp, Homo sapiens
ccccttcctcagtcccagtgcctgcaaaggctctgctgagctcttcgcgcagctggtccaggttctgctggatgcgtgcgtgcagggccttggccttgagcgtgagcttccgggagagcacctgcacgcagcgactgaggcgcgcggggctggcgggggcgtgcggagccacactgcggtgcagctcctgcacgtggcgcccgatgccgctcaccaggctctcggcgtatgggtggaagagctctttgaagcggccggtgtggtgcaccacgcggctctgcagtccctgcagcaaagcccaagcctcgtccacgccccccagcaactgggccttggtgtcttcccccaccacgcgcaactgctcctgcagctcctgcacgcgcagggccacctgctccatcagatccatcgtgtagggcttcagttgctgccgcaagccctccaaattccagcccaccagctcgtgcgcctctgccatgtagggctggaggcgagccttcacctcctccaactcctcctgcagctgccgccgcatgcccaccgggtcctgtgggagccgaggagcctcgctcccactcagaggcctcagcttttccaggaacttgttcatattgttgaggtcttgctcaaggctgtctttcagggtcctggagaaggggacagatatccaggccgtcagactgctagcctccatcatctcctttgtccccaagtcatcgcgcactgatcctctgggggaaccaaggacgcagggcgttggccccagggtcgagggctcttgtcctagccctggccagtaacaactcacgcacgaagcacaaacacattgcccatacaaatccagacctacaacactctccaaagaaacatagatgcgccacatcatcctttgattctggggactgcagcgggcgtcctcccgattgatcccaggtcccgcgcctcagtgagcaagggggcaacagctacggagttgtcaaggcgggggctgcaggcagagggcgctaaagagcccaggatggccgggatctgcagacagagctagcaccgctcctttcctctgtcccagcagcggccacagaggttgaggcagcagaggcaggtcatcatggcatggcccagctgtctcctcccttcgcctacaccccttcccctgggcactcacgcgggctcgcgagccatcttctgctgatggatctgctccaccctgcctttgtccccgctggtctggctgaagtagtcccagaagcctttccgtgcctgggtggccgaaaacgctgtggagagggactaggtaatcagggcctgggctctcctcccccagggtggacagggccctctggccagcctccacccacacccccacgttgaagtcagggtcggagacccacctgaaagaagagccagagcccaggtgagcacggcagccatgcttgccattacctgctctgagaagacaggtggagggaggcctggttaggggaagaaggagacgaagggacatggcgcaggggacttgcccagggggcctctgcaggggcaactgcccgaaatcctgttaccccttccttgggctggggagcacagagctgttggggctcaagaggactgacctaggtgagtcaaggaggctagggtgtcttcctcagacatgggaagagggcgtgctcttgctacctcagtcacatagcagggagcgtggtgctctaaccccttcgcaaaggtcccagaccccaggaacagttctctaggccacttctaccacctctcccctgcccacctgtctccctccctcccatttcatggtggaaaaactgagccataatgagggcgaagaggcaactctgccaaaatgttccaagaggacgtcttaggggccaccccaggctctcccctgaggccacctgcaatgccctcccttaggactgtgacccccatccctctgccccagctgctcacctgctcacgtctgggcacagagagcagacattctgctttatactccagggccctgagcctctggcaccaattgctctgagtaaataccacgtggaagttcaaaagaagttgacctcagctgcctcccagcactcacctcctgccctttccctggcacccagagggttaatgagtgccctggtatcaggggctgccccagtagagaagtgcttcccaggagctttacgggggatggggctgaactcctcacccagtttctcccaaaccccatgacctttaaccttcccactgacctgctggctggcccaccaacagagaagaacctgtttgtctgccaagggcccctctcttacacaactacccagagtcactgtgtcccagccggcaagatggacagtgttcacctaccagccagaacccgagcagcccctgaaagcttcactacaggttccgcaggcatcctcagccagcattcatagggttaaagaccaaccacatccctctttatgaaacaatcctggaacaagcaagggaagccaggcagggtgaagatgagatggcaagaggcatctgggccagggactctgagccccaggaactggagcgaaagtgagatttgccccatgaggaaaagctgaactccactcgcagggcctctgaggagagcaagcccaaatgctcagatcttctctgatgacacacccactccgtctacagtactcatacacacgttcacaagctcccgattcttggtcctaaatgcatcttgaatcaatcccctctcctccatttccactaccatcattgcaccagttgtctgtcaccttgattgcattcatagcctccaacaggtctttctaccacactcctgcccatttaattcatcctccactgtggctcatcctgactcatttccagtctcatctgctgccacataaaaccacggcattccctgagcctttatacaggcttccctctgcttgaaatagcctatcccctggtgaatatatattcattttttagagttagtttgtattagttagaattagacttggctgcaagggacatatatatgtgtgtatatatatacacacacacatgtatattttatattcttgcatacatatatgtatatatatgtgtgtgtgtatatatacacatatatatatacaagatactgctcttaccactcatactgacatcccattggccacaagttagtcacatggctacacttagctgatatatatgtgtatatatatatgcaagagaatagcttaaacaaaatggagtcttatttccttctcatgtaaatgtaggccagctcgggctgcttttatcttgttgcactattatcatcaacaagacgctcatatccaagttccagctgcttcacctccagctaccaagttcacctcccagggaacaggaaggaggaaaaggagaaggacatgttccttccttttaaagacacatcccagatattgccattaccacttgtactgacatcccattggccacaacttagtcacatggctacacttagctgaaaaggaggctgggaaatatagtttttattttggatggctgtatgcctagctgaaaaaggactctattactcaggaagaagagaagaaaggatttgagggaacagtagtagcccctgctacacagctccagtatcactctgaatgccttcttcggccttcacctttttctgctctggagataaactgattccacattattcacacaacactgtatattcctggattatagcacttactatctaactgcacaataatttgttgatgaatccgagagctctttgagtgcaggggctttttcttattcatctctatatccactagtatgttttgcacagtgcctacctactacatacaaagttaagtgactgaattcaatcattcatttgatttaggaactgaggtttgaggagatcaagtggcctgtccatcatcacgcagtaagagttgcaaccagaatcagaacccaggtgcttggctctggtggttcaagag

SEQ ID NO: 914312 - DNA, 4001 bp, Homo sapiens
ctgtcagatcaagtggccttacattctcataggagtgtgaaccctattgtgaactgcacatgccagggatctaggtggagggctccttatgagaatctaatgcctgatgatctgaggtggaacagcttcatcccaaaaccatccccgctggcccatggaaaaattgtccaccacaaaactggtccctggtgccaaaaaggctgaggaccactgctctagccagaccttcagaaaaggaaaatggggccaggcgcagtggctcatgcctgtaatcccagcactttgggaggccgaggcaggaggatcccctgaggtcaggaattcaagaccaacctggccaacatggtgaaaccccatctctgctaaaaatacaaaaattagctgggtgtggtggcgcgtgcctgtaatcccagctacttgggaggctgaggcaggagaatgggttgaacccgggagacggaggttgcagtgagccgagatggcaccactgcactccagcctaggtgacagagggagactccattaaaaaaaaaagaagaagaaagaaagagagaaaggaagagagggaaagaaagaaaaaggaaagaaagaaagaaagagaaagaaaggaaagaaagaaagaaaggaaagaaagaaaggaaagaaagaaaggaaagaaagaaagaaagaaagaaagaaagaaagaaagaaagaaagaaagaaagaaagaaagaaagaaatagaaagagaaagaaagggaaaggaaaggaaaatggaaatgagggctaaaacggcacgccctaggactgctccggggagaaaggagggacctgggaggaatgcagtctcaactctgtcatctctcccgcagcagcctgacaaaggccctgtgaggaaagaggaggctgaagaggcacaggcccaggggaggctggagcacctccattccattgttgggatctcaccagggcaggggcgggtgggaatggaggcagctggcaggggggatggggagggaggccagcgggtgtacctggcctgctgggccacctgggactcctgcacgctgctcagtgcatccttggcggtcttggtggcgtgcttcatgtaaccctgcatgaagctgagaagggaggcatcctcggcctctgaagctcctgaggaaagagcagggctgagtggggtggatcggcctctggacgagccctgggctcctgcttgaccacccattgggactgggatccccaagttgcctccaccctgcccccagcccagtcccaccaagtgcttacgggcagaggccaggagcgccaggagggcaacaacaaggagtacccggggctgcatggcacctctgttcctgcaaggaagtgtcctgtgaggggcaccccaggtccccatgcctctggacccctccctggggaggtggcgtggcccctaaggtagaaccttagctgggtctgccagaaggagtaggggccggctccctgctaatacgggctctcagaagggggactggtgaggggcgagggatcgaggcccaaagggaggtgggtgggatggagcagaaaacccaccagactgaacatcaaggcacctgcggtctggactgatctccgtccagtccagccaacatgctgtgtgtctttgggtgatttctggccctctccaggcctcagtttccctgtctggggtaggactgggctgtctaaggcttcctccagccctaagcctgaagaatgaggggggaacctgcacttggagccacttccagccccaccccctgtgtagctttgggcaagtgacacccctcccgggcctccatgttcttcaggttatgatgaggggtggggggcacccgtccagctccgaggcttccttagctctagcaagtgcttctccaggcttgctggctgggctgggcagggagctcctcttgcccctcttcatcctcctcccctcctctttcccctccccagagggcattacctggagcagctgcctctagggatgaactgagcagacaggcaggagggttctgacctgttttatatcatctccagggcagcaggcactgaggacccagggcgctgggcaaaggtcacctgctgaccagtggagatgagggcctgaggcagggtgtccagatgcagcaagcgggcgggagagttgggaaatccctaggagactgagtccacgctgctgtcccgccagccctgcagcccagatgagctcaggaactgggggtgggcctggggagccctcattccttcctagctgactggctccccagggagaggctggtgagaggggaaatggcttggacataggccaggggcctcgggcccatctcagcctttcacactggaatttcaggcccctccctccaccagccccaagccctgaacacagcctggagtagaggggtgaggggcttcttcagacttgagaacaagtgggtggcttgggctggggggtgtttggagtaaaggcacagaagaccaggcatcagtggctccggcaaggcctggttacagggctgagctctcacagcccctcccagcacctccatctctgggtttcaatccaggcaggcgagtgctgctcacccagcagccccccacccgcccccaccctgtgtgccccccgctgcctcccccttagtgtagggcaggggttggtggagaagggccaaggccgctcagagcccgaggcctttgcccctccctccaccaggctccctattttgccctctggacccactgataacatcccctgggggaggagctggtctcatgtctggggccctccccagcccccaccaggactgattctctcgttcaccttcctgggttcctcagtggggctgggggaagagcagccctcactgccccctggctgtgggagcaactgggaggaacaaggtctggtgaggagagggcacagaggagttctgcggggagtcggtggtccaggaggggccgctgacccttctcggggctgagatgtcccctgggcccacagtgaagccgcagcagggatggcaggatgagggcgcctgtcttccagatgctgacaccttggagccaggacatcttaggcttaaatgatgcctttggcacgtaataggacccaggtcacagagataacatctcagagcctcaattttctgaggataaaatggggctggaatactgattgcccagagtggtgctgaaaaggaaatgagatagagaagtacaaagcagcgggtccatggagggactcacacctccctctccctcctaacgctgtgcccttcccagacagcagagtctgcaggcagaaggagcctctaacataaaaaatagagctctggcagcaagctgtcctctcagaagtaactaacaccacagtatgaaatcagaggcctgagaaagtggcccggctctgccctcagaattctttatcggtgggtgagacttggaattcctctattagcgatccattcctggctgggcacagtggctcatgcctgtaatcccagcactttgggaggctgggacggacggatatctgaggccaggagttcgagaccagcctgggcaacatggcgaaacccagtctctactaaaaatacaaaaaattagccgagcatggtgatgcacgcctgtagtcccagctactcaggaggctgaggcacgagaattgcttgaaccccggaggtggaggttgcagtgagcagagatcgcaccattgcactccagtgacagagctagacttggtctaaaaaagagagagagagagagagagagagattcattcctttgacttaagactttgttttctgttaaaatgcaaatagaaccctgtgaagtagacgttaagtccattttataggttagaaacctaaggctctaagggctccaagtgcacagcccattagtagtaaggctgggaaccttaatccaggtcttcacacaccccaggcaaataccagacggcttagagcactgagacccctatagaggcatcagtcacac

SEQ ID NO: 914313 - DNA, 4001 bp, Homo sapiens
ggtctcccaaagtgctgggattacaggcgtgagccaccgcgcccggctgaaggctttcatttttaccctagaaggtcaagtacgtgtttaggagtccttatcttgaagtttgcttctagtcattgtttcacttttaatgggcagaagattattaccacaaatttcctttgttgttatttctgcctccacagtcttttataatttagatgtagtcccaataaagatattctgttgtaatcatttaaaatgacacatttcatcattaaatacttgtgttttggatttcctcctcccacttaggactagattgcccactgcatctgagatctgtcaaagtaaacaaatggtttaaaagaaatcaacagatttctcaagagttatattttaaaaagcatctttaatttgaagcaagttatcatttaaacatttttcttaataggtcacttaaaagttcatgtataactcaaaatgaattattaaggaaataagaaatttcataactcaaaatgaattattaaggaaataagaaatgactttaaatcatttataggactaaaatggaactacaaaatttctaccctccgctcttatactaaccaatcatgtgccttgtgctttaaatcgaaaggaactttgtaaagccaggatcatttttcagtaagagtatccgaaacgatctataccaccttggcatgaagaaagaggcagttaataagttatctttcctttctaccattaaaacaatccctttgtaggatatctgaacccttggcaatatctcacagtatctcagtttcagcacagaggtggctcctttctctgggtgttcaaagcagcactgcatgaaggctctacgtgtcggccctactggttaagaacgggctgcaaaatggttagaataacggggataccagcatttacatcatagcgggatagacggtttcaaatgtattttagtaaagaacttacagcctcatgtcatagaggctctggaagtgccaagtatttggtgagaatgacaaacctgcatagaccaaaaaggtgatgagtgcagccagcaggtggatacgaagcttggttcggacttcctggaagtgcagcagagcgctgtggaagagaaaggagcagacggcctctgtgatgaccgctttgagcaagtcgactcggatgggattcttgcaagcgaagctcctctcgctgacgtgatactgggtcagacccaagctccacaaggcgcttgtgcagtacctgctgcacagggcactaaccagctgagccaatagcctcaccgcacccgtctcgggggacatgccccccagcatcatctgcatcatcacgccgcacgggttgctggacgtgcccaccagagtcaggccatgcacaagcgagaagaagtagacgagcgtcagcgtccaggtggggtgcgcggggtgctgttcgctcagcagttgcagctcgtgggtgcagcagcagagctggaaggtggctagaaactccaggacgaaggcgtgggccaccggcctgtgcagctgctgccgggcgactacgcgggccagccccatgagcagcaccaccgacagcatcagtcccagcgaggtgcaggtgtcctgcagctcggaccggagccccagcagcggcgacatggctccgtcgccgcctgagcgggttgcgggctccggctctgggtaggaggcggtctccaggcccgagtccgaagtccgcagcccctcccctcctcacgcccctcggggcgggacgagcgggaggctcccgagcggcacacttaagaagtcctccccgcctccccggcttggcgctggggtgttggaaccagagccgaggaggcggggaggcggggaggcggggaggcgcggggaggcgcggggaggcgaagggaggtagcctagggcgccggccgcagggccaacggtcagccgagcccaccgcgcactcaccctccgcagtctccctcagggccttgtaggcgggcgcggcggcggagggccggcgcggcgcggtcgacgcagcgctcttggtgcccactgcgcacgcgtgctgcggcccttgcgcccctgcgggcggtgacacccggaccacggggcggagaggagcggcacggcgcggcggagctctgatggttgctttgcagcgaggaccttagagtttttctttccccgctccacactgtaaaaccgtggagctggaaagaccgctgaaggccatctcacatagccacctcgtttttatcaatgggcgactgaaattgagaggggagacgcggcgcagggggcgggtgagttagtgggcgtagaccggtgcgcagggcctcctggagccttgcttttcttcacctgccaaaaaacatttctaaaaatggtggtaatatatgccagataaaattcgccactttaatcaatttaagtgtatatttcagtggcatcgattaccctcacagtgttgttcaacagtcacctcttttttccagaacttgagcggtgattcttcaaagtgtagcctagttttagcatgtgactgtctataacctttggcatgaactctttacgtataatatgaaacagttgtgtcttactgttacatgcactcttcgtgaagaggaaacaacaggtaactggagaggtctgtttccaagaactgggggtcctggcgcacctcttccatctgctttgaaagcaggaatacggctgcgtgaggtggagcgcgtccggagtcccagcacggagaggcttaggtgggaagaccgcttgaccccaggagttccaggctgcagtgagctgagatcgcgccactgcacccctgcctgggccacagagcgagacgctgtttttagaaacaaaaacaacaacaaaaaccgggcgcggctgggcgcggtggctcacgcctataatcccagcactttgggaggccgaggcgggcggatcaccggaggtcgggagttcgagactagcctgaccaacatgagaaacccccgtctctactaaaaatacaaaattagccgggcatggtggcgcatgcctgtcatcccagctactcgggaggatgatgcaggagaatcgcttgaacccgggaggcagaggttgtggtgagcctagatcgcgccattgtactccagcctgggcaacaagagcgaaactccgtctcaaaaacaacaacaacaacaacaacaacaacaacaaaccagtcaaacaaacaaaaaacaaaacatgaaagccacttagtacagttcccaatacgtagaaaatattcactaagtggtagcttacagtggaaacagcaggtttcagcagccagagtgcacggctcttgccaccgcattccagtcccaacagcttgtcccctggggtggcccattgtaggtgcagcactttgggagtccgaggcaggcggataacgaggtcaggagttcaagaccagcctggccaacatagtgaaaccccgtctctactagaaatacaaaaattagctgggcatggtggtgcgcacatgtagtcccagctactcgggaggctgaggcaagagaatcccttgaacccgggaggtggaggttgcagtgagccaagacagtgccactgcactccagtttgagcaacagagtgagacttcgtctaaaaaaaaaaaaaattctttcacaagacacaaactagtagaaaatcaagaccttttctctttcctgtgttgattgcctggccagaaagaatttaaattagaattatttattattattatttttttaagacagagtctcgctctgtctcccagactggagtgtaatggcgtgatctcagctcactgcaacttctgctcccgggttcacgccattctcctgcctcagcctcccgagtagctgggactacaggcgcctgccaccacacctggctttttttttttttttttttttttttttttttttttttttgtattttttagcagagatggcgtttcactgtgttagccaggatgatcttgatctcctgaccttgtga

SEQ ID NO: 914314 - DNA, 4001 bp, Homo sapiens
gtgggaaggagagagggctccggaaaatggaagggactccccacctccagccgatgccctaggcctggtccaccactagcccccgatactctcagacacccccccaacccctctaaactgaccccttcccctgggttctctctttctttcattcaaactctcaatgctggagacaggacttagcagataggcctattgccccagcatcttagcagataggcctgactattgccccagcaccgtctctctttggggcatgaggccagggctgatcactccatcctgcagatggggaaatggaggctctgaggaatttggggacttgtagagtcacatagtgattggtggctgcacaaggactcggggccccaggtcccatgatccccatggctctgcaggccccatccccacagagctccaaggagacccttcctaagctgtgccattacacaagactgaaggctgggcaggaaggaggggcaacagcagcccatctctgaaacctgaagtcccaaaggacctggggatttgaatggggaggaagcttctagagggttgggaggaggattaacaatctgtacaaaaagctgaggctggatgtgtgaagcatggctggagcccaggtggtgggggtataaagctggggttgagtaggaggcttgaatgcaaaacaaaacctgggggccatcagggctctggtggcctctgccccctccacctcatcagtcaccggtactctgcctgggacacccccttcctaaactactccaatatgcaagtagccaatggggaggcaaggtccccaggcccagtcctgacaatccccagccaggaatgggacacaggatgagttctctctacacctctgccagccacacccacctttctgccattcctcagacacaccatccaaattcctgactttgcacaagctacgccctcgcctttggagggtccttatccttgtaaattgccacttaactgccaagcccattccagtcatcccctcccctggggcctgcacctgtccacacctgtcttcaaggctctgctgggctccttctaccctgtgatgatcttgctgggcagtctctcccagcctggcctctggggactctccgcgaacaggtatcatgagtgcctcagtctgggaccctgggacccaccaaagagtcaaatccttccgagtacccccaggtatctggccctgaagcacccccctcccacctatctgggatcagggaaggctccccaggatatgggatgtgggggaagggacggtatatagcagaaaccacagcgtgatggcttctggccagattccccccctccccgccggccctgcaccaaacacccatcccctgcccccaggctgcaccctaagcctgctctctccaggcccaaccaccccactcccagcgtgaccccattccctgagcacatactttctttcaccagcaactgggccaggtaggggctctggggaagccatgccccatttactggtggggaattgagatgcagagaccggaagtagcctgcccaaggtcactggagccccaggcccagggcatagggtcgtacagatctccagaaatgtaaaggtctcagcggccaacgaggtgggagccttcacttcacagatgggaaccccaaggcgcccgagggcggctgactccagagacccttcacgccaaagggctacgggctggaagccccgggtcccgctggttcaccccccttccctaccgtctctggcccgctggcttatcctcaagaggcgacccccccatcacgcccaaaaaggtaaacagacaagatgacccggggaagcagaagcagcgcgcggcctcggcgttcctttctgcagaatggggaaactgcaggccaatgtggcgaggggcctgcagacggggaggctccggcagccgcactgacctgttttgagtaaagactccacgcggggaccaggcgtaccggcgccgccaccgacttacaccgccaccgccaaattgcagcaaggggccgggcgcgcccacccccccgggcgcttccgcccgccccacgtgactcccggggaggggaaggtggggctggggcagggcagggcagggccccgccccctcatcggcccctccccccgcctagtcacggtcctggagttggttggcctggcccgcccgccggacccgtcggtctgtgtctctctcctgcccctctagctgcttgcgggtcttccgactgtctcctgaggctcaggtctaacccccgccacctcgcccgctgagtccacctctccctgagtctccctgctctcgccacccctcttctggtgagtctgccctgacatacaccccacccacaagagggccacacccccagggggataggaggcagttgaaggccgtcagtggtgcctgaccacctcctctaggaaatccttcctccaccacattcttcaagggtatctcacttccctccctgggtgcccacaggcagggttgtggggaagctacccacccagccacacctcccaaggatccctcagcggaaggctgcagcctgaggttccagcacccacacctagagaacaggagattcccacccatcctcccagcacatacacagatgagggtaccaagcttggcagacatttctgggtcctgtgtccagaacacctccggggccagccacgccagagaccttccctgggcttcaatttctttatatgcacaaagggtatatttggaagaacagatctcacattgcgggggatgagggtttaccccctgagaagaggaaagtgtcattaattggagcacctactgcatgctagtcccagtgctgggcaatttattccttttatctcaatccttacattctgcttgatggcaaaaattatcatcccaggttatgggttaggaaataaggctccaagaagtctgagggcttgcccaaagttacaaagccagtgttgggcaaagctgggaagcaacccatttttatgagttctagaatctcctgcctgccccccactggccattcaccctgtccctctgggaaagagttgactgagtagaccgtgtcttctggtggtagggctaaggcaaaggagctttccgggaggggagaacagggccagaccttgcggagaacttccgggccccaagttcatatggggtcaaaaacactgcagaggagcagagcataggcccctcctctggtcctggcagcaggggtgtcccttgggcagcagagggcacctgggggccacagatcacaggggaggcccaggcgtccctctagacttcagaccagcgaggtgcagcacagggtgagaaggctggcatctgaccactggcaaggggatagggggtctggggaccctaccatttctgttaacacagtcctgaggtcttcaaaatgacctagggagggcgtgaatcaccaagcctggtccccaccaactgcactggaatctgaggcccctcacctgcacccttgacctccctccagggtatgctgccccagcctcagctctgagacccacagccctgtggcttgagacccacggacccctccacctcccttctgggatgacaggagtgtcagaccccagtccataggttggacccaaagggccttgggccgaaggacacagagtagaacctcaccctctgactcctgacccagggtctctgtcaaggcctgctccttcccttagagcagaggtccccaacccctgggccacagactggtactggtcctgtcaggaacctgttaggaaccaggctgcacagcaggaagtgagcagaggctgagctagcattaccgcctcctgtcagatctgcagcagcattggattctcataggagggagaaccctattgtgaactgcgcatgcgagggatctaggttgtgcgctccttatcaaaatctaatgataaatgtgatgcacttgaatcatcccaaaaccaatccttccccaatcctgatccatgg

SEQ ID NO: 914315 - DNA, 4001 bp, Homo sapiens
ctccagcactctcctggttctgctctgttcacttctgcctagcccccagcatagacagcccttcctagggtctcacttgctagaatgggatgtccacggtctgcttctctcaacttctgcacaagccgggagcccctagggccagtcctctccatgccgccagcagttcccagcacagaaggggctttagtaagtgggtactgaatgaccaccaccctactcgcatcctcatcactggagaaggtctgcagctccccaaactctccatacagcagtgcccagttaacctggagcccatcctcacaaccgcgccttcacccagctctcagcacttctccctgggacaacagctaccacttgctaagcgctcactatgtgccaaacattctgctaggggctttttttcatataatgacctgggattattaactccattgtgctcagggcatgcctcctcctccaggaagtccatcaaaccgctccctccctcctctaagcccacacaacctgtttgaccttccaccaccagacctacactcagctttcccacaggccagccctgctgtctgggcaggaggtggcagaggcccctttcccatggcagctctaagcgcttcccaggcctggccctgtgctggctcctgagggcagcagcaggaggaagttcatcctcagggagctcacagaagtactgagctcttcctgggtccagcccaggcctggcctggcctggcagaaagagcaggtgcagttatccgctgggccctatggaaaagatgagccaagggcacagggcagggctgaagagtgccgggtgggtggacaggacttggttagaggtctatgtccccaataagccaagcacaggattgttgaattcattagggatccacggtaactcaggaaaggggagaccagcccccacactccataagcacccaccacagcaccagtcctggggaggaggggtaagcagcacaccatctccccatcaccctggtctgggggtgagaggttcagaatcacagcacccttgaacttgacagtgaaataagccaaactaagcctccccaacgaatccccagaggggtgtagggaggtgggagcagagaagtaaggtgatcagcaccaggcccccaaggggcaagaaccccaaagaggagtattctgtggggcagagtctgagaaaggcccagaaaacaggcaccgtgggctcctggtggacccaggagaggcgtatggggaggtggagacctagaaagcccagggaagagggagggatgagacaaggggagaaaaggaaaaggcaggggaaaaagagaagaagtggggaaagtgaaataagacaaaactctaagagaaaaaaagagaagggggaggagagcagcacagaaaaccaggccagaggtgacagacagggacttcagccctcccagggcctccctcctacgtgcccaacagcaacaacagcaacggcggcacctcgcttaccctcagacgcctgctgggtcttggggctgaggactcccacagctccggccaggcgggctgcgtatgcccaagaatgtcgtgtacctgcccgtgcaagcctgggtcccgcctgggctggtctcgcaaacagcctggcccctggcccctgggtgggtctgaggctgcgttctcttggaggtttttgagcccaggtatggctttgcacctgtgatttatgtctttaagtgtttgtgaatcacttctctacgtgcgtgtgtgtttgtttctgtgtataactgtggatctgtccaggaggaaaggacagagagagagagagagagagaaagacagagggagagagagagagagtgtgtgtgagtgtgtgtgactctgtgtgtctgtgtgtatgtgtgtgtgtatgtctgcacccagctctggtctcccggaggcttcctgctttgtgtctcccccacctcctgcagccgtggccaacacacacacttcctgaaaacactgagaaagcgaaaagtcacccagaatcccccggggcagacacttcctccccgcccccaggctgcacccccacccaagctgggaagagacaaccaacagtgtccactgatcttgcaggccctcacagggtggatgcccaggaagtcctgactgacaagccctggcggtggcctctccaccactccacccgcataaggagacagagaggctaggaaagaggctctctgaagggcgcaagttctgccctggcaacaagtgatcagcctccaggaagaccagggattggctggactgcagggcagtcaagggcacaggagggaagccttggcagtgtggctccagctgggcagctgccttctgggcacacactccttcttcctgaggtgcctccaggcatccaggtatcagagggggacaccaaaggccagagcaagctgggaggggatctgcggcatgaccctggaacctcacatcagaaacgacccctctgccaccctcagggaagccagttcacagggctcatgtctgcggcatttaagagctgagtagacctgacctgaagccaggaggcagggtctgggcaccggcttcccttctgcagggctgggtgactctgggcaagtttctcagcatctctgggctcctcagcaagcaccccaccacgagtttaaattaatggtagggtgccgagtgcagtggctcacacctgtaatcccagtgctttgggaggtcgaggcaggagcattgcttgagcccaggagttcaagaccagcatgggcaacaaaggaatacctcgtctttacaaaagatttaaaaattagccaggtgtggtagcacacacttgtagtcccagctacttgggaggctgaggtgggaggattgcttgagcccaggagttcgaggctacagtgagctatcatggcaccactgcactccagcctgggcaacagagagagacttagtctctattaataataatgatgataataataataataatagcagggggtgcagactctgggggtgatgtagagtccccctaggccaggcagaatcatgagcctggttctgagagtcctgggccatgccaaggccaggaggagggaactccatccttgcttgttttctgatttgcctaaaccttggtctgtggcctacaatcctatcacagcctcgttcttcccacctgtctcctctgaagacctctcccttcctaaaatatctgggatgacgtaggttgggtagtaggatgggggacagggagctggggcggtgagctcagggccctatggcccagctgtgctgagggcactcactgggtgctgagtcacatgcgtgtttacccacatgcaccccaagctcagcacgtgccagtacacaagctcacgttggcaatcatttactcacccacacgatatacttcccaagggcctattaggcatccagcactgttctagatgttggggattctgcagcaaacaaaatcgactaggatcctggccccagtggagctgccatcctaatgggctctccctcttggcagcacatgtacacacacgtgcacacactggctcaagcctgacagtgcacaaataacacaaatgtcatgttctgctcaaacagcacgtgcacactcgcggatgtactcacacactgttggggtctccaccacagcagtaattgagcacaaaggtcctgataaactcacatacacaccactccatgtcaccactgaaactgcacaaatccctacatgcttctacatcttagtagcacacactctcagaacctgtctgaatgtgtaaatgcacagacattctactaccctgacagcttgtactaccacccacacccatctgtatgggtgcacacacagactggcccagacatgcctcacactgactcgagacactgagagtacacacatgcacacgcatccacccccaagctccactggggagcctggagatgaccggcctcagccaccacatgaccttgtgtgaaaggccctaaggttg

SEQ ID NO: 914316 - DNA, 4001 bp, Homo sapiens
gctggaaattttgatacaacttttagataaaaatttcaccctatctggacatttctactgtccagggatctgtttgtaaaggagcaggacccaaaaacattacacagaaatcataccaatgtcttaacactctacagagcagaatgtactgagataaattgttctccagagtacacaaatctgtgggtatctggatcatgttaagtcccaaataattcagaaatatgtgacacaactctatgtatacgtacacatgtcaaaatagcatgcaaaagttatattttatatatatcacgtagggctttaccatccctcagttatcaatgaattaaaaatactaagttccaagaaccttttaacaaagaatatttttagaaagattacctttatctggtttatataatacaagaccttaactttactattaaaataaaaatatgctctaaaatgcattattaattccagggtgtaaacgggaactgagtttcaaaatcactaaccaaatacagaacctcctggagaaactgaaaatacaagtttctggaaattttgtgtccaacacaaaaattttaggaggcaaacctgtttgatgcaatttatatacctgaggctgagaaaagctgttcagtggcctaaagtccaagcatgaattccccccattatccaagttcttatctaaagggttgtcaatagaacttattaggattgccaccaaattacattctgccatctctcaggtacactggacgatgttttaaatcaagttatctattgacaaaagaataaaaaagaacagaacagaacatccttcaaaagactaaaggacataaggtgcactgaaaaataaattactagcttttttgaaaccaaagaatgtctactacttcatgaatatccacaaatcacagcgataaaggaagattgagtgatgtcagcagttctgatttcctccatcctcaaccacattaacctttctcatccttgtaacagatgagtatacaaagataacgcatgggaaggcaagtaactggtctcggaggctaacccatccctcttactccacctcctgtgagacatctgactacgacatgccacatacacatttttcttcacctggacaataagttccttgaaggcaaaccctgtgttctctggaacctgctcacattttcccagtggtctacacagtgtatgtaccccgagtcacactaacaaatggacacaagtgagttctgcggaagtagtggaaggtttcagagacacttgggtcctatacattagtgttagaagttactcctttccgctctgtgtctccatttcccccttctgaacaaaaagaaaaatttctggacaccagtggatttgcatttcgagttatcaacggcctagcaaacaccgggggtgggagacaagctctgattaacagaaggaccagaacctccggagacaggcccagcctgctgagcctaagcgccagggaaccggcgggacagcatcagttccgaggtccgcagcctgggacccgcaccaccaccacgaagttctcgcagagcaaaaacgccgggccgtctcaggggcaggtcccagcaaacgagggagtccagctggttggggggtggtgcggaagcgggcacgacgacagatggactggagtcagctccatcggatctccaggagaccgggcacaggaggccacactgctccccgagcccggagcaaaagcactctgccctagaccctcagggcggggctcctccggcccctgccccaggcccgccgacaaggagagacggtgaggctcggaccccaggagttcgggtcctggctcggatcttaccatggtgagggcggtggtggggcgcgcccgcactccggctccactggggataggggtagggtctggggaacgggagcaccagcagctctggacctgctgcccccttgacaggaaccgctgccgcttcgcctcttgccaagatggcggccccaagccacgtcttcaaccggaagcggcgcaggtcaaagggcgggggggggggcggggcctgtgggctggggaaattgagggtaccccgctccggttacgattaagcccaggaggtgtagggggcgttcaccctccagctgtggaacctcgtatctctcccctttcactgtcatcgccttcatttattttgcgtcacatcttacagtttaacaagccgctggcacagccactattatttaatatacaggataacctgtgtgcctaaaagaccagtatccggaatatataaagaactttttttttttttttttgagatggagtctcactctgtcgcccaggctggagtgcaatggcgtgatctcggctcactgcaacctccacttcccaggttcaagcgattcttctgcctcagcctccggagtagctgggattacaggcacgcgccacaccacgctcggctgttttttgtatttttagttgagacggggtttcaccatgtcggccaggctagcctcaaacttctgaccccaagtgatccgcccgcctcagcctcccaatgttgggattacaggcgtcagccaccgcgcctggcctaagaactcttataactcagcaataaaaagacaaatacagtattcctgtctaaaaatgggcttcatctgcaaaatggagggagtagaaaacacaaaattaaaatgagcaaaagatttgaatagatatgtgtccaaagaagatatataaatggctaatatgcacattaagaaatgttgaatatccttagggaaatggaaatcagacccgtggtgagacgtcatttcacactcactaggatggctatcataataattgttggtgaggatgaatgtaaaatagtgcagccacgttggaaaagagtttggcagttcctcaaaaagttaaacaaaattaccacatgactgagcaattccactcataggtacatacccaggagaactgaatatatgtcaacacaaaaatgtgtactctaatgttcatagcagcattattcatagtagccaaaaagtggagacaatccaaacaaatccattcatcaatagatgtggcatatatatgcaatggaatattatttagtcacaaaaaggaataaagtactgacatgctacaatatggatgaaccttgagaatattatgtgaaaaaagacggatacaatggggcactcatatatgattccattaatacgaaagatccagaatagaagaaaatccacagagacagaaactagcttagtgatttccaggggctcaggaagggtaggaatagagagtgacagttaattagtgtaagatttatttctggaataattaaaacattctggaattaagccaggcatggtggcatgatcctagagtcccagctacttgggaggctgagttgggaggatggcttgagaccaggggttaaaggtcagcctgtgcaaattgtgagacttagactcttaaaaaaaaaatagttctggaactagatagaggcaaatatactaaaaaccactaaattgtataattttaaaaggtgaatttttatgatttgtaaattatatctttaaaaaaacatgcactggaagcagggcagttgtgctcatgtccattttgtatatgaagaaaatggtgaaaagtttaagtgacttacccaaagtttctaaaccagtatatgatggaaccaagactcaaaatctgttcttgtgattctcatgttatttcttgtatgccaaatttcagatttttcagagtatagctgattcagtagttcttccttaaatcattttatcctacatccttagctcaaccgaacagcactcatccatattaaacctgtatgtccacaattaagtataatagcaacttttaattgagtgcttcatttgtgtcaggtactttacacatgttatttccaatcttttacatcaatccaaataaagatactgaggatcaaaaaagttaagcatttgtccaaactcacacaactagtaagtggtag

SEQ ID NO: 914317 - DNA, 4001 bp, Homo sapiens
acagggctctgaatactcctaaccctcctgccccagccccaagaacaggcacttacatcagtgccatgcctagccagggccgcactccccagctgccggatcttctcccggtacatctgggcagctcggctattatatttggtgttggcatcattggctgtgcatccatgttggcgaaaaaaagccgtctggagagcaaagaagagagcagcgcgtgctacgggtgattctcaagaaggaaacgtgttggctgtaggagacatctccttatgacagcgaagttattatctatacaggatgatacacgctactgacaccggtttttcagagataaagtttctcgaaattcctgcaaaaaacaccttgcagcgggccatcctctgatatgactgaagtccaggccccactgaacgctgcctgagcacaacatcccatacccagcctccccatccttcatccagggcaggcccacaagacccaatgactgtgaaggctcccaactcctgtggcttttccccaagaacacctgcccagtttaattggaatctgaaacccatttaagagaagctgtgaccagtttcgaagttttcagaaaatagcttatggtggtgttatagaacagagaaccctctgaacagggaaaacgacagggcctcttagggagtcgtgcaaagttagtaaccaggcagaagaatggaaggtgagggaagtagaaggagctttaccgcattggcattcccgccgacctgcatacacctcagctggaaccagttccagttggaatccaactctgtggacctgtgtacaagggctgcgtctcacccactagcagataccagcaggatttccctggcaacccggatacctgtcacttggcctcaggctgctgtaggcacccaggaaacattaatcagccatcaccccatttcctccacactaccctgtccatgaaaactctcctcttcgttcatttactccaaagagtactaattatgtccccagatccgaaaggaggtcacattctcaggcacgcacgcctggatttggctttcccctaatggatggtcacagtctcactagagacatactggtctaacaacatatcagcaacaacaaggtcaatgcctccctttcccctcaactaacgctcagagtctcaagcctgaccgtcaaaaaagaggaagttttggcccagaggcggagacggaccgcccatgtgccaaagggcccacacaggtggttccctctggcaggaggctaccggaccctctcggcccagaggcttcccaccgaattcagagcggcccaagtcgaggcagccactctcccttgttgcccagacacccctggccggccgggtggaaacacggcaaccgcgcggagagcctacctgatgaagctcagatggacgcccagggagcggtgcaccccggaacagtcaatgcacaagaaaacaccgtacgtgatgctggcccaactcggattcttggcgccgcagtcgaaacaggcctgggtggaggcggcgatgagcgaatcgtcaggggccccgagtaaaggccaggcaccgacaccccagaaacataacccacctccgcccttctccctccctcaggccccagcgggacgagagactccgcgcgccccctgctcacgcaccttgttggttggaactgcgcgaagcctcttaaaaagagtctggatttcggtcttgttcggctccgccgccattttctctccttcccagacacaaccgcggctgacgggtcccgccgcgggccaatccacggcggggagggcgggctcaccaggccggcctcagcggtgcctgggccagccgaggggtggggtgattggagtccgatctggaccaatgggcagccggcgggacgggggcggcgacgacaaccgcggccgcaagaatcaacgccgcgccgggccaatccgcagccggggcggggcgacggcgcgcggaccggcccaaacctcctcgcgcgcgtagtacccttccccccgcccctcccacgccgcaacccccaggtggagtcgcccccacgccgcgcaggctgcgggaggctgggggcggggacccccactccagctaattacagatcgatgaataaggattaggctgcccaaacactcctcgtccctccggcccgaacgggcagacgcattggcccgcgtctcgcccagccttcagccgttctcggttaacagcaagcctgacagcgagtcccctccactccagattagtatctcgaagttccagagcaggtaccaagcaggcaaacccttttccaaccccggccccataacagacgctaggcctctctctagatgccctctggtggcctggcaagggtgtcctatcaaaaaaatgcacatgagcccgacagtggtgtttttgtttttgtgtgtgggtgtgtgtcaagttttaatacacgctagaacaagccacaagagggtgctgctaggccagaactacactcaccccaagcccaccccaggaaccccaaagcagaggtcaggaactgagtccacagctcctggggaggcccaggcacccctgaacgcttctgtcacctctgacctcccatcttgccctcagcctagactcgtcccttccctaccagtcccttccctagacaaaggcccctcccctccctgggtcccaggacttcctccctcaagggacagaggagcagccagagagcgacggttcagggccctgagggtccggctctccaggagaagctgggctctgaaccagggtgggtaaacgttgcagaagggctgtcaggacactcaggcgcccacacactccacgtagttggcagggtacaggccaatgcggccactctgcaactggccttggcaccagccctgctcgtcctcctcactcatcttcagcagctcctcccctgggggaaaggggattggtcactgccagtggccctggcccaggccctgttcctgcaactgggtcaaggactgagggggatggtgtggtcccagagcccagctagcaaagacatggctcaggcagaggcaggtcaaggtcagcaagctgccccaccccagaccctgaatgcagccaccaggcaccagctatctggacctggaacagctgaagggacagaggactggcccttaagaagtgggtatttggcttccctttctgacacccctgctcaggcagataaggcagaggctgaagctaggaaaggggtcccagggtacctgctcggaagctcagctcatcagcttcctggccagcgtagtcatagagtgccctcacccgaaccccggtggcagccttccggggactctcttcatctgaccactcctcatcctgccccgtgctggagaggggaggcaaagggagcagctcagagtgcaaggaacacggggctggagatctcacccaggatcagggcaaaggcctccctacccccagaggcacctgggagagtcaggtgaggtactaaagattctagctctacctcgccatgcccgactgtgagcaaagaggcaattcctgccacacgcagctgatttaaggcataaacgagagggaatgtgggaaatgcccagcaaatctaaaccactatgagaaccagtatcattacaactactaagtaggccctcaggtccctggcaccaattttcaacccatttcaggtgtgaaagaaatgaaaccaaggagaaaggaaaggagggcgggaggcagagctgtttctttgccacagccgcgctcctggctctcaccctggggaccccggggactggggtgggggtgcggtgccatctcttgtaggcacaatgctggtcagggtaacctcatcagggctccggccacccttctctttccggctgattgtcctctgtgtgtccaaggaccactcctgtggggacagtgcttatagtcaggtggggccatctgaaccaccttcacttacttcatccctagccctggccgagctgagtgggagcccatccca

SEQ ID NO: 914318 - DNA, 4001 bp, Homo sapiens
agggagttgttggtgtacaggggcagaggaaacagaagaaaatacactgagtttgggggcagcaggagtcaaggatggtgggtcatgataacaagaaacctggttgcattcccatgtggaatcttagtgtgagattcagggctgtttgttcctctaaactttagaatctaaaaattctgagaagcttcacaaagttccaactcagcctcaagctgtagagggggggcattcctgtgaagcaggtcttaacttgactcaggtggtggcagggaaaggacaaatgagccatttcaggggctaagtggcaaaagggaaatggatggacaacgctgggagttgcttttgggctgaggagagtccatgaggttcctacaagcagaagttcccaagatctccagacataattcaagctttcctagacatatcctatgcttccccaaaccattcctgtcccctcctccacccaagattcctgtttctgaacattcatacctgtggggatgagtccatcaccagagcccccatagccaccagacacaatgctggtttcattgaggttgggtcctgacaccatcacctgctggaggtcctataggccagagaagaggggttgcttcaggaacataggggctgcagaagcattttggaggtgggaacaagtttggattcaagcatcataaagatagtacacaagggaagtctgcacagaatcaaaatgatacgtaaaaagaatgaagggagtcagataagtcaggggaaggctactggaatggagggtgagaacctaggatttataaattggattcctaaattgaaacaattagaagaatcaaacagaagcacctgctccagcccatcatcttcaggaagctgcctggcttcgccgttcccgtggatagggatctccattgtggctgccttccctaggatcccgtccgtcatggctaggaaaggtattggagtaaaactctccaccccagcaccctgcaaagcccaacacagaagttctggacactggccagcactctagaagaaggaggcctcctctgtcatttctttaaaggctgtcccagggtttgagtgtcccagcgtttggccatcattcctttcttcagatatatgtatttctcccctccaaaacgcacatttgaaacaggcacaccaaagcacggtgtcttctcacaagcccccaacctcaccaggactctggtgattatttctacactcattcagcagacatttagtgagtgcctactatgtgtcaggcactatttgtgacaatgaaaatacaacagtgaagagggaaagtctgctctcttagaacttatctccatgcaggcgtgtttatgctgaggagatgaaccctttccagggctcaggtcttcacccccctattcaggtttgttctccattgcttggcctttcacattcctttagcgtttcttcccccttccttcagggggtctcccctcctccgtctcatacacctcgtcttcctcgggccctccccaccaggccttagttagatcagtgggtgtatgttcccagtctctggtaaaagcctctctctcccaggatatcggtgacccttccacagtcagttatgtctcccaggtgtgtgagtccccgcccccacccccatacacctggacatcaggtgtgtcctcatccttccccggggctcggggcatcttgccctctggacaggtttgtgcgttcaacttcccgtcgcccaagcatgttcctctcacctcgggccgggccgctcttcccctcagggcgccaggcccgggccgcgcggggacctcgggctccagttcccgtcgcgatcctagcagcaggtcagggactcggcggaaatgacgtcctctccgggcagaagaagccggccacgtcgcagattataagggcggagctgacgtcgcagccagggcagggcgatactcgagctagctctcgagatcagcgagaggttacttccggggcggcaccgagaagctgaaacggaagtggcgtacggcatgcgccggtggcgtgatggagcggcagcagcagcagcaacagcaactgcgaaacgtaagtgagaactaagtcgtttcgaggccagacgttcagctcgcattcctgcacacatcgcgggaaccccacagggccagggatttgagggctggaaacttcgggctatggcgcgcgggcctgggaaactttgggcggcgcgaccttgactagaagtgtggggcccttatcgctgagtttgtggtcccccttttctctcagctgcgtgacttcctgttggtctacaatcggatgacagaactctgcttccagcgctgtgtgcccagcttgcaccaccgagctctggacgctgaggaggtggggaactgtgtagggaggttacgctgcaagaagagtttagcggtagactgcttccctcctcaccccacttcccgtacctctggccctggccttcccacgaccctcacccctaggctgggcatggggaagaaaggaggcggacccgacagggcacctttatcctccacttaaaccctatcttccttctaggaggcctgtctgcacagctgtgctgggaagctgatccattccaaccaccgcctcatggccgcttacgtgcagctcatgcctgccctggtacagcgccgcatcgcagactacgaggctgcctcggctgtgccaggcgttgctgctgaacagcctggggtctctccatcaggcagctagccatacccaaccccaggaaggaaggccttggatggaccctcagattgaaggacccggtggaccttggggttggtgaatcctaaacagagagaattcgaggttgcctgaaagctgggtgtccttgctccttttcctggagccaatatacccagtttttactcagtttgatttatattctgggcaaggaagctttgcctactttattggcacaatccgttgttctgtcgtttagtgcatatctgctggcttcagccctggcagctgagaaattgttttctatatgtagaaggaaaacctgagcatttgcaggcatctggttaaagcagggtctgtgtgtacaattttaaaacgggtaatatgtcatgctcttagttcatcttcacaacaaaactatgagtaagcggtattagcctcacttaacagatgaggaagcaagattccagaaagtaccagaaggtcattttatacaacaggagattggttcctgcccagatgacagaaaatgggagctctgtctagttgtccttaagtctgactgacttcagtggctcataaccgtgagccaagtatttgttggttcataactgttgttttgtgaactatgtcttacatgtctagagttctgctggatctagggaaaggaggagctatcgaagtacaacggatcaaaaaaccacagggcttttgggcactgcctccttgggaagttagtggccacagaagagagatgaaacctgtaagaagtctggagtcttttggaacttcagccatttccccaggttgttactttcttagtatgtacagtcttctcaggatgagcagtaaaacctttgaacaaaggtctgtgtggttgtcttcacgggcaatcaggaagggagagagctggggaccatattctgcaatgcagccaaatccgaggaagagaaactgaagggagaagtagatggcaatggttatgataaaaagggataaaactaaatcttcgggacttctttaatgctacgttaatgtttcactgctcgtctagaaactcctaaatccagctttctatcatctgccccacattggtcccattgagtacattctgtgatttctaattccagcctctccattcttttctcattattgcctcccccgccccccaactttgtgtaatttacttctgtattcagcagcctggatagcatatcattccatcaccccattttcttgccaccattggccatctttttgtatcattccacttattctgtcttttc

SEQ ID NO: 914319 - DNA, 4001 bp, Homo sapiens
acaccatctaaaagggagctgaacttgaacttcacctcttttccagtgactgctcttctatgctgtcagttcttccagacatgacctccctcaacgcccccacataacctcctttcccagcataactaagcccagtggttcccatctcccagtcagactggcccctcccactacccccaacccacagtttaacttctgagcctggaagttaaactcccattcagtgggagggtgaggaagctagcacagggaaattctaacatcaagtagtagaaatgaagtatcctgcctgtttaagacaccagccacccacaagcctgctctactctgtgcaaaatacacccaactctgagattaatttttccattctcagcaggtaaacctttacaaaaatcttaaggatcaccttaggcaatcacttttaggaagttgtagacttttctgaaattggtaacatgtgtggactttttccctaagaaaacttaggagatgtatgcaattttaagaggttcatacaccttctgagaatcactgtttaagaacttctggtctattcagaatgacacctgatatatagtagatgctatcatttgttgaatgaatgaaccaattaattcatctcctaagtaaagaagggaacccacacttgttgagggcctatataggaccatgaactggggacacaaactcaacctcacgatagcactgatgaggcatgttctactaagctcattttacagtgaggaaagagaggaccagccgggcacggtggttcacggctgtaatcccagcactttgggaggccgaggcgggcggatcacaaggtcaggatttggagaccaacctggccaagatggtgaaaccccatctctactaaaaatacaaaaattagccgggtgtggtggcgcgcgcctgtactcccagctacctgggaggctgaggcagaagaatcgcttgaacccgggaggcggaggttgcagtgagccgagatcacgccactgcactccagcctgggcgacagagtgagactccgtctaaaaaaaaaaaaagaaaagaaatcatattctcaacgttggaatcggcctcccagttgcaaatcccaccacaatacaacagcaattacaactctcaactacaattatgtttgcatagagcttcacggtttacaaagcccaggttacgttttgcaattatcctgtttcacagattaagaagttgaactgaggccgggcgcagtggctcacgtctataatcccagcactttgggaggcgggggcgggaggatcacgaggtcaggagttcgagaccagcctggccaacatggtgaaaccctgtctctactaaaaatacaaaaattagccgggcgtggtggcggacgcctgtaatcccagctactcaggaggctgaggcaggagaatcgcttgaatccgggaggcggaggttgcagtgaaccgagactccagcctgggcaataagagtgaaactccgtcttaaaaaaataaataagttgaactgaaagcgtggcctaataagtggcaaggaggaacacttcccccaaatttcttcttcttagtgctttgccagatcagatctgggagatttccccctcccgccggcttgctggatgacagcgatccggcctggactctgccctggggaaggcaggaagaaggtagtgaaaatgattaagtcctcttattgcaggcgccaaaatggggcagaaaccctgcaggaaggccaggcctctgagcccagttccacccccgttcccctcctcggatctgctccggtcctccccatccggaccccatcccttcggacgacctggccagctcctttcctttccccatccccacccggggagaccccgcgcccagcagctcaccgcgctcgggcactgctccctctgccacgcctgtcaaggctcggcaaacatccggctccgcggtggaacgggaaccgccccctcccgctctcttctatccccaaccatttccgccacacctccaacccacttccggccccaaacatggcctttccaggagccccgcccacttcctgcacatgcccgcctaagttcctgcctcggggaggtaacagcataactgtccgactcgtcgctcccaaagagatggctggaacaattagttccgctttcccagctagtcgaatcactggtgcacctccggaatccgaggttcgcattgctctcggacagagttctgcctccccagtactcccaaactcccagtcctgtgcaccaatgaggtccagctctgaggcttctttcctgagaaaaaaatttggaagtccgtgactgtttcctggaggagctgagaagaggaagctcacttccggcgtagggaggctttctgacccggaatggaggaggcggaggagctgctcttggaggggaagaaggcgctgcaactcggtgagtgacctgcgatgtccgcgaccctcaaccttggcccaggtggatctgacgctctgtggtcagctttctcctcagtcttctctcctccggatcccaggatcctccagtgccctcagagtcgctgggggcttctgaagagcccttgagcctcctcaaaactttcagggccctccttagagccctcacctgtccctcgggctccgcaggcccacctggacctgcggtttcctcccacacttttccccacctcccaccttcttgggtggctccctcactgtcttcccttctctctgcagcccgcgagccgcgcctgggcctggacttaggatggaacccttccggagaaggctgtacgcagggcctcaaagacgtcccacccgagccgacccgagacatcctcgctttaaagagccttccccggggcttggcccttggcccctcactcgccaaggaacagcgcttgggggtctggtgtgtcggggaccccctgcagcccggcctgctgtgggggccgctggaagaggagtctgcctccaaggagaagggcgagggagtaaagccacggcaggaggaggtattgaaggatagagcgacttccctccgcccttgaaaatgtaggggaggtttggacattgctagacagcttttcaatttgaagaaagagagtatttcaagagataggagatagtcttgtcccttctcttcaggactgtctcctctcagcagcagtagttaaagaatcgaggtttgaaaagttgttgaaagctggaatcatacagtgtcagcagtgagtgaggaaggtcaagagctaaggtttttggaattaagaaagcatgggatcaaattccagctttgtcacctagctggttaaattacgtgccgcatttaattcatctgtgaaacaaagcagtggctctcttgggattatatggaggagctgatgaaatagtgaagataaaaggtttcactgcacaataagtaccattttattttatttatttttcttttttcttagacagtcttgctttgtcgcccaggctggagtgcagtggcacgatctcgccttattgcaacctccacttcccaggttcaagtgattctcatgcctcagcctcccgagtagctgggattacagatgtgcaccaccacacccagctaatttttgtatttttagtagagacagggtttcaccatgttggtgaggctggtctcaaactcctggcctcaagtaatccgcctgcctgggcctcccaaagtgctgagattacaggtgtgagcccccgcgcctggcccaataaataccattttaaaaagctggtgttccttattactttttctgtttagtactcactggaagacagtaatgtgttcaatttagtaattctccatacccttgggagggaggtgaggagacagactttttggtccttactgaatgaagaatcagacagcactgtcctgttagaggagaaccagaggcttctaaccttccaggagtttcatcttaaatttgtcccaggaaagtttcatctagtttctttttttattcctacccgacccctcg

SEQ ID NO: 914320 - DNA, 4001 bp, Homo sapiens
gtgcagagagaggaaatgagttgaaaacgaatcctagatttttggcttgaacaactgggacacaaaggtatgaattacagatatagggatgttgcaaacagtaagtgctaacatttattaaatgtctattatatgtcattattcactgaatttcacatttaatcttcccaacgatgttggaaaggtaggtactggtttgttaatgtgtgaacctgttaagtttcataacaaacgacagcatcttaaggacggtggctatgataagtaaaaagaatgtgggaaaagagcgaagcaacccttcatttattggacaagtattacttgataaatgataataaagctcctctttaatgcttcctccctttggcagtgttatacccttagtaaaaaaaaaagaaaaaaagaaaaaactgttcagaaaaataaatctttgattttcttccaattccttacgtttacaaaaataaaatgctttaagttttaaaatttatgtcagtaaatgtagggctagcctgataaattcacgttttatttgggaagacttgactacacacacacacactccctccatctccgaaggggaaaagcgacaaggacaaaccgcagcctcaatacatcaaaggctgagctggcactacagcccatacatcatcaagttcacggacacccctagatggctccgtgacacggtcaaggtccttgggaactcccacacatttctatactcggcacaccgatcacctctcttcaactgacctctagccaacctaagatcctggtgggaagatttatgaaaggcagtaaaatcaagacaagcagggaacctgcgtaacccctttaagtctctaatgaaacaaatgcaatcccttaagatatttcttaaggaaaagctagaagatgcctctaatcgcaacttgtttccagaaaagctggaagggcaccactaagacaaggcaaaaaaaaaaaaaaaggcaaaatatcggaaagtcttatgctggaagcgggggtggggaggcgggggacaggcagacagggctagaaacacccaaatcaattcctcagggagcgaaacggcagaggccggcagcccgcggcccacgtgcacttgctcagggaaccgttccagcgaaacctgacccggatcggaatcctcccgcagcacagcggccgtgtttatcggaatggaacgctacaagttgtcacctgcatccctctcccagctttgacagggaacacgcgctgcccccacgcccacaccgacacccggatccctatccagcccggccagagtcccaggggccagggaccagtgcagggagaaggtcccccacctcagccctcaggacccccaaccacagcccacccgcccccaccctgctcggttctaggcccagccgaacctacatgtccccgtagtgtcgagcgttatcatccacagtcgcccctcaaactgtgacccccacctgggagacccggaatcatccaggaccctggtgtggggggcagtactccccatatctgccccccgaaaactgctatggagcagccgcgcctcggcgggcaggtgagggggccgagcccaccagcgccgcagccccgctgcctaccttcttcagcgccggctgccgctcccgggcagacatcgccggccctgactttggggctgacaccgccaaagggcagtcagtgctcgcccaggccacttcgggaggcccaggggcacggcgaggggtcggggaaaggcgatcgcccactacagcccgcgcgcctagactgagggaggagccgggctgcagaaccggcggcggatggagacgggagggaggctgcgaggtcgctcgaggagagactaaggctctagaaacggagaagcgggcgctctgcgggaggcggcggcgctgccgctggccgtcaagggcgggaagtgttctgggactctcattaggggccgcgagcctcgagcgtcaaattcccgcggcgtccgcctagcgcgctgctgtggcgggcgcggagggcgcgcgccggcagtgggggctgcggcggcggagggcacgggcccccgctcagcgtcctcaccttcttggtgcagctgcctcccgcgagccgagacactcctgtcagggaagaggagcgccccggctgtccccctagagtctcctgctggggggacatcgcttccatgaagaaaatcttcaaacaaatcccagcccaggaggaggctacacgatcatgtccgcgggctgccggccggaggggcgaggacgcgcgggcggaggcgcggctgccgtgctcaggcagggagccgagctccgggtgctcgccgcgcgcctcccgtcggggccatgtacctccgcctgcgctcgacaccgcgggctggaggcgagtgcagcggcgacagcccgtcagcgccgcggcccgccccgcctcgggcccgccccctccgctccgggcgccctgcgccggggcccgcccccgcagccctcctcagccctcctccagcctgggccctcctagcctcgtcccagcctgcggcgcgcctggcgggcgtctctctatatatgttagcacaccggccaccggctgaccttttcggtctgtgactccgcgtgggtgcagcccgcaggagctcatcggcctgtgtcacgcacgggggcctctagtgcacggacacgcgcctctcccgccacctgcccactcccaccagaccccatcccttcccgcgccgtgcccgcggcggaaggcgcccctgcagcgcgtgcatccgcggagcggtggcgacctcagcctgagcagaggagttgcagtgattcctgcctcgctttcagcggactgcggagggaatcccccaccccaccccactggggatagggtggcacgtcgcagagtgtcgcagctgtacaaatttggaagcccacagcatcgcctgacctcttgtgcaatcccgaacgctagcctgttcgggtaaccctgagtgggcttctgcagccggtcatgtcagcggcccctgcacatttgcacccgcggtttccgctgtctgcaggctgcagagacgggggcattccaaacgtgaaagagcaatgaaggaaaatgcagacagagcgaggacgccgaaatttggctaagctattgagaaggctacaatatgtggaagtgtttatcagatatctgcgccgagagcataacttcctgtcagcccaaatagaggcaaaaatattttaaaggccaaagaataatcagagggagaggatttggagctgacccgcgttgagctgagtgttgctgcactttgcggggctggttgactggtacggatgattcggtagatggcattcttcccttggagtcaggactagagaagcagtggcggattagtgaggaaggacaccacgctatgatattaggttgtggaaggggtttggtttgcttttgtggtaagaagaaaaaaatcgaggttcctgccaggttaggctgttattaggacaggttgtagaagaatagggctctggccggctctgttccaaggaagggatgctgtccaacacacactcgcgcgcgcacacatcaccaccatgcccaggaatggtttattgtggaaataatagggggaaaatgttccagcccgttttaagccttgtccacctcacactgtttaaagtaggcttacataggctttataaatcacacacacgtataaatcacacacacgtataaatcacatgtatgatttgtaaatcatctattattgtgtttatgtatgtgtgcatatacacacacagtttttcatggctactctctttttgcagctgagacccatgtgcagcgacaggactttgcccccaccatagagtttgtcatgaattctacacgcagagggctttgcagttcctttcattccttgctgaaatcatccacttacaactcgttagcctcttttggttcctatcataaatgcacgctcccaattttccttactctgttttatttcgataacacttatctcc

SEQ ID NO: 914321 - DNA, 4001 bp, Homo sapiens
ggatcggaatcctcccgcagcacagcggccgtgtttatcggaatggaacgctacaagttgtcacctgcatccctctcccagctttgacagggaacacgcgctgcccccacgcccacaccgacacccggatccctatccagcccggccagagtcccaggggccagggaccagtgcagggagaaggtcccccacctcagccctcaggacccccaaccacagcccacccgcccccaccctgctcggttctaggcccagccgaacctacatgtccccgtagtgtcgagcgttatcatccacagtcgcccctcaaactgtgacccccacctgggagacccggaatcatccaggaccctggtgtggggggcagtactccccatatctgccccccgaaaactgctatggagcagccgcgcctcggcgggcaggtgagggggccgagcccaccagcgccgcagccccgctgcctaccttcttcagcgccggctgccgctcccgggcagacatcgccggccctgactttggggctgacaccgccaaagggcagtcagtgctcgcccaggccacttcgggaggcccaggggcacggcgaggggtcggggaaaggcgatcgcccactacagcccgcgcgcctagactgagggaggagccgggctgcagaaccggcggcggatggagacgggagggaggctgcgaggtcgctcgaggagagactaaggctctagaaacggagaagcgggcgctctgcgggaggcggcggcgctgccgctggccgtcaagggcgggaagtgttctgggactctcattaggggccgcgagcctcgagcgtcaaattcccgcggcgtccgcctagcgcgctgctgtggcgggcgcggagggcgcgcgccggcagtgggggctgcggcggcggagggcacgggcccccgctcagcgtcctcaccttcttggtgcagctgcctcccgcgagccgagacactcctgtcagggaagaggagcgccccggctgtccccctagagtctcctgctggggggacatcgcttccatgaagaaaatcttcaaacaaatcccagcccaggaggaggctacacgatcatgtccgcgggctgccggccggaggggcgaggacgcgcgggcggaggcgcggctgccgtgctcaggcagggagccgagctccgggtgctcgccgcgcgcctcccgtcggggccatgtacctccgcctgcgctcgacaccgcgggctggaggcgagtgcagcggcgacagcccgtcagcgccgcggcccgccccgcctcgggcccgccccctccgctccgggcgccctgcgccggggcccgcccccgcagccctcctcagccctcctccagcctgggccctcctagcctcgtcccagcctgcggcgcgcctggcgggcgtctctctatatatgttagcacaccggccaccggctgaccttttcggtctgtgactccgcgtgggtgcagcccgcaggagctcatcggcctgtgtcacgcacgggggcctctagtgcacggacacgcgcctctcccgccacctgcccactcccaccagaccccatcccttcccgcgccgtgcccgcggcggaaggcgcccctgcagcgcgtgcatccgcggagcggtggcgacctcagcctgagcagaggagttgcagtgattcctgcctcgctttcagcggactgcggagggaatcccccaccccaccccactggggatagggtggcacgtcgcagagtgtcgcagctgtacaaatttggaagcccacagcatcgcctgacctcttgtgcaatcccgaacgctagcctgttcgggtaaccctgagtgggcttctgcagccggtcatgtcagcggcccctgcacatttgcacccgcggtttccgctgtctgcaggctgcagagacgggggcattccaaacgtgaaagagcaatgaaggaaaatgcagacagagcgaggacgccgaaatttggctaagctattgagaaggctacaatatgtggaagtgtttatcagatatctgcgccgagagcataacttcctgtcagcccaaatagaggcaaaaatattttaaaggccaaagaataatcagagggagaggatttggagctgacccgcgttgagctgagtgttgctgcactttgcggggctggttgactggtacggatgattcggtagatggcattcttcccttggagtcaggactagagaagcagtggcggattagtgaggaaggacaccacgctatgatattaggttgtggaaggggtttggtttgcttttgtggtaagaagaaaaaaatcgaggttcctgccaggttaggctgttattaggacaggttgtagaagaatagggctctggccggctctgttccaaggaagggatgctgtccaacacacactcgcgcgcgcacacatcaccaccatgcccaggaatggtttattgtggaaataatagggggaaaatgttccagcccgttttaagccttgtccacctcacactgtttaaagtaggcttacataggctttataaatcacacacacgtataaatcacacacacgtataaatcacatgtatgatttgtaaatcatctattattgtgtttatgtatgtgtgcatatacacacacagtttttcatggctactctctttttgcagctgagacccatgtgcagcgacaggactttgcccccaccatagagtttgtcatgaattctacacgcagagggctttgcagttcctttcattccttgctgaaatcatccacttacaactcgttagcctcttttggttcctatcataaatgcacgctcccaattttccttactctgttttatttcgataacacttatctccttctaatatatcatgtaatttacttagtatgtttagtgtttattatctatatctcagagaaatgcaagcttccagagggcaggaatcttttgtgggcttttgttgttgttgttgttattgttgttctttgtcgtataccaagtgcttgaagcagtgtctggtgcaataaatgttcgtttgctaagggaattaatgaggcatacaagggttatgagatagatcttagaagggccagactggtagagttggttgtttcactcagagtgtcccatgtttctgtttgtgatcttcttttttgcacaggtttgatctgtgatcaatactacatgttccaaatcaaagtagtattttactgcagatttggaaaactcactcttacttcttaatttttaagtgcttttacttcaaaacccattagttttggtttgcatagaaaactgtcccatacctaaagaaaactgactttgctcagattaatgctatcaccagaatcgtgttttaagaacacaaatttgatcacatcactcccctgattaaacccttctttggctccttgtgtttacagaataaatttcaaatgccatagtatgatatgcaagactgcctataaacagacatccttgcctccacttatttctcttgtcatttattgctcctcttcaactctcaccctattccctgtcacattgaattcgccaagaagtcaccttccaagaactcgccttgccttctcacatctttgtgactttgaacctgctgtttgcattgcgtgggaagttttccttctatatttccaacccctattactttacacttaaatatctaatacttggtgcatagtaaatgcccagtaaatatttgttgaggaaataaatctcccagatttgaatcaataattaccttagaaaaatcttcctgactttatttctccttatctagctacctccacacaccaaccatacacatggggcatccactgtaggtaacatttattgattgcttacttaatgccagtgagtacctgtgggtaacaggtaacatttattgagtgcttacttaatgccagacactgttctaagcattttacacacattaatttagttatatctttataatctatgaggtagcttcttttacta

SEQ ID NO: 914322 - DNA, 4001 bp, Homo sapiens
tccgtgacacggtcaaggtccttgggaactcccacacatttctatactcggcacaccgatcacctctcttcaactgacctctagccaacctaagatcctggtgggaagatttatgaaaggcagtaaaatcaagacaagcagggaacctgcgtaacccctttaagtctctaatgaaacaaatgcaatcccttaagatatttcttaaggaaaagctagaagatgcctctaatcgcaacttgtttccagaaaagctggaagggcaccactaagacaaggcaaaaaaaaaaaaaaaggcaaaatatcggaaagtcttatgctggaagcgggggtggggaggcgggggacaggcagacagggctagaaacacccaaatcaattcctcagggagcgaaacggcagaggccggcagcccgcggcccacgtgcacttgctcagggaaccgttccagcgaaacctgacccggatcggaatcctcccgcagcacagcggccgtgtttatcggaatggaacgctacaagttgtcacctgcatccctctcccagctttgacagggaacacgcgctgcccccacgcccacaccgacacccggatccctatccagcccggccagagtcccaggggccagggaccagtgcagggagaaggtcccccacctcagccctcaggacccccaaccacagcccacccgcccccaccctgctcggttctaggcccagccgaacctacatgtccccgtagtgtcgagcgttatcatccacagtcgcccctcaaactgtgacccccacctgggagacccggaatcatccaggaccctggtgtggggggcagtactccccatatctgccccccgaaaactgctatggagcagccgcgcctcggcgggcaggtgagggggccgagcccaccagcgccgcagccccgctgcctaccttcttcagcgccggctgccgctcccgggcagacatcgccggccctgactttggggctgacaccgccaaagggcagtcagtgctcgcccaggccacttcgggaggcccaggggcacggcgaggggtcggggaaaggcgatcgcccactacagcccgcgcgcctagactgagggaggagccgggctgcagaaccggcggcggatggagacgggagggaggctgcgaggtcgctcgaggagagactaaggctctagaaacggagaagcgggcgctctgcgggaggcggcggcgctgccgctggccgtcaagggcgggaagtgttctgggactctcattaggggccgcgagcctcgagcgtcaaattcccgcggcgtccgcctagcgcgctgctgtggcgggcgcggagggcgcgcgccggcagtgggggctgcggcggcggagggcacgggcccccgctcagcgtcctcaccttcttggtgcagctgcctcccgcgagccgagacactcctgtcagggaagaggagcgccccggctgtccccctagagtctcctgctggggggacatcgcttccatgaagaaaatcttcaaacaaatcccagcccaggaggaggctacacgatcatgtccgcgggctgccggccggaggggcgaggacgcgcgggcggaggcgcggctgccgtgctcaggcagggagccgagctccgggtgctcgccgcgcgcctcccgtcggggccatgtacctccgcctgcgctcgacaccgcgggctggaggcgagtgcagcggcgacagcccgtcagcgccgcggcccgccccgcctcgggcccgccccctccgctccgggcgccctgcgccggggcccgcccccgcagccctcctcagccctcctccagcctgggccctcctagcctcgtcccagcctgcggcgcgcctggcgggcgtctctctatatatgttagcacaccggccaccggctgaccttttcggtctgtgactccgcgtgggtgcagcccgcaggagctcatcggcctgtgtcacgcacgggggcctctagtgcacggacacgcgcctctcccgccacctgcccactcccaccagaccccatcccttcccgcgccgtgcccgcggcggaaggcgcccctgcagcgcgtgcatccgcggagcggtggcgacctcagcctgagcagaggagttgcagtgattcctgcctcgctttcagcggactgcggagggaatcccccaccccaccccactggggatagggtggcacgtcgcagagtgtcgcagctgtacaaatttggaagcccacagcatcgcctgacctcttgtgcaatcccgaacgctagcctgttcgggtaaccctgagtgggcttctgcagccggtcatgtcagcggcccctgcacatttgcacccgcggtttccgctgtctgcaggctgcagagacgggggcattccaaacgtgaaagagcaatgaaggaaaatgcagacagagcgaggacgccgaaatttggctaagctattgagaaggctacaatatgtggaagtgtttatcagatatctgcgccgagagcataacttcctgtcagcccaaatagaggcaaaaatattttaaaggccaaagaataatcagagggagaggatttggagctgacccgcgttgagctgagtgttgctgcactttgcggggctggttgactggtacggatgattcggtagatggcattcttcccttggagtcaggactagagaagcagtggcggattagtgaggaaggacaccacgctatgatattaggttgtggaaggggtttggtttgcttttgtggtaagaagaaaaaaatcgaggttcctgccaggttaggctgttattaggacaggttgtagaagaatagggctctggccggctctgttccaaggaagggatgctgtccaacacacactcgcgcgcgcacacatcaccaccatgcccaggaatggtttattgtggaaataatagggggaaaatgttccagcccgttttaagccttgtccacctcacactgtttaaagtaggcttacataggctttataaatcacacacacgtataaatcacacacacgtataaatcacatgtatgatttgtaaatcatctattattgtgtttatgtatgtgtgcatatacacacacagtttttcatggctactctctttttgcagctgagacccatgtgcagcgacaggactttgcccccaccatagagtttgtcatgaattctacacgcagagggctttgcagttcctttcattccttgctgaaatcatccacttacaactcgttagcctcttttggttcctatcataaatgcacgctcccaattttccttactctgttttatttcgataacacttatctccttctaatatatcatgtaatttacttagtatgtttagtgtttattatctatatctcagagaaatgcaagcttccagagggcaggaatcttttgtgggcttttgttgttgttgttgttattgttgttctttgtcgtataccaagtgcttgaagcagtgtctggtgcaataaatgttcgtttgctaagggaattaatgaggcatacaagggttatgagatagatcttagaagggccagactggtagagttggttgtttcactcagagtgtcccatgtttctgtttgtgatcttcttttttgcacaggtttgatctgtgatcaatactacatgttccaaatcaaagtagtattttactgcagatttggaaaactcactcttacttcttaatttttaagtgcttttacttcaaaacccattagttttggtttgcatagaaaactgtcccatacctaaagaaaactgactttgctcagattaatgctatcaccagaatcgtgttttaagaacacaaatttgatcacatcactcccctgattaaacccttctttggctccttgtgtttacagaataaatttcaaatgccatagtatgatatgcaagactgcctataaacagacatccttgcctccacttatttctcttgtcatttattgctcctcttcaactctcaccctattcc

SEQ ID NO: 914323 - DNA, 4001 bp, Homo sapiens
ccgacccttccccttccacacccatgcctccattttcctgtagggcatctcggcaggaacaccaccacgaggttgtgaaaccactctgctgccacatttcctcatgcctcactgctgaatgcgtgagagacactacatgaaattgggccttgcccagacctctttgttacatttgtaaataaaatcagatcaaatcacaaagatataattgatttaggagagccatggtgctattcagataggaaatataaacagaagagaaatgccctatggtatcatagtttccttaaacaacacatcactagctcagtttctcagagtgaaaatgctgtcacatactcccaaggaaaagaagagctcatccttacacaaatttgcttttaactgtcaaaagaaaatcccagagagacgcccactgccttacaagtaaatctaggattacagtaccaaatctgttataaaaacaacaatgaaataagttccaagttgtttcttcctttgacaaatacccaaataacttccataatttgaataccaggtcaaaaagttttattacaagcaaaacaaatacttcagtcctactcattgttagcaagacacaaaccatattaaaaagcagaacatgtgactaacaattagcataccttggaagggaagggacttactcaaatttgaaaggctagataaaattatgggaaaatgagacaaaagttcagacaaaaaataatcatatgctaataattcatttttatactctgaaaattattcttttaaaattttaaatatacttctcatttatttgaaccccagagtaaaaaatttagtgagggttatcaagagttcccaatattcaatcccttccatcatttaacctagactttaaaaaataaaatttgtggataaagaaatcctttgactcgagaaaaggagaaactctttttcagcattaaacacaaagacagtatctgatgaaaacagtatattcacctatccaagttctcataggtaaacttataaaagatgtttaattgcacatgtgagtggcagtgataatatgcagcaacaaacttcaaacttcatcaagagatttttgtgatactcaaaggtattacatcgctaactctgaaagaaaaagaaaagccagaataaagccccctaaaatttgcaacagtacaacagaatgaatgaaacattggttctgttttcacaaactggttaagacatctttcttcaccacagacactaaactgagagctgcttcatcaggaggcatcctctaaaaacttcaattatgaagttactaatactaccagagattcaaaaaccaagagagatttgggggaaagggggcatgagatacaagatcagagacaagggtaaagatcaaagccacaaaataaccaatctgtacttaatcggaatttttcatacccatgcataaggcaaacaaagcaggcaggcaggcaggcacgcacacacacacacacacacacacacacaccacattccaagaaaaagaggaagaaaaatctattagatacaaattcagatcaaatctatttgatacaaatcagatacaggaaggggtagtagttcattatgagtgtctacttgaaattcctgaaaggctactacaaaacctgtctaacaccttctcctcctggcgttctaacaagtcctttaaaatgcattttacaagttcagggcaagttgtggaatgaggagtgctatatacaactcaaaacctgctcccttgagctccaaaccttcccccagaaaacagaaagtcttattggaaaaaagaccgaaatgcagagaagaaaaaggggtgcgggtgggggtagggagtggacaggacaaaggaactgtgaattccataatcacctgaacttctcttccctttcttcctcttcacagtcagtcacctggattataacttcagactccaaccagaagacactgtcatcccctaaagtgctactctcactttcagtctccatcttgtacttaaaaaacaaaaaaaactaaacctccaggcatggaataaaaagcaccaacattcaggttgttcagctctactcatgtatactcagatgtgtgtctggtgccctagtgacaggtactggtgctggtttaattacagtcagggtacagacaggaaatcacaggcagcacagtcactgcgtctgactgccatactggtgacacctagaccctcccactgccttaggctgcgtgacctacataaccaaaagcagaatctaaatgaaggtgattttttactaattattctgtaataatgactcttctcaaagtttccacttaataagttaaaaataggtattttcaaaatgcaggctttatttgtatccttttttgatctcggactccagaaaggtaaatagaaaactagaaagaataacaccatccactggccaagcacatgagaagcacagttatagatctcacagttaaggaggctcacaataagtagagaagataagtatgctctagggacctgcctaggttcatgccttccaatattacacccatctttccttcctctcagtaaggactgccatatgcatctctgctcaagtatccagagtgagacataaaagctgggcttgtccacagtccttgaaagaaaaaagtttaagtgtcccaagttcaaagatgctgacaatcacatcaaataaaagcatgcaaagttttacacatttaaactgcaaacagtcatggtggcaataaaatgacttgctgggaaatgagtgaaaggtatagcatctatgactgtcaacaacacaactgttacttagaaaagagccatgttgacagaaactactgacctgctggatattcatggctatttgtcttttaccaagcagcaacaaactgcaaagccctgactttccactgtatctgatttaatcaaaaattaagaagacatctactgaagtcttcttgaattttcatatttgaaaaataaagagccaagcacagtggctcacgcctgtaatcccaacactttgagaggctgaggtggatgcatcacttgagctcaagagttcaagaccaacctgggcaacttagcgagacctcatctttatgggggggggggggggggggcgggaaacagccaagtgtggtggtgcaccctgtagtcccagctactcaacaggctgaggtgggaggatcgcctgagcctgggagttcaaggctgttgtgagccataatcacgccactgcactccagcctgggcaacacagcaagaccctgtctcaaaaaaaaaaaaaaaaaaatatatatatatgcaggtccctagagcatataatatatatattatatataatatatatatattatatataatatatatatattatataatatatgttatatataatatataatatatgttatataatatatataatatatgttatataatacatatacaatatatattatatataatatataatatatattatataatatataatatatattatatattatatattatatataatatatattatataatacatataatacatatataaattttaaaaacttttcaaaaaaaattttttaaaccaaaaacaacagaacaacattataagcaaagtcaaaatgcaaacaagttgagaaaaaaatatttgaaacatatcacaaagggttaatttatttaatatataaaaagttcttaaaaacttctaagacccaagagctcaaaagataaataggcaaagagcaaaaatataatactcagagataaacataaaagaaacttaaaagatgttaaaagtaacttcactgataacagaaatgtaaaacaatacataataagatgacttttaaaaaatctatcacataggcaaagcttttaaaaggttttaacaaactgaaagaggacatgggaaaagaaacatgcctgtcagtgggagtttaaactggtacaacctgtgttcagggcaatttagcaaaatctacca

SEQ ID NO: 914324 - DNA, 4001 bp, Homo sapiens
aaattggaaaacttagaaccttaattttaatggtgtaaaaactctcttttgagataaatttttgtcagattaaattgtaatcacatgtactttaatgtcacagtcctctgcactttattaagctatgaagtttggtgtggaactttgatactatcagaggtggtttttgattttgtgggttttgttttgttttgcaggaagtagaggggaaagtttctatatttggtgagtatggaactgacaatgagttcttgttaaagaaataggctttggaatcagaccaaagggttataattcagtccctaatcactttccagttgcaagatcttgagcaaattacctatttaagtctcaattctttcactcacaatggaaatgaccctaacaacagctctcactaaggttactatgatgcttacatgaagtgtatgtgccaaacattaaattctgtgtcaatcaataggagctattattactactacaatttcttgttacatttcatctgaaaactttgagaatccctgaggtacagggctaaccagaaaactgactcagctttccagaacctggaatctggctatctatcctggaatcagcactgagaacatggcatcactttctagtccttcctgctctaattttcttaaatataaacttaacctaagacattttagatttctatcttccactaaatgccatatagcattcttttttaaaaaaagaaatcatagttcaaaccattattatatgagcagtagatgcttttttaaaaagctgactatgaaaatgagctctaaattctgaaattcccccatttatggttttaaaaattaaaatattgctgtcatttaagcactagtgcaacaatcctggaaagaaaaatgttcaacctctgttaagaagttgaacatactaatcagccctattaagggctgatttgtgattcagagaaaattctggtctccatgttattttaatgaaaggcatttattaccgaggtctaaagaaacaccatatacatacggaacaccaccttagtggtaaaatctctgagatttaatacaaaatattttatggatggagatggttatccttaccaatgccaataccaaagaggcggggaagaaccatacttgaagggaaaaggccagaaaggttacttcttcgtgcaaacttgaggagcctctttacacagtctaccaaattattttaagtgcattagcactgcccatttccattaatcaataattgaaatattattaacccaccaggaaaaaaattaaaaagatgatataagctggctgcttaagaaataaaggcaggttcttttaatcataaaaacttttattatattaaactaatgtatagaaaacaagaaataagctgattggaaataggagaaaaaaagatatttcttgaaaccgactgggaacatctgtgttgtacaatcagcaaagcctacttcaaaaagtataaactttttgacaaacatgacaaatactaatgttcaagtgctgaatttctagataattaaataattaaccatttacctaagagagcaaccaaggtaacatgtgcccaaatataatctaaacatagtttcagtgaaaaattctgaatgttgcttgagtcaaatatttaaatgactgattgagatctccttacctcttgttgtggtacaagttttaagatcaatacttaaaattattccaaatgactatatttagcagtagattcatcaggatacaacagctctgcattccgtacaagagtgtagaaaataaatcataatccaactggttccaacctcaccaccacaggttaacttcaagttaggtcccacatcactgccgggttccagctgttttcaggaccccctgcagcagcagttttcttggccctgttttcagtccagtcagtggagcccagcaagccagcaagtgtgtgggagagctctgcctccaggagcttaatcctcctctctcagcacatactgctttgcaacaccacagaaacgccccagcctaaactcacacttgcagaacaggcttcaccagaagagctccacccatcaaccccacacaggtgagcacttcctgctcagaaaacaccagtatgaaattgatattaaattatgtcttttctctttttaaaagttaattgcttttcagttgtttgctaagtaggtgggagacagtgtatccaataaaaatgatagcactttaggctcctttaaaataagaaaagtaattgatcaagtaggaagtactgccagtaaaaggctgaatcactaaaacaacaggataggctgagaaaacaaatcttttaatatctttgctgatactgagctaagattgttattctactaacacatttttttaagtatcaacttacacagtctctgtgtgaaaaattctaagacaatctcttatgcaattattagggaaaaaaataaaaaaggtttcttcagaatgggaaatccagaattaaacaagttttcccaagtacaaccttctccttcatacactacacagatgttaaatatgtaactctccttcacccatggagtcccaaggtacttcttttcctctaccagagacattcattagcaaaagtgaaaatctttggcaactattatcaaactgacaatcaatctcaattcgtgactttttaaagctttaaagattcttattagttatttgcataaatacaatataaatactgagattcaatacttctactaaataataatactgaactgtgttaacccaattatgtatttattgaagaaacaaatgaattggaaaatatttacatattttccattccaatgactttttactaatattaatgtaaattctaccctcaggtattttttaatttacaaaataatgttatagcacttactatgtgccagacacaattctaggtatttaaaaacattatttatcctaatctaatgaaggcagttctattattatctcatcttatagatgaggagactaaggcagagagatgaagcaatttgccaaggtcccataacagtaactggcaagagatgagatatccagggaggattcatcatgcaccattccaaaatcttctgctgttgattgaatttattctttccttcctctttgaacatagctctgaacatagaattgttgataaatggtagtccacaataaaaaacaataaatttatgtgattttaaaataagaaagatcatagagaattccagtatgtggcaggaacaaaacattttgatctttaccaatgggacatctgcagattattgaatttagctgaataggaaacaaggctcttaaaatttactcctattggagaaggcaaagccactcttcttttctttaattttaaatgaataacatctctccctcccaacctcttccttagtactaaagacagcaagggagggcaagggaaaaacaaaagagagagaggaagaaaaaagagaaagaagagaaggagggatgagggaagagagtgagaaaaaagaaagtacatatttttactgtagaaaagccatttgggaatacttagaacaatctgtaagccccatatattacttaacttataaacatccatgtttatgttatgtaatatatatgttaatatatattattttatcatattatatataacatattatttaagtaatatatgttatattacttgacatatatatttaagtaatacatgttattacttgacatatatatttaagtaatatatgttatatattacttaacatataaacattgataggaataactgtattccacaatcattggcctgtgtgtgggagattaatgatgataattctcatctgaaacccaaaaagctgtaccctaatgccatataaaaatacatggtaagaaaaagagtgctgccaaagctggtgaatttggagtaaggtctgcatctagttaactgtattgtgaccatgttgtttcctggttttgataatgtactactat

SEQ ID NO: 914325 - DNA, 4001 bp, Homo sapiens
aagccaaattaatgatgcagggcctatatcttcaaagagcctacgctcccaagatttcttcacttatgaatggaagaacaaaactataatgatgggaatcacctgacttttacaaagctagattcaaccatcataataaagtatgtaatgtcactcgtaatataatgtacatgtcagagcatttatcacaggtatgtaagtattttgaccttctgaaacactaaagtttatctcaagcagagcggggagaaaaatgtagaatatctggcacctccaacaagaactggcttggcatttgacactctgagatgcagctctttttgaagaggcatcatgctctcttagatgcaaagaggttagtcccgcgagactttaaccaggatttgcaagccagaggaaggacagttcacattagtgtttatgtagggtggcaagaattgcagacaaactatatttttcacaaatcacagtaaataccattattagtagtagcctcaaattcagaaattaagtgaatatgggcataaaatatattatctttaccttggttaagtaacacaagtggttaagtaaatgttttaacatttgggatgattaaaagatattttggagcacattaatttcaagacatcttgctaagctctctccttactgttaatacatgtttcaaaatatagatccgatactagtattgtctcagttttaggcgcacacatccctatcatgttgttatacaaagatgatgcccccatatatgtcctgggggtaactagatcacccaaaggtctctctaccttttgaaagtacctcactcacccagctttaagtgaccagagattccacggcttcatttcagtagctaaaacatccagaagcctctattaagatgcaaatacttttcacaggctcctttgaagatggaaaataaataaatacataaataaataaaaataaattttttaaaagatgcaaatacctcctgggaaaggtaacaagccatatcatgtaattgtgctcaattctctgtaagagaaactcttcagtttcagatactcttaggtcttaggaattgaaagctaagatccagaggataaaaggaggaaggaaaatttgatcaagaggtgtatgggaaaggaggtggaagaagccctatattatagactataacagtctttatattctacagatcatcaaaagttctgattggcctttaaccccttaactttcatcccaatgacacacccaacacccacacaatgcaaaccaaaactaagacgcacagaaaacttgcagagttaaaatgcactggtgccttgctgtcttccattatcttacaaaatggcaaaactgcaaatgtatgctttttaaaaagccaactcaatgactgtgtccaatgaagagccactgacgtatgagagacattaataattttctttcaatatcactaaactagcctaattttatctttaagacaaactcttgattccccccttaagggcttttttagttcaaactattaatagacacaataaattaaaaaaaaaaaattaaagtccccaacatcttcctaggagcattacacaacgagatgactttgaacgactttcctcaggatatattccagtgccctgtagagaactttccccatccctgtagacatgtgagtaagtaaagaacacctcaagaacaaactttgttggccaccagcaggggagctcttcagcttttgtccccaaatccattcaaacaaaagaagctccgactcctccaacccacccttcggacccgcaccccgcggggactctccagatgcgggtgtccactcccccgccagccctacttactcctcaacgccccaatgagcagagagccgtccttaatgagctccttgatgaacttgttggttcgctccagctcaatctcgtgacactgcaagcgctccctgaaatctgggctgtccaagtaggaatcgctgaactccagagtgggcagccccatggcacaggcgctgccagcggcggccgcggacacgtccgggccggaggtcagggcgggggcagccggcggccgcggcgggcgctggggtcgcgcgatcgcggggaaggcgccgggacgcgaggggactgattgcgcggaggaaacgggccccgagcgccgcgccgcctgcgccgggctcagtcttcctcccccgaggctaggcgagcgcaggcgcgggcggcgggccgaggcgcgagtcccctcaggttgttgtcatctggacgcatcgtcgttcggaacgcgggggcggcgaggctccgggccgcggccggagcaggaaagtttctctcacggcgcgcagacacttccggcagttccactccccaactctcttgacagtcgtcggcgttgtgagccagaagcagcgcacagccgcaactccggccgggctggggaaaccctccccctcggcggacgcaggctcagagcgcttgcaaatcgcacccgggctcccagaccctcctccccgccgccgcgctcccacccagcgccaccccgccccttcgcccctttgccctcctgccccacccgtccgcccgcactgggctccagggctccccgcgctgcagccccgcgcttgcgctccggccttggctggggtgttagccctgtcccctcttgggcccctggtttcggctagcccttggtgacacttcggggtccctcgctccacaaaaggatctgactcccaatatacctcccctaacagtgtcccctccacccactccctacaattctctgggagaaaaaccaacgttaagtttccctaaagtctgagtattttgaagcgtagatggaagatactactgtctagcgttcgtttagattttacttcacacttccccaccgaatgcatttgaattccacgttgaaaaattgtcccgtcgctctcccacccctcagcttcaatgatccagcctggaggtgtttcttccccctgcccccactccatagctgggaaggtgggacgatttttcaagtcatcctcactctgcttacgtgctcctacttctagtagaatacctatttgcatcacaatagtagtatctcctattggcacctggatggaattgtcctaggagcgggaaaattttcaaattgttgaagtggactggagtttgaaataaatagttaactcctacccacaggctttatccttcctccggtggaggttcacctaataaatttctgttctcttaaaaccttgacagcaaaagaaacgactgctttacatctcgtcctgacatcatctataggatttctgagaactcggatattgttcttaaggatctgcttttaatttctgcattttcattgctttgtccatatgaaccatctgtttaaaaactattctacagatcatgggaaaaattccactaaagtgctttacatttttcccaattaagtttcagagccagtcaagattcttggtttcaattttttaaatgtacaggaacattaaaaataacatgtaaacctaaaacagataagataatgtaaacagtatgggccaggcgcagtgacttaacgcctgtaataccagcattctgggaggctgatgcaggagaatcacttgaggtcaggagttggagaccatactggccaacacggtgaaacccagtttctactaaaaaatacaaaaattagctgggcctggtggcgcacgcctgtagtcccagctacttgggaggctgaggcaggagagtcactggaatccgggaggcggcgattgccatgagccgagattacgagattactccaccgcactccagcctgagtgacagaacgactccatctcaaaacaccttccatccatattcacatctttggccccatattggcaaaatgaccagtcactattagagccattttaactccaagtgttaaatttgtttttgttaactaaatactcttcaattttttttttcttttgcaggtttggggaagggagaggcagtaattct

SEQ ID NO: 914326 - DNA, 4001 bp, Homo sapiens
ttccaagataacgagaagacaaggaaaatccctgagaagcaatgctgaagaaaaaccattacttgagggcttttcactcacttgtgtgtggaatgagtccgttctgtttccataaattaaacacctcagcatcgcaatgaaaaccaacattacattagttcctagcaagacttttgtttacaggctcaacagaaagagcgagaattgaatgaagcaggaaaacaattatccccacacccgtaaaagtgatttctcagaagcaaaacaccctgaaaggaaaaaaatggggataaccagaagaaagtaagataagcattgtcaatacttatcttaagtgtattcttggaaaagttaaaaattatttcattgaaaatgaaaacccactttgaaaaatacacaaagagtaaatataaatactttaaatatttaacagactcttttaagtgaacattcatgtgatgctggaaagcatcaacaggaagaggaagttctgtttctggagtagctgttatggtatgataatggaatttggcccttttaaaatcaacaaatgagtcttacaattgggtaaaactcttattaggaaattaagactactttgtgcagaagcactattgttgcacttttcatcaaagagctttggccctctaattcagttacttgatctattttttcacggtgtaataattcgaagactgacttaaaaataaagcaagctgacaaatttgggactagcatgcagtgtcataattaaattgagaatgaaatgtggtcaaggaatcaatatgctttttatcccttaccctataaacaagagtaacttaggataagcaaactgcacttcaaccacacatggtctagctcaattcgccacccaccaccatgcaacactggtaggtgctataaaggacagacacagaactcaacaaattcagctgcgcgcttacactatgcttacggcttatatctcttaaacgccaagtgtttctggaagacgaaatatttaaatacaagaattaaaagcaaaccccatgatttaccctcatttcttcagctcctggacattgcttccagcaagaacctgtgatttactggtaatgtcaacattctggaaagttattagataataattaaacaccgtgcaggtcaacatctgaaagagatcaagttcccagatcaccatgcagtaggctcaacattaagttcacaggtagaaattcctaaaatgtaattgtcttgagaatctactgcaggacacggctaaagctgataaataatacaccaataccgagccgacttcaggcaccgaccttcacctaaaatgaccttctcctctgatttccagacgagtacacaatcctaatgcacactacaggcggaaaaccacaatcatggttttgcctcccccttctctgagaatcggaagggaagtttctctccggaaaaattacatttccaaaagccaatcaactggataactcggcagcaaccccaggctaactgcacagctccgaaacaaccctctttcctctgcctgtcaacttcgctggccaaaggcaatctgcaatcaccgactcccctgctaggtcgggcccgattccgggaggccgaacgaaggaggaattcataccaacctgtcggtgatagtagactgtgtgccactcattggggcccttggcgagaggtcctccttttatccaacttgcattttacagtaacacctcctccccacccccagtgctctgggatcaggcccaactccgtcagggacacaaaagtccaactcaaaactccattcagtcatctagaccatccgactgtaaggggtcaacggatgcggcttggagcaaaacaagttatctcccaaaacgaactgagaaagccagggagcgagtcagtccagagtgagtcgagctagagagaaatcctccagaaggcacaaggataaacttcctcagagagggaaatccgcgcgcagtgggaaggggacccgggactcccgccggggctggggcgggatcagctcacggacgggtgtcggctcctcctccggagtctcggggcctcgaactccccgccgcggcaagggccggggccctccctcccggctctctatctggggctgccggctgctcgtggccgcagcgttggccgcgtctccggccgtcccgcgccgggctcgcgcgattccatgtcccgggcccggggctccttctgtgctcgccgccctcaccaggctcccggtgctgggacgagccgctggcgccggcggagaggtcccgcggcccgaggtgacagggacccgggtctctcagcgccgcggactgctccccatccctttgaggcccggactcttccgcaatcgccagaggcggcggctcctccccgacgctccccgcgaggggcgggagatgcccgtccggcccggcctggaagccctggtccgggaggcggaggcggcggcgtctcccggcgcagggccggctcgccgggttctggaggccctcgcgggcgcgcgcgcagacagcggaggaggccggcggccgtgggggccgcgcaaccgcgggcgcgcgcgcgggttccggttccggttctggtttcccggccctggccgcgtccggcgcgagctcgcgcttcccgtcccccgccgactttatggccccctcccctctgacttcgggaagccgcctcacccgggatccctccgccgctcagggccgcgctctcgcccttgaacggacgcctccgccggagcccggtttgggagagcggcaaagtagtcctacggggcagagggaggtgggacccgtgcagccccgggaggcccacccacctcccgcggcgcctgggcccctgagtgccgagacatgccccttcgagtccagtttgtactaagtcgactttcaccagagaccgcccgagagcgccccccagatcccgaggacatcgtgccgggaggctctttgaaaattaccagccccccttgtcctggaaacttttattacttaagggaatgtattatctctcctgtcttctggctgcacgcgttctgccggttcccggccggcgcccctcgctgcctccgcaggccccgctcacctgggcacctgccggctccggggggagagcgctgcatgagccggaggcgcagggctgcgggagagcagctggggactgcagccagggtttctcggtataaatattacttttaggctgtttctgccttggcaaaatgaaatgtgttatttgccaaattgataaagcatggtgctttccatggcgacttaacaagcgtgttgtggaaagaactgggagaagaaaatgaagtatatttatccagtaaatagcattacggttctctctgaaggattcccaaacggtttttcggttttttcccctactgggtagagagctttagatacccatctagttttatgattgaataattcagtattttggcaatttaggtaccacatgtaatacagttcttcagttctgcctgcaaacatccaaagtggctattccctttatccaactattttcagacttttgagcttaaacctatgttggtgacaagggatttcagccattttgtggaatccaagtagcaaatcaaatctaataaacagtggatgtggagagaggaaacaattacctcttaacaatgctgttgcaaaaagtcattccgcaacagttcatgaaaggatcattatccccgaatagaggcatgagctcacgctgacgttagttagaacgggggggaaaaaaaggaaaagataaacagagaccagagacgactctttattgctcgattttttaggttcaaggcacagccaactaattttgtaatgtttatttttggaaagaatagaagcagattagccaaggcacttccctaatgatgagaccaggacacattgccacctgctggtgtattctagcatgacaattctaccctgaagactcttaaattgagtgtttacatgcaaccggaaggaatc

SEQ ID NO: 914327 - DNA, 4001 bp, Homo sapiens
gtatgtaatatgttagaagatgatatgcactctatcaccctccccccccaccacacacaatccaacatgtacagcacattatgaaggatgagtaatggaaactaaatataataaaaacactaaagtaatgagaattgtttccatagaccatatgtgaaaatctcttacactgaatagaatcatgaaccaaggttgcctagtccaaccctcacactttacagacgatgttaaatgatttgctcaatcactcagttcttggcatagattaaagattaggatccctatctccttttcactcatggcatcactatttgtgatgtcaaataatcatgataaaatgctttaatctactcatatacaaacagtggaaagagctttagagtctgactgacccaggcttcatcacttcatggctttgttacttatggtaaatcacttaatctctcaaaatgtaaattttctcatctataaaagagaatgacaatttttgtttgcttgtttggactaatgtgcataggataacaagaatgacaataatttcgtgactaggttgttatgaggattaaatgtagtagcttatgtaaaacacctacatgtcagtacataaatatataacactgcaatacttatatgcttgcaccaaaaatggtacatcatatgcatgagttttttatatcctttactagactataaacctgatatacatctaaagaacctagcataatgtaaatgctcagtaagaatttgttaatttgttaatacttctgaggagtcaaacagctttcaaaatgtggcaaacagtatgataactcatatcaccatgatggaaataatcaacttaactgaaagctccatagtacgcttcaacatgttttcagtctgtctttcctaaatagagaagtctgtagcacttaaatgctttttaatgtcataaattagggtcctagctctttctgtccacaagaaaataattctcactatgaaaaatactttcaagagaaaaccaaaaatatcttcagcattttatattacttcttttcacattcatcccttggttcctgtatttacagctataattggaaagaaaaagaaagcagaatgcaattccagtgccatcacagcaactcggcagcttcttcaaatttataatcaacatttcagctgacaagagcaaaaataccacaaactgaacaaaggataaaataattcaagttgataagattggtgccatggataccaccttttccaatgattatatatttcaatttagtttccaatgcaaaaacaggaaggttactctgtaaaaacactcccttcccccactgtaatattaatccccaccccctatatcccatccatggtctcttgggtatcaaagggaaacaaccatcctgaagcatgagataattaaatcacaattcacagaataatacgtcaaagtctctaagattcaagagaggttatgccaattcagttctaaaaaggtaacataagaatgctgcatcctattcttttgaataaagatatccttgcaatgctggatgtaaaaacctttgttctaaagctaagcaattaaggcacgggttttcaaaactaggaattttcttccttaggtcaaattaggttttttaaaacatgataaaaatcctaaaagctgttgtgagaaataataatgaacaatgtaaaaatatccttttcctttctattttattcctgttaacaggtacatccctttcactgaagctatttttctaccattttgctccattttatacacgacccagaaaacaaagactgcagtagattacctggatcaccggacaaatcagcagacaagcaaaagctcaaaaggctcgtttccatggagtagaagaaaatgaaatcctcaccaaaataccactcccttagcaatcctaagctttttctttatatatacattcgacatccttggaaaggcatttgtcagatgattttactgaccacaagagggatgataagaagaaaccccacctcttctcccacccccaatcatctaccatcatcattcgaagcccaacactgcgctgctaatggaaagacagagaacagcatccatatacatttccctagaatatcactcaggaaaatatatataatataaagaaagcaaggatttggctgataattctctagcagaacaggccaaatacctctcataaaattaaaaatacttgcaaaaaagatccaattataaagccacaaaaaaaccctaattttcttcttgagtacagcatgatttttaaattgggaatttcccaaatacagtgccaaaaaatggagtccctcaaataccttaaaattcggttgttgttactgctccttttcctaaagccagataaaccaaataagttaggatttacaaaaaaaaaaaaaaaaatctccttttgttgctagtattaccccttcaaagagaatctgggacaggaggtgggagtagaggagaaacagatttaaacatggggggaggaaaaatattttctgccccaataagcctaattaaatctgtaagcaagactgggaggattgaaatttcttcatgctactctgtctgtttgtgtttgattattgtgaatcttcccaggtctcaaactatgccctaggcattatgtctggcattctgttaactagcagcctggcctcttacagtagaatgagggaggaacaagagacaaactcatgcaatctaatccctagaagccatgtaattttgcgaaaataatttgcctcaaacactgctctaaaaaatgcattgctatactaagaagactcagcctctactttccttttctgaagcatcaacccaacttgacaatttgcaggcacacaatttctgggatcaatatataagtaacgaatgaaaaacatgttgttttacaaaacatattccttaaaacatttgaatacatctaattttaagttaaatcccagtaatcactctatccacataaattatagctcaaggttctgtgaattttgaaggaaatcacagaacctcaaaactacagttagtgatctatgaagaatcagctttcagagaacatataccttggcaaaggcagtcgccttgtaagtagttactaaagaagtagttactgattaagaaaatagtctagatttgctaaaaacaaatcagactaggctactgactgtggctatcattagacttcctccacctataccgaggtctcagtttctctgatgcttggcactttctgaccagcccaagtatcctaagaaacacgaagctacccatatgtcaaagcctgtgttggctgatgaggcaatttctcacacaggacagcttagaacttgaagccaactaatttcatgtctcaacatctctatcatcctagatcaccaaacaaaactttagtcatccattaatcatgtgacatatctaacaaaatcttccactgttcccctctctatcaaactttttcactgtgtactctaggacaggggtctccaactcctgggccacagacaatactggtccatgatctgttaggaaccaggccacacagcaggaggtgagcaagtgaagcttcagctgtatttacagctgctccccatcactcgcattaccacctgagccccacttctgtcagatcagtggcagcattagatgctcagaggagcaggaaccctatagcgaactgcacatgagagggatctaggttgcacactccttatgaaaatctaatgcttgatgatctgtcattgtttcccatcacccacagatgggaccgtcaagttgcaagaaaacaaactcagggttcccactgattctacattatggtgagtatataattatttcattatacattacaatgtaataataatgaaaataaggtagacaataaatgtaatgtgcttgaatcaccctgaaaccatcccactactgccctcccccgaacaccctcccagtcccattgaaaaactgtctacaacaaaaccggtcc

SEQ ID NO: 914328 - DNA, 4001 bp, Homo sapiens
gcaaaatgctgcaacaggaggctcagggtctgccccaatgccttcatctgtcagactggactcagggcctgagagctcctcctgggaccgctgccctcgggtcacatcccctgcccagtcagggcttccagggggggcatcgcttccatcatcttgttgggcacccatgcgctggatcttctcaaaaacctggcgggcctcctgcacatattggtcctggacgatgaggggcagcggatcctcctcggcaccagggcctgtgagcaggagctcggaggagctggacttcagagcactggtgcggggcaggcggcgggccatgggcttctcagagcaggtgaatgactttgctctccgcagagtggctgtcaagtccttgagtgtggggcgcgtgccaggtgatgctggggctgggatgggtatgggttcaagttgccccacagggccacctgcggatggtgagtctctgccatctagggggttgcttccacggtccccggagctcccaccaggttttcggaccctcagctctgaaaggtctgagcgcaggaaactgagaagcgtcagggtctctgaggcgatatctggatttgacagggacttccgctgtcgactcttttcaggctcaaatcctccatccctcaatgccctagaggtgcctccaggtcctttggcacgggttcgagcctgggaccgcaggagcccttccccagctccaaagctaggggagcggtacacgccccagcccccagaacccctactagaccataggtcgtcgtccttgagggtctccgtgctggaataacggctgctaccgcgggagcctgcggggctggccaggtacgagggaaagctcaccttggccacacggaaagctcctcccacagagtcagacataggccgaagtccctcctggggacctgggacgcagggcggagagccactaccccactcccggagtccttcttctctaggggctcttggagatgttgggggctcagggctcccagaaacccctgctgagttcatgctgcttagatttaacccatcactgtcaggcctgcagtcctgatccaatagggagcttccaggcctgagcccgggcctccctccccagcggtggccgccctcaccgtctcggtcgtcgtcactgcccgaggagtggccgccgtggtaggccggactctgggctccaggcagctgcggcgggccctcctcttcctcctcgctggagctggcagcacgactgcggctgacaggataggaggcggcgatggaggaggaggagcaggaggcccgggccccggcctgcggttgggagaagatatgccaagaatgtaaaccatccgctggacgctgcgcccgctcctgttgctgctgcggccggcgcagcctcccttcggtctccggcccggtcaggggccgcgccgaacgcagacccgccagggggaagcatgtccgagggggtggcgtcggtggctgccgcgactcccgagccggaggctcccacgcggcaccgtcggggctgggcgttcctggggattcagagtcggcgctgggcctcctggagccaggaccgccgaagagcttgcgcatctcggtgacgctgggccaggctcctcgcgctgggccctcggccgcttcttccgcggccgcgggtaagacgcctccgtctcgggtcccagcggagccgtcgtccagacgcggcgcgtcgaagcgccgggagagctggcgaaccgacggcgagaggctgcggagcgggcgcggctgcgcgggggcggccaggggcccagacgccagcttggacacgcgccgagagggctggccccgggcagccgtggtcggccggcacgaggcgcgtcgcctcaagccgggggtgtccgtgtcctcctccctcagcccggggccgccgctccagcgctccagcagcttgaacgagacgctgcggtaaagctggggccggggtgccccgtccgccatagtggcgtaactcactccgggggggctggcctcgggcagccgcggccaaccccccctgcgcccccactccctaggagcgcagcggcccacgccgaaagcagcgcacgggagtgtgggaagaggacgcagagaccggagcagaggtttctctgccgcggctcaagtttctgtggccaccggccgcaacgtctccatcccgggcggcccctcccgcctcagcgccgacccccaggcccagcccccgccgcggctggagcgaccaggggcaccgcggcaccgcctgggcgggatcccagcgcttggttcctcgactctgcgtccgcctgcccaacgcccttggctgctcgctcctggcacccttttgttgcaaataaactttgcggcagaggcaagggggcggggggcggggcctcgcgcccaaaagagggggtgggctccgggcgtgcgcgagcctgggaaccgcgtggtgggagggaatcagggaggagccgaagaagaaaaagcctgctggaggacttgcagactgaggcgaccctctggccctccagagaggtccctcgggagcccagcaggccgagctgcccccagggagtcgctgagacacacacaaccgctgagcgtgctcagctccgcagactcgcagccagggcgccgcgtccaccgcgggccaccagcctccgcgcggaaacacctcctgcccaggggctccaacatggcaacctcggactcacaaactctcgtacacactgacactcaggtgcacgcagacgcacactctctgggccgggaaaggggtgggactcggcgccagggagagcccggggagccgcgggctaactgaagggtccgtcgcgccctactccccgcccaggccacgcctcctccccttccctccccctccccgcccgccctctgcggcgaatttagctgtagccacgcccttgtccccccatctcgctcccaagcgccccgcccatcccacctcccagccgcctgtccggctccgaccggcccccaacccgcccagcgttgctccagaagtcccacccttcacgaccgcgcccccacccctacttttccagctgccacgccttccacctgcccctgcagtctggcggctcttctcctggactctccgcctggatccccgagccttttcttcttgctctggagtacgcggctcttgcgccccctcgcggcgtgattttcccaacgcacggagtcctggacggataaagcagcacccatcccccaaaaacggagagttgtgaaaacttcctttcagtcgttacctaatccccttagtctttttcagaccttcgcaaagcgcactgccccttcttaggccttatacacaaaaggagcttcgacgggaacgccctcgacttcccactgccaaacctatactcttacccgcagctgcttcaccttcttggcaggaaaagtgtcggttgtttctctggcttcacgctgatccctcgcttgagctcccctcccgcccctgcctccgtctgagtctcacattgttctcggtattggggcatcatccccttccgcattcccacctgcctctagatcccattcatcctcccggcccaactaacgaatgaacgaacgaatgaaaatgtatggagtacctataatgtatgggcaatattatttaacttattttttaaaatccacaaaccacccttggggacaaatattattaccccttctctgtggaccgtgaaggagaagtaactttgaccactatgcaagtcaggaaatagcagctcctgctaaaattcagatttcaggggcttcaaacaccatgctcctccagccagctctgagatgcacccccaaatcctgatgaagaaggaggttctcgttcctttgagcccccagtctcctccttctcctccttgggcctgagctcactctcctcaggaacagaggataacctggtctgacccatgcccctccagcgctgcccagccttcttcaggcctggtcaaactgccctggcccctccaacc

SEQ ID NO: 914329 - DNA, 4001 bp, Homo sapiens
agatcttttggttctacccattgcaaaagtcccttttctccttttgtgataacccttttgaataaagtctctcctaagtccagatttcttatctgacattgtcttttaaaaattctgcataggagaaaattaagactttctgctgccttaggattgacatcactttactttagtgcctaaatacagcatgttttgtattctaagattaacatttaatatttttgtagcactacctaagaatcaaaagagaatgaaataaatgtagaatactttgattagacctctcctactaccttaggcagtaaacaaaagtatttgctcctcatacaatttgaacgctgccagctcagggaattatccagctttactttaaaacatcagtagttttaaagagttcttaagcattttctcttgctgcccattaccaaacggtaaggaaggtagattaggttgaggaagctgagaaaactcacacgcggccatgatgcttgcaaggtctaggacattatcacaggggtttcggggtgttaatgcagaacaccccccccaccactaacaaaacagcaaaacagccactaacaaaacaacagcagagggaattgaggattaattagggaactcactttttcttcctaaatttgtaggggagatgcagaaatacccgttccaatatgttaatttcccttaacatagttttttagtttgttaccagtctccttattagtgggaaaagtaacatttagaggaaatttaacaaaacaaaaaatttacttcgtttttaggtcaactgatgtctcttttatgaaaaacataaaaaaagttttcatgaaatgttttatgaaaaaaattaaaggcttttcttggcatagggtcttacaacttacacagcgtcttcccagattatctcttatttaataaaaatataatttaatctacccctactccccaaatcaggagctttagttatgggtacatacgcctacaaaagtcacgcatcctgcaactgtgaactttttgtgcctgtcatcttcaaatactgattacctataacatgacaattggcccaaaggcaaagaggagagtctcaatcctcaggaagatctaggtacaataagaaaggtaaaggcaatttaaaacaaaaatatagtccataacaccattgaaaagatttggttcaagtgtggtagtcaggacatgccaggtacagtgcttagggcaaacatcatttcaggaaccttcatagccaccctgaggaaagtactatcattctcatttacagatgaagaaactcaagcctagagctgttgttatcatgcctaacagagtgcccccaaaccctgcaatgattcccaacccaaccctgtaagaggccacatacatttcttccttagttcacggctatttacaaatgactaaaaccaccagatccgtccagtgggcacctactaagttcatggtaccgggatggaaaaataaacattagcctttggcctcaaacggccagggttgaaaggattctgatttgaaaaattaaaaacaaaaatagcagagataaaggctgtctacggagttcaaggccacaataaccctaagtagttcacgtcaaaatcgtagctttgaaggtcctgggcctacaggacaggcgacgaccctcagagaggtcagaggcggcagaacctgtgctgggctttgacacaaggcgttgcgtcgcagatgaactacgcgggggtaggggtgagaggccccggccagcagctggaaatccccctcacgtgtgcgggcctcctcttccacctctccccgggttcccccgttacgccgccgggctccctcgccacccaggggcctgtctccactctcccactcctctccagggcctcccccgttccccttccaccttagcttgagctctcctccgcccggcttcgggcaagatgcgagtccacacaggccacactcgaccgaccgcttcccagccagtccccgcgctaccactgagaggacggcaagcgcgggctagaggagctcaacgccaccacaaagagacgtccgggagaagcctagagcggacacgaggctggccgcctccggggacggaaggggcggggcggtgtgaagtggcaaatgattcaaggcgaggcaagaggtgcttcagatgctgtcttttgcagtcctccgagaggttagggatgtgggaggtccctgggggccatctcttacaagacacagtttccactaaattggatcgtatttgtacatctctacacctgtgcgtgatagtaaacttttgcacccaaataccccgacccctgaaggagagtgtgagttaaaaggatctgaagaacggaccctttgtttaaggtctcacattctatttctttaattcaagcgaaatatattccaaaatgcatcttttattgtaagctataaaaatagctattacttcgagtaaaatgtaggctccaggaagatgcttgtaaattttctcagaacagaaatggtatttttattgtatccttattgtctgtcacagtataggtgctcattaatttttaaagtgggttttattatctagaatccaggagaactgaaagtctcttaaagattcttggccttttaattatcttaaggtcgggatagcagggaaacaaaaacttgttttaaactcccagtgaaaaatgaggaacaggtaaataagacaagccccaccaaggcccaagcgtgctagtaattctctgcatctactgtaagctgttttctgcagtgcgtctatggtcctcccaccactttcatactgctcgccgactaggcaagcgatttgatgcctagaactagggaatgacagaaaggaaaaaacaatgaatagtttcttcaactgtgtctgcaggaggttgcattctgtaattcttttactgtttactttgtggttggcactttgttaagcaatgattagacaaaaacaaaatttatttctgcttccaaggagctcacagactagtgagagaggaataaacagttaatcacagtgtggtgtgaaaagtgtcataacagaaacacatggatataaacaggataaaatgataggggctaaagcaggagcgttctgggaggagattaatgcctgcatggaacttaatttgatgcaattgtgacttcctagtaaactaggcaagctatcctaaaggtaatgaaacagagaaggctcacagatcaaattaagattattaaataatatagcctattcaatttaagtatccagtgaaaaggtgaaagagttgtggtaagtggacacacttaggataaggtgcaagcaagtggaaggacgccatcacctgaatcatgggttaagtaatgttcatatatcctatctgccacaacagccttctccgctggtggtatacttacgaggaccagaggtgaggtgtcagcaaggaggcccacaggtggaaagtgctttgggccaatggtacacacctgctttattggatagacgcagagaagtatgcctggtcacagccagagcttactcggtaagttgttgaacagatacaggttttatttgcatttcctgggcagagcacatatgagactattctaagtgtgaccaatgggtggctgatttagaggtgacatagttaatagcccagagatgtcatgattgctcattgcttagtttttccatccctttttggctatcagtgactctctattccatcatatttctatttaactttggcatgtcttatagtttactaacttactctatatattttacataatcctgcctatgtttcacaaagtacatgcttactcatattctatatttaaaatatgctaggagttttgcatttatctcataagctactagcttagttactgtctatagttaacacttcttacgcctttcatccatccctaaggaaactgcaaagcctttcagtatgggtagagtggaaagctggaaaggcgcataggtaacaaataatgccctttttatgcca

SEQ ID NO: 914330 - DNA, 4001 bp, Homo sapiens
tgcctcagcctcccaggtagctgggattaaaggtgtccaccaccacatccagctaatttttgtattttcagtagagacgggatttcaccatgttggccagactggtctcaaaactcctgacatcaggcgatccatccgccccggcctttcaaagtgctgggattacaggcatgagccactgcgccctgccatcatacagtggccttctttgaccaccctaaattgcattattctccatacctatatacgtagtgggagttcatcctggagcagtataaggccctgttccccagaagcatggtccaaagcatggcccatatatatatagtatgtatggagaatatatatatgtataaatagagacagagtctcactatgttgcccaggctggtctcaaacacctgggctcaagcgaacctcccacctcagcctcccaaagtgctagggttacaggtgtgtgccaccgcacccagcctctattacatattttacttacttcctgtgttatcatctttctacccgcgggcaacccccccgccacacacacacacacgcattacagaatttccatgaaggtaagattttttagttttattaccctgggcactaggacagtgtctagcacatattaggcactcaatatttatcaaatgagtgaactgtatgcttttcttagagctctttaaagcagacatgcggcccggcgcagtggctcacgcccataatcccaacagtttgggaggccaaggcgggtggatcacttgaggtcaggaattcgagaacagcctgaccaacaaggtgaaaccccgtctctactaacaatatttaaaaaaatagccgggcgtggtggcgggcacctgtaatcccagctacttgggaggctgaggcaggagaattgcttgaactcggggggcggaggttgcagcgagctgagattgtgccactgcactccagcctgggcaacaagagcgaaactccgtctcaaacaaaacaaaataaaacagacatgggccggactccgtggctcatgcctatattcccagagttttgggaggctgaggcaggaggatcacttaagcctagaagctggaggctgcggtgagccttgattgtgccactgcactccagccagggcaacagagcaagaccctgtctcaaaaaacaaaacagtcatgatgtgattattaagttatatgtgcacgtaagcgtcttatctccccagccattcccccgcggagcctggcacagagctgggggaacaggtgcgggcgcctaactggactcagaaggcgcacagggcgcacgggacactcgggcccacacacacacatcctcagccgcagggacaaccacgggccgcgtaacaccaaagagacggactgttggatccacgctcgaaaggatccgcggagcccacacgcgccacccgccaccccgcacgcccccgggattcggagctcgagggcggggccggggcctggaaccctcgggcccgggggaggagatcagagccgggagggcagcggccccacgcttgggccaggccgccgggtggtggcgtccgagttatctccgggacccaccacccctgacactcgggccgcctagccccgccgctgcgcctgcaggaccgcttctgcggccctcggagctggcccctgccccagtcctggggtgcggctcctcccggcccgacggggcgattgatggggcccgcgtggtgacgccaggggcagttgggacgcgccggccgccgcgttccgctcccgacagggggcgcccggcaccgcctgcccggctggaccccgccaccctcgcggttccggcgtccggtaggatacagcatgagcagtcgcagctcccgctctttctgcttcatcttcttcagaatggtcaggagccccatggtccccggagccccctcccggccgccgtttcttcccagtcccgggaccccgctcccggttcctgttggctatcacgctcgccgacggcatagtcgattggccggacgctcgtttggtcccgcccttgccgcacgtgaccgcgaggtcgcccgcgcagctgctgcgagggtccctctagcggcgcggggggtttctgtgctgccgcccgccctgacgctgcgcctcccgagggctgaggctgggggagcaagggcgactcccccaccctttcccctgccggactggggctcttggccggagcggaaaccttgaagttcctgagttgcatcttggctgcgtctgacctgagagtcagaacccagggcccccaggtacggacgaactcatcctggggccagtgtaggcccccgttcccagcaacacagtccaaatcctgctcatctgggccctcggcatcatcctctgacagagcggaaagttgggcctccccctacccggctccggtggctctcagttcagggcggcggtgccccctggaggccgttcggaaacatgcggggcgtccctgggttccaatgacggaattgcagtcccgccccaaaggctgcccccacccagaggcccagcgtttccctgttcagaagcacagttcctacttttgcagatggaaaaactgaggcccagatggtgcttagcacagtggctggcatgtagtaggtgctcaataaatatttgttgttgaatgaatggctttgtccaagagtttcattctttactttagcgctcaagaagtccagaagaagtgaggaaataggtcaaggaccaagcccttttgtaaactcaggagacagccttattgctgcaggtaagtgtggataggcagcacggaagagcctctctcatgcttgggaaagagctgtcagcaccagctgaggacaatagctaactcctgtgtaactgtttgcaacgcacttcacgtgttcagcttcatcctccctgcaaccctgagaggtttatattcttttcgtagctatgataatggaatccagagtgtttaaggagcatgggtgagattcaaactcaggtctagtaaatggtaaagcacaatgtcttcatgcctccatgaagtttgcctagagagaggtctggaagaagctggagcttcccatcttgcagaaaggggcttgtggtcagaggagggctgaacagataggctgcctgagtgggacccttcggtcagcaccatttaccctccatcacacacacacaaggaagaaagtgagcatatcgcctacccagaggcttcgaaatgcagctaagatcaaaatgggaaatgctggccgggcgccatggctcacgcctgtaaacccagcactttgggaggccgaggcaggtggatcacgaggtcaggagttcaagaccagcctggccaacatggtgaaaccccgtctctactaagaatacaaaaaattagctgggcgtggtggcggcacctgtaatcccagctattcgggaggctgaggcagagaattgcttgaacccaggagacggaggttgcagtgagccgagattgtgccactgcactccagactgggtgacagagtgagactccgtctcaaaaaaaaaaaaaaaaaaaaaaaagaaatgtctagaggtaggagcctgccatcctgcttctaggagcctgcaccacagacattctggcactgcacaggaacaacgaagttcactgtggcatggtttggaacagcaagaaattggaaaaaacctaagtgcctccagtgagggcaggttacctgagccggggtaggtgcatgtgaattcatgaagcccttaaaacagtgaagtgggccaggcgcagtggctcatgtctaatcccagcactttggaaggcagaggtgagtggattgcttgagcccaggagttcaagaccagcctggccaacttagggagactcccatctctataaaaaatacaaaaattagccagacatgctcacttcaacccaggaggcgaaggttgcagtgagctgaaattgtgccactgcactccagcctgggcgaaattgtctgtctcaaaaaaaaaaaaaaaaat

SEQ ID NO: 914331 - DNA, 4001 bp, Homo sapiens
atatgttctataagctgcgttaaagacttatcagtaaaatgatctgagtaacaaaacatggactgaaagactgaattttgtattttcaaaaatatttgggaattccattgatatggaaatcaaatataacaccagcgaatttttttaagtcttgcaagcagagagagcatgatattattcaaaactgctcaggagcagcaatgattattttaagctcatgattcaacgggtacattaattaaaaactccaccaacccaaattcacagatccggatatcaatgagaccagaagaattaaaataatagttgtcatttaataatagattaaaggggtgaacaacagcagatgtcagaaggacaaatgacaagcaagcaggtgtcgtgggaaatgaatgcatctaaggggcagcttttatggatgtttaataaaacgacgatgctggaaatacgggtatacgggtagtgtcaagaaaagcttgttcacaaatacggaatctgatttttggaagctgggtgagaaaacttggctaataattcctcgctgaggagtagcggtggaagaaggaagagaccgcaagcgccaaagcgccaaaacaacgctaggtgaccgggaaggggccgaggcggagaggggagaggggtcaggaggtgcggggtgcgcggcggcagcgggtctctcaccggccggcgagaacttgacagcaggcgccggtgtccagcactccccttccctccccagctcctgccggcgggcacctgagctcaccccgctgccggctctcgcgacccctcggggaggctaacatgcgccccacaaggtcgacgttcacctctaccttcctcgtcttcttccaagcaaacgggaagctctctgggatgtcaacgcccggcaatagccgagcgggaaccttttcttccctgacatctgtcaaacccggagctggagccaggctcgctgcgccctccgcggagctctgggactccaaggccggcccgcacccgggctccgggcgacatccccaggccgacgcgcacctgcccgcagacccacggggcatccttgagggccgcccaggacctggacggcacaggccccacgaaagttcgcaggctggggtcggccccgtgccggccggggattcccgggtgcagcgccagccctggctacagggccgaaggggcgggcggacttggactccccaagcccgacggagacgccctccccgcccccacccagcctcgcgggctcccgaaagggaagtgaagcggggaggaagggcagacgcggcaccgttcgcccaacgcccttgaggggcagccaccaggcatggtcccctcggggatccccgaagctcccggggacacatctaggagtcctcttcggccgagtcactgcccccaagggcagagctatccctttaagaggcagctagctgccccctccccccgccaggtagcgatgcccgcggaagggcggtgggtactccagcgaacactttcccggcccctttaagggctcctgcagcacctctgcctgccctagcccgcagcggcagcccccgcgaggaggatgggggcggacgggcgcggcgcctttaaggggcgcagcctccccacggcccgggtgggggcagggagcggtcacgggccctttaaggccggcagcgggcacgtcgggcagggttcttcggcggccgggttgcccccggggcggcggcaggggcgcagcgcccgcgagggtgctaacggcccccgacggggtgcgcgggatcgcgtcgctggccgccgccggcctgacactcaccgtggctcgccgggagcgcccgcgcccgcgcccgcactcggatcccgcggcggcggcggcggtgagtccggcgcgggtaaacaggcacctccgtccctgacctactttctgccttccctaaatgtcgcaccactaacctactttccgaccaatccgctccccgccggcccaggcccggccccccgcccaccaatcgctgtgcccaaccccccttccccgcccaccaatggaggagccgcagcgcccggatacctgcctcttcccgccagccaatccgaacgcccgaagggagccggtcccggcggccgcccccagccaatccgcgcgcggctcggcagcccgctggccagttgtgtggcggctagagaggccgctgaccaatggcgaggcggcgggagccggtttacctgctactttcctgccaccaatcatttggcgcacaggagcgcacgccccgaggagaggaccaatccgcgcgcgctccctgggttcctcgcccctgccctctccctttcccctcaggtctcccactagccgcggccactgcggtgcccaagccgcgctcctcggggtcgcccgggatgtccctcttctctgggtcccctgccggctggcgtttggccgcccgccctcacccctcctccttcttcttctcccctccgggcattccgacgaaaagcagcagttcctgactccctctctccctccggctccatctaggaaaccaattttaggaacgttgagtgccagacccttcctaaaatccctggtttgccaaagtctcaacgagagaacggatacttagtatttctagaaggcatttccaccccgaggactgcaagtgttctcacgttctttgcgttcatcatgacctccaagtgtcccactggagctgtcattcccgtagttccaaagagaatactcgagcgcggagcgattccattgcatttccttccagtagccaggttttgaccacttactgaagagtagacaccagccccgcggcagcgctctctgctgcaaaaagctgtctacggagcaagacggaaggaaacagttacagaaaataaaaatttgataacgacatgcgactcggttgctgagaggacagagaaagtgacttatttttgcatctcaggcactttgtagagggcctttagcacaaagaactcccggctcttccagatgttaaactccctgaatagaaggacagcgtcttctttttcgttatccatcatgtcagctctcctttagcgcctgctggggtagggtggagtggtgggggcggggctggcacccaacaagtgcaccataaatatctgttggctggatacatgaacaaatggaattaaataaattggcctaattctgttacccagactggcccccgtgactctagacttctagcctggtaagttccttgaacacagacactgcgttttttaatctctgtaacaccattgcccatccccagctcattgacaggcacggagtgcccaatatgtgcttgtggtctgaatgctgactgttttcgaggtcaagcaattccgtcggtagcttgctatttttccgaagtttacacgcaggtggaatcttattgctcctttgtctctgcccccatttcatgaggagatcactctaggtaagtgggacttaagcgaagcacttgacaagatatcatagacaagatgaagaaatatgggctggatgctagtatcattaattggactaataactggttaagtaaccataacctaaagatgctgattgatgagtcgacgttgaccgaaaagaagattgcagggagtcagcattccagcagcacctactacgtaccagacactgtgctaagtactttcccctcatgttctcccttaatctttataaccacactgtgaggaagcttttattgccccattttacagatggggaaactgaaactcagaatttagctagctggccaaaggtcacacagtaggtggcagagccgtgattcaaactagactttttctttttatttcaaagcctctataccacaccagttaccctcagaatgacagaagcctctctcccaggtccagacatcagaacttttatcagtgttctgaaggaaaatccagaagattcgcatcacatgtccagatgacacaaagccaggaggggaagagacgctgttacacaaaccacatacaatatt

SEQ ID NO: 914332 - DNA, 4001 bp, Homo sapiens
cgtcccccccaaagcctgggcctccagcacagagcagggctcccctccctggcccatgaggggcctggcagtgccctagggccatccacagagacatgaccaagtggactccagcctccgccctgcctctggccccttttgaccttaggcaaatcacatggcctctagccctctggttcctctgctagaaaacaggaagaggaaaattaacctcctggaagagctgtcaggaggatggctggaaagtagtttctaaacattaagagcctgagttgcctctgagcctgtttcctcctctagaaaatggaaataatctctgcaagccctttctcacactgtggagagagagtcttagatggcagtgggtgagaaatagctttgtcagtggccctgaaaggtggtgcccaccggggtggtgtctctctagtctgttagctccttcaggggaggagtgggccttgcgcatctttgatcccccacactacgcctagtatacagcaagagcttaataataaatggaaacgaggagaggggaggggaggaaaggaaggaggcagaagtcggacacaagaatagaagagaaagacagaaaacaatgagaaagagggggagcccagggagaggctgctgtgcccacttagggggtggggagggcaacggggaaaatagggtggcaacgctgagcccctgaccagcgctggtcctgtctgaagggctgcccccaggggctgtcctgctccagccccctcctccttttgtcccagtttcccctttcagaggcagagactgtttctgagtatttcaggacaggttctaggagaacgggaggggttctcccagccctaggttcaaaacagcccctggccagccactcctcaggaggtcagagggaaagggaacagagtagatggatgggatctatttggatgaaatgcgatctgttttccccaggctgggggtggcggggggcgctctaccctgtgtgatgtgtgtgtttccacttctggccatgtggggcctgaagcgtgtgtgtcagcgggccttgggctagcagctcgtgcctgtggggtgccagtctttgagggcatcagtctgattgtgtctgtgggggtcagtgttggtgtggccttgcgctccgctgtgttggtgagacatgccagcacaagtgtgtgtgccagtgagggtgatgtgtgtgccagcaagagtgtttgctacagcgagtgcaggtgacagtgtgcgtatcagtgtatgcccacacgtgtgtgccagcacgagggtgtgctagaattggtgtgtgttggattgtgagctgtgcatgccaacaaggctgtcagcaagaatgtgttgaccgaggcgtgtatgacggcgtgccactgcgtgtgatgagcgtgtgctagcggttgccagtgtgtgcgccagcatgcctgtgccacgggttagtgtgcccgtgcgtgtattgtgtgtcaacctgcccccgtgcgtctctgcggctgccggccaatgctgggtgtcagcgagctgtgtgtccgggccaggagctgcggcccacatggggcggcccggccctcgccctttgggtccccccgcccacggccctgccggggagaccacacaggagacctcgggtggaggagagctggtactagatcccgcggtggccgcgaacgcagaaccaggacgcaatcggagcccccgcccgtgtcctcgccgaggtcgcccccacgcgccccccgccgggcggccgccctgcactcaccgggtccctttgtcgcccatggtccgcgacggtcgcagggaggtccgcggcgtcagcgcccaggctggaaaatccccagccagcaggaggagcgcgggccagcccgctcccggctccctgctccgcctcctccgctctcccggccgccgccgccgcccccgcccccggtccccgcccgccgcccgccgcgtcgagcagcgcagcgcccgggccgcggccaggggcgtggaaccgcgcggggtgtgtgcgtgtgtgtatgtgtgtgtgtgtgcgcgtctgcgtgtgcgcgcgccgcccagcgaggcagggcagcgcggcgggacgcgtcagggccccaaggtcggcgtttgtggtgggggagggggtccacccgcgtgcgagtccgtgtgagagtgtgtgtgtgtgtgtgtggtggtggtggtggtggtgtggtgtatgtgagggcgcacggctgtgtgcgggccctattagggagtgtattggtgtggatggaggagtgtgcacgtctttgtgcagttgtgcgtgtgtgcgcacggccgtgggtgcgagcgcgctctcccgcgcatgccggggcagcctttgtgtgtgcgggtggttggaagccgagggtctggcgaccccgaggccgcgctccctgcggcccctcgcttagctggagaccccgggatgcctggcaaggccttcgccctgtgctccacccttccccattccacccaccccacccccttctactggagagataacacccagccacacaacagggacaggaagaaggggcggagggggcagtagacggccttgacactggggaactgagcggagacccgcggccagcaggggctgcaggaggccgcccaggaagaggaagctgtgagaagtgagaagaggcgataaaggaagagggcagagctggcccgctgctgtgaccgggtagcaccgtggaaagcgcccatgcccagctccatggctcgctgtgggtgaccctgtgcactaagcttctgagaacccatgtccggacctgtaaagtgaggatacactaatatcagcctgcagaattgttaataggttgaaagaactcgcttgtgtttgctggcctcccctgagcgcctgcatacagtaggtgcccagtagatgttagcccacttctctgcaggcttcttgatgtcctgtgaaatcttggctgggaccctgctttgtctgaggtgccttcctgctttgcaggtagtgggaaacggtaaggtctttaccacaccctcactactgagatttggctaattatcccggataggtccctgatatctaagtattaaggggaaagtaagctatcatttactctgatgctgttgtgagtatgtaaacatctcctgtaattatgctcagaagcagttacctatactgtttatatgcagtataattactataattatgtccagatttggcagaggggcagggggaggctgatgggtaggcagggtggcccacctctgggcaatgttaggagctagagagtatggatgaaagcccagaaccctcctcccagtcttggcctctgggtttcaccctctacagaggaagaagaggaagccacctgttgtttctgcagggctcagagatctggaaaggagcagactagaatcttctttgatgacaggagatccctaaccaggatggtgaagccaggtcctgccactctccacatcagtttccccacctgtaaaacaggtttgaccaaaccataagatctccaatggatctctccatgctgatgcccaaaacatctaaatatatttatttattttatttatttttgagacgaagtcttgctctgccacccaggctggagtacaatggaatgatcttggctcactgcaacctctgcctcctgggttcaagaaattctgccacctcagcctccccagtagctggaattacagccactgccatcatgcccagctaatttttgtatttttgtagagatagggattcaccatgttggccaggctggtctcgaactcctgaccttaggtgatccacccaccttggcctcccaaagtgctgggattacaggcgtgagccactgctcccggtcgatttaatttactttaaattccagtgagggagcaacgatggcagaagaagagtcaagaggacaattttgctttacctgccaggctctatgaaaaacatatatatatatatatatatatatatatttttttttttttttttttttttgagacggagt

SEQ ID NO: 914333 - DNA, 4001 bp, Homo sapiens
ggctggtctcaaattcctgacctcaggtgatccgctgcccgcctcggcctcctaaagtgctgggattacaggcataagccaccgtgcctggcctgtttttatttttattttgttttgttttgtttttggttttcatgtagcaagaacatttaatgtgagatgtaccctctttacacatgtttaagtgcacagtgccttattgttactataggcacaatgttataccagagtagacttgaaaagctcatcttgctcattattgtagtcccagtacaaagcaggtgctcagtaaaaatgtattgaatgaatgatcgggtttggaggggaaatggtgagttcactttgggaaatgtgaactccctgaagcagatgtccaagaggtagcagaatggacaatcaaggagacatctgagagtcacaggtgattgaaatcagggaagagatgagatccccagagcaagggaaagagaaggctgaaaggcagagggtgagctgcttgattgatgaagccagaggtcaggtggagccgcactcctccttggctttctagaggctctttgcatctggtccttgggttccatgagataccctggtatccttgtgataaaatcctctttaggcttaatctagctcagggtggctcctgttaatttgccatggcaagtctcacgtgataaaccatccccattattcacccagtcacccatgatggtcccctgggtgtccattcagtcaatcattcgtcaaacattcacatagttgccaactaatgctgggtgagataggggtccatcctagattctccttcccttcaacatccacaccccctgccctggctcaggtttgccccttcctcctcgctgatctccccgcctccacagtcagccccaatatcctgcctgcccagggagagcaatgtttctaaagcgcgactctggtcatgttccttacatgcttaaaagccctctgtgccaaaactgactggaagaaatatctcaaaatatagagtaaaaatgcagagatgaaaatcatgagggaagagatacaaacacatctagaaaaaaaaaacaaaacaaacaaacaaaacatccctccataccctaaggacagaggccagcgtccttatcctggccctctgcaccctctgcaggctcgcacctgccactcctgcttggcttctgtagtgcagaacaacgtcgcaggtgcggctccgtggttaccctccctgtggctctgcacacatcgcccctctccttgggacacccttctcctggatacctactcttcaaggcttaacccgagggccacctcctccaggaagccctctgactcctctgggctctggtatcaccctgtgctgtcctctgtcactgtccttatcacactgtgctgcccttatatgtgcctggctcctcttctggccagtgagttccttgagggcagggaccatgtatgccaaggccagggactggggaggccccagcatgtttgctgagagtctgaggaactttctcagcgcagctaacagtgtagaccactgcagagcaggtgggtggctggccttggtgaccagtgtcaggggagatgtggtgggaaccggagggatggggtgggcatgggcccaaggagctggggatgctgagcaattccttttctagcccaagggagctgcgcttctgtcctccctctcatcctgctcggagcaattctgtcatcagtttctcatccaggcccttgctgaacataccctcctgggaatgtgaccccaaatctccccacaggaatcccaaacttcccatggctcccaaccttcctaggtatcccaaacttcatcaaagtttcctggaaactttttctcatgactcctaaaattccaccgttcatctcccaaatttcacctcaaaaccacttttcctgcccagcacccaggaggagagtggtgcactccttacctaggccttgtcctgggtggggaagctgctgctgatctccaccatggccaccaggagaggggaggacaagtttctttttgatattgttagtccccaccccttgaacctcccccacacagctgctcagaaacgtgacacgcccccatctatttctggatgtctcctcagggctcaggaacaccagcctctgcccagtctgacctgcccagtgttcttctaagggaggaaaccatacctcatattgtcttatgtccgatttctgcctccaaagtaaacactaaaaggcagaaatgaaatccacaagcagacagccagacagcccagcgccacaccctgggcctggcagttaaagattgacccctgacctaatcggttatttgtataaaaaagcactgtgaagatccctgtcctgttctgttcccttctaattaccggtgtatgcatcccccagtcacgtacccgctgcttgctcaatcgatcacgacgctctcacgcggacccccttagagttgtgagcccttaaaagggataggaattgctcactcagggagctcagctcttgagacaggagtcttgccgatgctcccagctgaataaaccccttccttctttaactcagcatctgaggggttttgtctgaggctcttcctgctacatttcccacaaaaaagggaatccctgaagccagagaggaggtggactgaagcactggggatccaggctgggacaactgcctcctcactggctgtggtcctgtactctggtcagccaaggaggaggaagagaggaggaagcttcagcaccccgacctcagagagcgtctccttagattttgtacctttcacacaaacactgagacttagctaaggtgccaggagagattcgaactaaggaggctgtattctgagtcccagttccagctctgacttaccagtgatcttgcaggacttcttaatgctatacttaggatccctgcccaatgactagtttttttttttagatggagtctcgctctgtcaccaggctggagtgcagtggcgcaatcttggctcactgtaacctctgcctctcgggttcaagcgattctcctgcctcagcctcctgaatagctgggactacaggcgcctgccaccacgcccagctaatttttgtatttttagtagagatggggtttcaccatgttggccaggatggtctcgatctcttgacctcgtgatccgcctgcctcggcctcccaaagtgctgggattacaggtgtgagccaccgcacccggcccccaatgactagatttgaatccatctcttggggccttattttgggttccaggtcctgggatgggagaagcaatcccccaaagccagagggtggagagggacaaagcagtgattccaatacatctggtctcgggtcatcccagcaggccaagctgtcctcaggtggtatcttttcaagcaactgcaaacactcaacttcctccagagagtgggcaggcaggatatataggcaaatgctgtttttcaccatgatgggaaacggtaggatgattccttattttagaatctgggagggctttgggatggctagactcatagaagggggcaaaagaacttgtcctggagctgtttttctttctttctttcttttttctttttttttttttttgagatggagtttcgcccttttgcccaggctggagtgcagtggctccatctcagctcactgcaatctccaccttccggtttcaggcgattctcctgcctcagccacccaagtagctgggattacaggcccctgccaccacgcccggctaatctttgttggccaggctggtcccgaactcctgacctcgtgatcctcccacttcagcctcccaaagtgctgggattacaggcgggagccactgcgccctgccctggagctgtttttctaacaagcactcagaagcacctccctccccaccctcctccaagcctggacccaccgtatgtcttcccgtttggtctacagaaaggattctgggagatagcaggattctaggtggaggaaac

SEQ ID NO: 914334 - DNA, 4001 bp, Homo sapiens
tatcgtcaaaggtgtctggagccaggcccaggggcaggatgggaacagcctgggcctgtggagcaaaagaggtgccacaccgaaaagagcataagttcagagcactggacatgggtcctgggggcaaacccatccagaaacacagaatctcatttctatccctaaatatcaggtatatgcaatttggcaagggcccaataagaggcttaaataacacaggcactggagtcagtcagacatggactgaaatcttttttttttttttttttttttgatggagtcttgctctgttgcccaggctggagtgcagtggtgagatctcggctcactgcaagcgccacctcccaggttggagtgattctcccacctcagcctcccaactaactgggattacctgtgcatgccaccatgcctggctaatttgtttttgtgtttgtttctttgagacgaagtctcgctctgttgcccaggccggagtacaatggcacgatcttggctcactgcaacctctgcctcccgggttcaagcaattctcctctctcagcctcccaagtagctaggattacaggtgcgcaataccacgcccagctaattttttgtatttttagtagagacagggtttcaccatgttggtcaggctggtctcgaactcctgacctcaagtgatccaccagcctcagcctcccaaagtgctgggattacaggagtgagccaccgcgcgcaggctgaaatcttgactttaccacctattagctgtgaggccttgggcaagtgtcataacttttctggacttgaggatacttccaacctcacagttattatgaagacagcataaagagcattacttctgtacaacctaaaaggggtcatcctgtcattagaaaggttcttgcagtcggtgggaggtgggactagatgactatcaagcacttttccggctgtaagatctggcaggcaggtgatgtgcaaatattacacacagccagtgtccagctgcctaacccccagccccattctcctcgggctctctttccctctcatccagcaggaagcccttgcaggtaggtgctcagccaccacaccaaatcactgtgagctctgagacgcctgagtcctcccctgctctgtacccacatttggggtaggggtggtggggaggccaagccttggttgggacgggctgccaggactgcagcacacaggtaacccaaggaggctttgccgggctgtgcctgcgctgggagatgagaggtggggaggagaacgttggaggcatccagagagggatggagatgggggttctaggagacagaatgggaacttggggctccctgcagagatggaggttcctgagaggaagagagttaagagtggaatcctagggaagagtccctgggagagggatgtgaggagtcagccccgggtccacttcctcagggtctgtcccttaatgtcccccttggggctaggagatggttcctggagttacctgccaggtgtggaggccgaggctgccgagggcgatcatcaaagccgccagcgccatccctggaggagacgtgagggccaggggtccgggtgagggcgggaccagaggtgctggagtcctggtttcgaggggctggaggcagatctggaccctgtctccaggcgcacgggatcccgggtccaggattagggccccggcggggcgtgggcggggcctgggagtttattgcccgccccccgccccaagtctccgcccccgactccccacaccccttcctcagagcctccagtctggggacctttccgagactgtaaaggcggggccgcagtttggctccgcctgagaggggagggccgggggcggaggacccacttgaaggctgcggaagccgccagcgggagggagcgccgagggctctggcgggcgctgcgctgtccccggaggagtccggagtccggctgaaagcaaaggttctcgaggctaactgtagcccccgcgctggtaacccgacacccctttcccagcgccgcacgcggggccgggagcgggcgcgccagggcagggactgaggagcaattccctttctcaaggcctgcggggtctttctgcgggaccctctttggctgtgagtgatggggaggaaacttgtgagactcggcctctccctcaggcgggccctgacccggtcggcccctggtccccggcccaccaggccaggggccccgcgggggtcccgccggccgagaggtcgcccccggagcactgcgatttgcatacagtttgcatttggcccacaccctgggccacgtgctccagcatctgagcagcgcccactccctgcctgctctgggccctctccccattcgccttcagtggggttgggccagagacagagcccttggtcgcagatccacagggtccggtctcgcccctcccccagaccgctctcgtggccgctcagactcaggtgacccatgtttgtaaacactggcctttcccccacctcctctgggcttatctataaataacctggctctgagttttggatgccccgtcagaggtcatgggagaaggggccagcggaggaattggtaactcagggaagagcttcctagcagccagagccaggaggaggtggggttgtcacccctccttcccccagcggccggagggtcgccgaaagctaggatttgagaaatgctgcctgctggggctgaggtgggcacgaaagattagagctacccaaaggaatccatcctggtctggctcattaattttccccatccctgtccccccatcccctcagagtgtcagccaaataaaaagtttcctccacctagaatcctgctatctcccagaatcctttctgtagaccaaacgggaagacatacggtgggtccaggcttggaggagggtggggagggaggtgcttctgagtgcttgttagaaaaacagctccagggcagggcgcagtggctcccgcctgtaatcccagcactttgggaggctgaagtgggaggatcacgaggtcaggagttcgggaccagcctggccaacaaagattagccgggcgtggtggcaggggcctgtaatcccagctacttgggtggctgaggcaggagaatcgcctgaaaccggaaggtggagattgcagtgagctgagatggagccactgcactccagcctgggcaaaagggcgaaactccatctcaaaaaaaaaaaaaaagaaaaaagaaagaaagaaagaaaaacagctccaggacaagttcttttgcccccttctatgagtctagccatcccaaagccctcccagattctaaaataaggaatcatcctaccgtttcccatcatggtgaaaaacagcatttgcctatatatcctgcctgcccactctctggaggaagttgagtgtttgcagttgcttgaaaagataccacctgaggacagcttggcctgctgggatgacccgagaccagatgtattggaatcactgctttgtccctctccaccctctggctttgggggattgcttctcccatcccaggacctggaacccaaaataaggccccaagagatggattcaaatctagtcattgggggccgggtgcggtggctcacacctgtaatcccagcactttgggaggccgaggcaggcggatcacgaggtcaagagatcgagaccatcctggccaacatggtgaaaccccatctctactaaaaatacaaaaattagctgggcgtggtggcaggcgcctgtagtcccagctattcaggaggctgaggcaggagaatcgcttgaacccgagaggcagaggttacagtgagccaagattgcgccactgcactccagcctggtgacagagcgagactccatctaaaaaaaaaaactagtcattgggcagggatcctaagtatagcattaagaagtcctgcaagatcactggtaagtcagagctggaactgggactcagaatacagcctccttagttcgaatctctcctggcaccttagc

SEQ ID NO: 914335 - DNA, 4001 bp, Homo sapiens
cccgtttccaccgcggcattggtcaggctgggccggacgaacgaggcggcgtcggcggtgcggggggtggtgggtgggtccccggctcgctgggggcggagcgcgggccggtccacctggcgggctccccggcgatgagcgcgccggccgctcgctcggcttccggggctgaggctgcggggggaaggtggggaaccaaacgcgcgtcaacgcgggcgcgggcccggggcagaccccgcccgggccggccctgcccgcacctcccccaagcgaagtcggcagtttcgtttgctcggttggttttggagtcttgagtccgtgggtgccgcgactcggtctgagacacggcgggggcggggcgggcgctcggagccgcggtgagtcagggctccgcgcccgccgactcatttctgccgccccggcccgggagcgcgatttgcaatgcaaagtcaccccgcctccagcaccccaatctgccccaggatccgccagcactagagacctcaacggcccgacggccgctcccctcccctcgtctacccctccctcgtcggcggctgagccgcgaggggaagttttgcaatcccggacaaacaaacgccggtcttgcacgggcttgaaaaactttgggggaaatgaagagtgagcgaaatcgaagccatcgctcgggcctggcgctcggctccgcgggctcctgggggcgcgacccgccgggcctgcccaccccgtccctccaccccggcccccggccctccctcctccctgcctcccggctgttacctcataggtcgagggcgctcagtagccccctaaccagctggagaagtcgagtagctcgcgctccgcaggactcagcgcgccttcgcagccgctgtcgtccgacgagtaggcggaacgcggggagccgggctccgagctgcccccgcggcccggggacgaagaagcgcgggagggcgaggcggcgaccggggtggtccctggcggcccgcggggcgcagacggccgcacggcctgcggcctcagccctcccgccagcgcgttgcgcacggcgtcgtgctcggccagcaggcgctgcagcgcgcggatgtactccacggctgagcgcagcgtctccaccttgctcagcttcttgctggcgccgccgtgcggcacgtgctgccgcagcgcctggaagcccaagttcaccagcttcacgcggttgcgctcgcgctcattgcgccgcgctacggccgctgcgccgcctccggtctctgcggtggccggtcgccgccgccggctgcagcgcaacagttccggggacgcgggtctccgccgggcagcgcagccgacagggacggggggcgcagggggcgcggacctgggcagtgtgccgccgtccatcgcgcctgcatccacccgcccgctccaggtcccggcgcgccgcaggaaggtgcaggcagaggaaccggaggcgacggggaaaactgtggcgccccaagggggcttctggcacggcgccgccaggcaactccccagggcacgcgtcctaggtcgtctggagcccggggataggaggcctagtggtggcaggccgtacgcgccagggagcgtgggacgctcgtgtcccgcgcgtgcggccggactctcccaggtctccgcaggcgcggcgcaggcggctggtttttaaatgtatagataaccctcctccgcgccgccgccgtcgcctttctcacgccctccttccttcgcctcgccctcccgccacgcttcgccctccccctcgcgcgatcacattctgtaaggcccaaagcgtgcgcatgtccccctagcccatcccccggacgcagtccacagatccccagtgcgcccaactggcgaaatctgcgagttcccggtgcgccccctgctcccggcaggtgcttagtgcgcccccaaagcaaggtacgcaggtcctgggttgagccttcccgtacccccaccctaaccccgcgcgcagccccgccagtcccaagagccgccagaccttcgcacgcgcagcgcgcgctgtgggagggaaggcgcggccctggcgacaacacggctgttcgggaggcgcgcaagatccccgggggcagcacgcgccgcgcagcccacacccacgccccaccctcctggggccgaggaggcgggggccagggtctcagccaatcgtgggccacccgtttggccaatcgcgcagggcgcggctccacgcccggccccattgaggaagcgcgtacgcgtggcgcgtggctcacggggagcatcgctaacaaagctgggttcctgctgggccccgccctgctcctcgcccccgcgactgggctgggcgcgctgtcccctagcgcagctatgtcccgagcgcgcccccacctgtgcgttaatctactgggaatgggggtggactgcgccttacctggggcggggtggggcttaaggagtggtcgagactgaggcggggtgggaggttcaggttcccggggcgccttccccaacccgccccgctttccccgtccctccacgcgcaccctgcctgtggtttccgtgcgcccccggcctgagggctctgggcggcaccttaacccggagggcctggaggtctgcacccgaccgccttgtgccaggacggtcaggtccacgccctcccccaccgtggctccctccatctgcagtatcccccacctccagcccgtcctgccctcctgttctccgtctcgcttcccgtcggtgcctccgggatctcacagccctcgcacctcttttgtgacccaggctgtttttctgcacccccctctcccctgagggcactgagattgggccattggcctgaaggtctctgggagcagcacccttccaggggaggtgggacgtcgagaacttctccctaagagatgcggggaaatggtggggcctgagagtgcaaacactgcagaaatgcgaaaaatgtagtgttaacggaagagtttaggtcctgcctcactgtccgggaaacgcgtgccctcgggggagcctttgccaagccggtttttcccgaaggtgaccagatgctcctgggccactgcctctgagacctcagggaacggagatttttgtggacccagctgcctggagctgctttcctgttccggccggaggaggtgaggcccaagacccctcctgggagcctgggggcagatagccagtgtttactgccagcctcggggtgcccacctgctcccattaccctgcaggatgctgctggctggcccacctgggcccccagcacacctgtgtctcgagtacgcctggccctcctgccttgggaggggccggaagagtagcacctgcctgggagctggtggtctgcggtctctatttggcagatgaggaagccgacttggagagaaccctggatgtgtccacagtcactcctccgcccagtggagcgatccaggcagaaatcggggccctgagtctgaatccgggttctgcaaccagggcagatgcgggcttgcctctgctccctgtccctggtctgagagcccattcttcccagatggtcacttggcaaatcacagcctggcatggattgttctgccctccttctgctgcctccctccttccccttgtcaaggctgcaagaccaggatctaggaacgatcctggagccctgcaaactaggccttggaaatccctgctggatttccacctcccgggctgggagcccctcggtcatctgttgctgtgtaaggagccaccaggattttagcggtctgaacaacgatgtattatttctcaggattctgtgacttgatgggtgggccctctgctgctctgggtgtggctgcatacaccccgggggtcaacagggacgagcggtacagcggctgggttgctctctacccggtcttcgtccaagcccctccacagctggtaagatctccggagcaggacctgcaagccctcttcagatcaccccagaacttcctgtctaaaaactgaagcctctcactgcccaggcatgg

SEQ ID NO: 914336 - DNA, 4001 bp, Homo sapiens
tgcctctttcctttctttagagatgaatgaatccttatgtagcgttcctttctaaactgcaccttatagaaaacctggtttatgttttccttaacactgtagagtcacagcactgatctatcctaaacacacatgttgagagatgaggaacatacctaaaatggagaagggaaagcagcttgaagtctaattgtgggcctccatcaaagaaggaaatatggtgttaatttctcagcaggttgatttttcagcatctttaggagtgaggggttattatctgtgcttggcatactaaacacacacacacatacacacacacacacacacacacacaccagtcctaatgtttagggcaagattagataatattggcacttgtttctctacctgaatacagcaaaaactcagcaggctgcactgtgtagtgggaggagcagcccctaagaccagaattcaagtatgaaggtcaggggactagggaaacagcaagggcagcaggggcaggggtgccgggagggaggagtggccagggttaaaggctatagtaagtcatggtgaaagaggctggaaaagaagtcaatgccaggaaaagctcttcttaaaagcgacggggtggtgggatgagataagtgggatagctccaattaaaaatcgaaacagaggaacaggaaatgaaagattccaaattactgaccaaatgacctaagataactaacaaaacaaaaatctctggaaaactaaaaactagccaggattctgtcaaaaagaaaaagttactgagagaaacaagttaggaaattcccaagccaggaattctagagggtaagagagaaagaacgggtatggcagaagctgcaaaatggtggcaaatgggtgtggagcccgtattactgcacttccgacaacagcagagccatattgttgcctgtagttaacaagctggaattaacaggctaccaaaaagtaaagcagatgtcatcaaacctaactatacaaaaatcgttcttttggtgatggttttaccctaaaagaccatttaaacaatatcttaaatcttgacccagatgaaatctgagtaatttgtatatgccacaagtaattaaaactttctaggttttaacaatattttcgtaattcttgaaaaaagagcatggtgtctctggaggcacattgatgagaagtttttttctgttgagcatttccaataagttcaccaatcaatgtactagcatttaaatatgatcaccttttattcaaagaagaaaatttaaggcaacagagtgagaaaatgaaataaaatgcagcaacaaggagaatcaagatagaaagcctagtggggtctggatgtgtttgtaggaattgagtataagtttttaaaagaaagcaacacagattggtagtgctggggctccatggttccagatacagacacagctaacaaacacacctatgttgggaaaatctcagattctgccttagagcgattctgggaaataaatgatgaggtcttaatgataaaattgtaagagattctggatgctctgctgagcataaaagcttcaaatttcagagatataaaagatatgtagcatgtaaaaaataaaaagctacaactgccgatataattgaattatggaatgttagagctagaaggaaacttaaaacttcctcataggttgtgatatgttgctaaggttacaaagctagtagcagagcaggggccagaacctagtgtcccgacttccaaatcaaaactccttctgctcttctagatgatttaattgccagcaaaacctggatcttccattatatggggaataattggtagtttgaaataatggaataatccgatagctgacaaaattcagtatttatcaactgtacctagggattttcttaaaaatcatgttcttattcttccccacgggccactctggagaatagtctcttacctgagttttgtcgtcaggatgctgtattttgggctgagttggacttaacctgatttataggtgatcatttaataacaatatgcaaagtagcttacagttaaacagaactgctcagttctggtttggctgtttttcctatccaatgtgtagatatgacaacagataaccatactaaatagaaaggcgtgcttacaaaactggatacttgtaacaaattcttttgtttaaagaatgtcccccattcttctgggttatatgatattatatcaaaattatttatggagcaatagactcataatgtgcaaatattggccagtattcttttagatagaggttaaggccagaactaggaaggtcaatacgaacttacatcttttttttactttttatttttttaaagccagttggatttagcagtggggactttagtgacacgaatgtggatgttaaattctgataacccagtatcataggaactagccaatacctttttcttaaatagccattttattttttcttcttaagtatacttttatctttttaaaaatataaatattagaagcattccttctctccttatttatttagagacaagatctcactctgtagcccaggctggaatgcagtggcatgaccgcagctcattgcagcctccacctcccgagcagctgggactacaggtgcgagccaacttgcctggctaatttttgtatttcttatagagatgaggtcttaccttgttgcctggctggtcttgaactcctggtctcaagaaatcccacccaaagtgctggaattatagactgctgcaccatgccgagtttaattttttttgagacagttttgctcttttgcccaagctggagtgcaatggcgtgatcttggctcactgcaacctctgcctccaggatcaagtgattctcctgcctcagccacccaagtaactggaattacaggtgtgcaccaccacacccagctaattttgtatttttaatagagatgggttttcatcatgttggccaggctggtctcgaactgctgacctcaggtgatccgcccaccttggcctcccaaaatgctgagattataggcatgagccaccatgcccggccccaactttaatttttaaagcaattgtaggttcacagaaaaattgaacacaaagtagagctaattctcatacactccctgcccccacgtgtgcatggcctcctctgctatgaacattccacatcattatggtactgtgttagaactgatgaacctgcattgatacataatcacccaaagtccatagtctacattagggctcacccttggtgttgtacatttacattctgtgggttttgacaagtatataatgacatgtattcaccattgtggtatcacagaatagtttcactgcctaaacatcttgtgctctgcctattcatccctcctccttctctaaccccttgcaaccgctgatatttctgtctccatggttttgccttttccacaatgtcagatagttgttaattatgcatgtagcattttctttctttcttttttttttttttttttttgagacggagtctcactgtgtcgcccaggctggagtgcagtggcacaatctcagctcactgcaagctccgcctcccgggttcatgccattctcctgcctcagcctccctagtagctgggactacaggtgcccgccaccacgcccagctaattttttttttttgtatttttaatagagacggggtttcaccgcgttagccaggatggtctcgatctcctgacctcatgatctgcctgcctcagcctcccaaagtgctgggattacaggtgtgagccaccacgcctggccgcatatagcattttcagattggcttctttacttagtagtgtgcatttaaggttcttccatgtcttctcatggcttgaaatctcatttctttttagcgctgattattccattgtctggttgtatcacaatttgtttatccgttcacctactaaaggaaatcttagttgcctccaaattttggcacttatgagtaaagc

SEQ ID NO: 914337 - DNA, 4001 bp, Homo sapiens
gcagactttgtagcaataagataccaaattccagcgggactctagtatgacatcacatgacagatagcaagccctgaaagtgaagtattttaccccaaattacgtttcttcgccatatcttgaaatagtcctgcaaagctaaagctatctcttgtggggaaaatctacattctgaagagaatccccttccttttctaggcctttttcctgattcaggagagaatcaactctgataagaaacatttacaatttattctctcaatagactgctacctggagacttcctctgcctaagggaaatcttggtctcctcaacctcttatcttaatgcagacattcccttcttttttcagtttttttttttttttttgagatagtctcgctctgtcgcccaggctggagtgatctcggctcactgcaacctctgcctctcaggttcaagctattctcctgcctcggcctcccgagtagctggggttacaggctcctagcaccacgcctggctttttttttttttcttttgtatttttagtagaggtggcttttcacctgttagccaggctggtctcgaactcctgacctcaggtgatccacccgccttggcctcccaaagtgctgggattacaggcgtgagccaccgtgctaaaccgccttctattaattctatctgcagccacaagtccttatataatccagacattcccttctgtggattccaggtgtttggacaaaactttaaatcaattgttcatcagaaaatctttgaatcttaactatgacctggaaaccactccccctcccccagtagtctcacctctccagatggaaccaatgtatgtcttgtatgtactgattgacatcttatgtctctccagaagcacacattctcaggatttcccaagagctgtatcagaggccattggtcactcatatttgcctcagtataaatctctacaaatattttagcgtttgactcttttcagcacaggtagaaaaattaaatattgtttcttttttacatacttagtttcaccccaaagctcattagattccctaacactatgtaggttctatttattctgaagaaggagcttgacctgactcacattatttactagctgaaaggcacatttacctgcgttgaactcgggatcgtcttccagggcgacgacagctccctctacggcatccacggcgctcccgccctcccggaggatgccgtagcccacggtggcggctctgaccatgccctggtgcactcgctccttccgatccttggagatgggaccggctccgccgccgtggaccactacgatgggattcatgtcggcggatcctaggcagcaggaaggcgaaagcgtcgtccaaagccagcccaaggaagccgcgcgggtacaaggtcctcgggagaccctgtggggacaatgcccagtctctgttctgaacggctgggttcgcagctgggggtgggtaggggcggctcggtcgagcttggtacgaaaagcccaggggcccggcgccctcccgcgttcctctccgcccccggcccggacctgctgggggtctcagtttccccggggacgttaacccgcgcccaccgccgcccgcctccaagccccggcgccgaaggaggatgtctatttcgccttcgggaaaatgtctattttcgtttatttcattcgccctcccgcgtctcgggcggctgctccgggagggccgccgacttacccagggcaccgcaggacgcggacgccgagacctcaagctgggtcgagccagccccgcagccgcccggtaccgccgctccccgacgccggctcgaaaccgctcagcccgcaaccgctctggtcacaacggttctgcgcctgcgcacgagggcgggaccgccgcacggcccagttcccataaagccccgaaggccggctggcgcgcacctgtctcactcctctcaagagtctacgctcttggccggcccgagcttcctggtggcacgcggggaacctcctgctcctgaccaggctaggggctgggtggttgggttggtggcgagaagcgtgaagtggcatgccacgattttgtaattgcagattgaaaagcaacgctaggctgtgcgcagtggctcatgccttgtaatcccagcactttgagaggccgaggcggacggatcacctgaggtcgggagttcgagaccagcctgaccaacacggagaaaccctgtccctactaaaaacacaaaattagctgggcgtggtggcgcatgcctgtaatcccagctactctggaggctaaggcacgagaatcgtttgaacctgggaggcggaggttgcggtgagtggaaatcgcgccattgcactccagcctgggcaacaagagtgaaactccgaatcaaaagaaaaaaaaattatactgggacaatgggcataaacagggacagatccaggcaaactgtgattgatctcctgtggataggagagtcctttcccttcttgtttacccacaactgataacatattttaccactcttgggaattccctttactcctgttttaccttcgtttcctgccttaaggcccagtttaaatgaacccctcctgcaaagccttctccctggcaccccactaaggatcagtcattccctttctagtgacctattgttagagattaccacaaatttattggcttcaaacaacacacattatcttacagttctggtggtcagaaattcaaactgggtctgcagggttgagttccttcgggaagctccagaagagaatctgtcttttcttgcttctacaagctgcctgtatccttggctcatggcctcatcctccattgccaaagccaacagcctagcatctttaactctctctccctctggcctgtttctgctgctacgtcacttctctctctgtcaccatcatcacgattttcttttctgactctgactctcctgcctccttcttaaaggaagtcccttgggatgacattgggcccacccagataacccaggataatctccctttcttacaatttctattctcatctgcaaagtcccttttgccatgtgaggagtgttcacaggtggagattcggatgtgacacctttgagggccgttattctgtctcccacactcacctcttggaagagggttattttagcacgtctcaactggtcgtgagcctagttgtgtcatcataatacagctcaccatcatttggtttcagctatttataggaacctgaaccctaccctatgcctagccctaactcaaaccccatctctactgtttttcctgattgatctggaattcagtgatctggctgaggctggggaaggtggctggtggcccaagcaggtagaatgttggtttccatttgatcctcccatctcagcctcatgcgtttatctacttctctgatgggcttcgtattccccatcccaatccaaagtctcttagataaattctctagaaaataaacttctggtctttgaggaggaaagaggaagcatctttttgtccggctctgtgggataggagaaggaatctggctaactcctctgtagacgatgttccatcaacaatcattttatggattaaggattgtattcaactgtccctgacgaaacgtgaccacagtggtttaaccagataactgttgatttgaaaacaacaataacaacaacaacaacaacaacaacaacaagacatctagtggttgctgcccaggctggtgcagcagctccaaggtgacacagatgtcccatctccttctcttcccttcagcatgtggctttcacatttatggtgctcctaggcaccttgatcactattggggcagaaggaatggggaagggcaaagggaagaaggcttttgccagctcccctttgttcctttaattcaggaaagctctctagctttcctagaagtcctccaagtggacttttattggccagaactggattggggggctgcccctagtggcaagagagtctgagttt

SEQ ID NO: 914338 - DNA, 4001 bp, Homo sapiens
tttaaaacccaaactttagaaaggtttgattccctctgggcagcctcctttgcattcctcctggctacagtacctctattctctcgcagaatattttcagtttttattggtttccacaatttgataggaagcaatgaccagcaactctatgcactctcctccactaagcacatgcaggaaaaatgacggtttatgtaaattcatcttacttagctccacaccccatgttggaagttactttcgaatattccacacctaaagttcaagtaaacttccttcgagattaagctcctgggccggactctgtggcttatgcatgtaactccaacactttagaaggctgaggtgggaggattccctgagcccaggagtttgagattaaagttagctatgaaggcgccactgtactccagcttgggtaacacagcaataccttatctctaataataataataaaaattttaaaatctaaaaaactaaaagacttctcctgagctgataaatggagagttgaaaacaacaaaaaaaaaacctcataattgagctggagccactacatgcacacatgaaaaggactaacagtcataaaacaacacacaaaatctggaagctaatttagtgtaaaggaagagcttgttgtttcttattataatacatctcccactaaaggtgtccaataaattctatcaccttaggagatgagttttaaactaagtgtaatgagaaaataggtaattttttaaaatctcttttttctttttggctgcggggtggccagagaacgaagaaataccaaaagtgaaatgctacgctgaattgaccaggctaactgggaactcactggaaaagtgaaaactgggaagaattagtgatgagctcaagaaggtgcttagccacttacccagagatttatttaatgagaatggatcacaggtttccacaggtcgttccactgccagtaagaagacagtcgtgaaccatgggtcccttttttcactagtcaacagtcaccctcacctacacgcggagtacatatttggcactcagcaaatcttgattgaatgaaaacctacctcactcatattggcacccaaccccggagttatggccccccaaattacctccaaaacgcctgacgacctaacccaaggagctgaaaaagtggagaggaaagctctggggtggaggggattctctgccaaacaagcaggggccaacggggcctagaccaactcaacttcccacagaaaactcaggggcccaggggattgaaccgtggctaatcccttctacttccacgaagcagcagccaaggggccgcagatccacagcctcccacccgggggcgctgagagatcttggggtatcccccgcaaaagttagtacctgcgaagctgcggcacaaagagtggttccgggctctcattacggaggccgggacctgggaccgaccagccgcgcctcctggctgagggttccgcgctccggagctgcagtgaccgtacacgtcgccgatagacacctaaggcttcagaagggtcctggctcgcaggccccagacgttttgctcctaagactccgcgagttgtcgcacccacgtcgactggcgctcttcagtgcttccctcactggttaagcggtcactcccgccttaagcccagcagccggtcgcttcccggcgccgccatcgttagtgtttgttttcatccgcttcggtaatggccggggggggggggtgaaagagggctacgggggaaatccagatgcctaaccttagtcgcactttcgctacagtacggacgccctatttattcttttagtcctcaaaatatccataaaagttgattttcattccacgtaagctttcttctccaatctttctaagctactcaagataaaacaaagacggaaaggcggtgtttgagagagagagagagagaccgtttgggccgcgtgtggaatgtgcggagatgaaccgcaggtagccgcggcagcggcagtgagggcgcggcgcggggcgggcgctgacgcggaaggggcggtgccgctgttgcgcgccgtggcggcctctgtgcagtcgccggttccggaggagggcccaacccggctgggtgggtgggaagtgtggctggtaacctggcagccgcggagaggtgggtgacgggcctgggctaactgagtggccggcgcaatcagactttgacatccgtttttagggtgccctttaaaagtggcagagtcgcttcccaaacctggttcggccagcctctttttcgctcccgacttccaatgtgtctggtcttccgtacttcctggccctcaggttcacgatttggagttcttggagtgagggaaaagccttttgttacagcacacagtgtacgtccataaggctgggttgtggactttggttgtttttttttttttttttttttttttttttttgccccttcttttcttgttagactggtttgaacaccccagcatctgtcctgtatttgtcaggtgaaaccagaagtctttggataatgaaacccgtgaccaattcttacccaaggtggttatgacatatgtcagctgcttcttggcctatatagttagaagccgacctcttttaccttgtgaataattatgtcatcacctccattattcttttggtgttctcaattgaaatgccaagcattaaatgagccacaaagattgaattcccattatccttgaatcagagcaagcctgtcgtgcagccatgagttagtggagaaaaatccggagttgtaagtacagtacgttttgcctcaacaaaatggaaatttgtagaaaaggagctgctccagcctttgagtcactttaaagtctttggtaggttcctaatgttttttcttttaacatttacagagagaagattataaatggcagagccatttaactgtggttagctgttggattctgatactttcttaaaaatacgttcttgcaccaacatcttcattgggaacagttcagaaaaagcaaagaggagagccaacattcacatttaccatggctataccaataacagtgcttgactgtgacctcttgctatatggccgtggtcaccggacattggaccgttttaagctggatgatgtgactgatgaatacttgatgtccatgtatgggtttccacggcagttcatttattacttggtggagctcttgggggcgaatctttctaggcctactcagcgatccagggctattagcccagagacacaggtccttgcagcattgggtttttatacctcaggttccttccagactcggatgggagatgccattggaatcagtcaggcgtctatgagtcgttgtgttgccaatgtcactgaagcacttgtggaaagggcctcacagttcattcgctttccagctgatgaagcctccattcaggctctgaaggatgaattctatgggttggcagggatgccaggggtgatgggggtggttgactgtatccatgtggccatcaaggcaccaaatgctgaagacctctcctatgtgaaccgaaaaggcctgcattctttaaactgcctgatggtgtgtgacattagagggacactaatgaccgtggagacaaactggcccggcagcctacaggactgtgctgtgctgcagcagtcttccctcagtagtcagtttgaagcgggtatgcacaaagatagctggcttctgggtaagtttgcaagtgtgaattttcattttgtttggaggcatagaaaagttatgtaggctgggggcggtggctcacacaaccccagcactttgggaggctgaggcggtagatcacctgaggtcaagagctggagaccagcctggccaacatggtgaaatcttgtctctactaaaaatacaaaaattgggcatggtggcaggcgcctgtagttccagctactcgggaggctgaggcaggacaatcgcttgaacccagaaggcagaggttgcagtgagccgagatggcgccattg

SEQ ID NO: 914339 - DNA, 4001 bp, Homo sapiens
tccctgcctcagagcaaggcttagccccagaaagtgatgaaataaaccgagctctacctgtcaatggcctttggcaagtcacttcccctccaagggctctagctttctgcacttaaaaataatccccagccgggcgcggtggctcacacctgaattcccagcgctctgggaggccgaggcgggcggatcacgaggtcaggagatcgagaccatcctggctaacacggtgaaacccccatctctactaaaaaatacaaaaaattagccaggcgtggtggcaggcgcctgtagtcccagctactcgggaggctgagacgggagacaggcgtgaacttgggaggcagagcttgcagtgagcggagatcacaccactgcactccagcctgggcaacagagcaaagactccatctcaaataaataaataaataaataatcccaacttccccagccctggtgtaaggtacccccaggccagaatagaaagtccttgagcaattatccagccgacattctggaggttggtggtttgaccctggaacaccctcccccatcaacagtcacttcctcttttctcaccagttccaggggagggtggggtggtaagtccgggcctagctccctcctcatcaacttccttcccacactcagtgccctgtcaccttgactgaggccctgggcctggcctagttctcatgaaaaccccacctcagcccccagggtactgcagcacccagcaaacctaaagaaggtctctatacccaattaacaagtaagaagactgaggcttagcgatgtgatctgcccaaggtttcaagactggcccttcagtctgatttcagccctccagatctctctagtccctcagactcacagctccctgggtcggggcggggggcaggggttgggggggcggtgaccccctccctcaaactggacggttccactgtctgtctgagcagtggagaagtgtggctgctggaggtgggggctggcctcgcaaccctgaaggtagaggaccagcagcctggaagcttgcagagaaattttcctggctaagagcagatttgattgtgggggtttggccaagattagccccagtgagagagccgcagggattgtggttagacttccaaccacagacatacaatcgcaggcggccagaggtgcgacacacaggcacacctgttcatcccctcttgaaatgccacaccctatcctgaccagctgcccagaaacaattctgagagtccgacttcgctgggctcagccagcatccaccagcagcccggggccccctgatgccccctcaggctgggtaggctgacagggaggtgttccataagcctgtgccagcgtcgcctgtcagcggcagagcctgagatgcacagcctcctccttagaggttccgagtgtcgcccctctccggatgggccaataagtggctgctctggacaagtcccgcgttctttcactgcgctaccgagactaagtgcactgatcaagcccctaccccggggactgcccgggtggggaggcaaaagagaccctgcaaaaccaacacccgaggacgcacttgcgtctcggaagcccagcttgtgggaggcagagcccgtcctgaggggcgacgagggcagggggaccaggaggggctcgtccaggttctaaccagagcctggatggcaaggggcggagtcctggcagtcgggatgggcgtaacgcacaggctcaaggcataaggcacagcgcactcgggtcacaggcggaggagccagccaaaccctctccccgcgcccgtagccgcgtcccctcagccgccatcctctcagcaccggggcgcactcacaggccggcaccagctccaggaaaagcgccttttgcgtacggtcccgaagccgcagctgccgcacgatgtggcgtttccagcgcgctgcgggggcaccggggacgcccggccccgccatggccgcgctctcccgcctagcggcgcgttcctcccgcccaggacggcgccaggccggggcggggcctcgcggggactccgtgacgccagggggcgggcggcggcggggaatccccggcttgtcccaagagggctttggcggggaggaccgaaggccgacgccgggaggatctgcctccgggaggagccgcctccgggtctgaaccgccggggccccgtccgaaatgttcacctaagtgggggctcctgtggctgcgagggtcataagcaggagcgaggtcggagcctccggggaggcttcccccacgcgggtggagcgctccggaggcggggccctcaaggcccgggtgtcttaaccccgccgcgcccgggccgagttcgagagccgctggtgcttcccaggccgtcgcgctcctggccgcgcacccagccagggacccagaggccctcagccccgggctctgcgcgtacactgagggcgcggcgcagcaggacagcaagataaggaagcagagactgaagggaggaatccccgctttccggggatgatggcgttcgagttgggtctgtgagggatgaaataggagttggccagagggagagagggactctaggcctcgagaagagcacgtgcagaggttccgtgacacgaaaacgccaggtgggtgcggggctgggaggacaggaggcagaagggtttacggctccacatggtcgccgaaattttaggtccctgagagtaaaggggtgcagctgatttcatctagaaagcccctggccgggaggagagaacgagcttgcttgcctggggttgcaaaggagtgggtagctgagacggccagcaccccagcatcctgactcagggccagacgcttcaccccattgggcggcgtctggaggagcagacacatctcttgtgggtaccctcgaaagtgaatcatgggtcgcagggaactgtggtcaaaccgtctctagctagatgctagagagccagctctgcaggctcaggctactgtgagacacgaaaggagggactcgctgggcacagcctcaccctggggcatgccagcaggccctgccctctgagtgttggcagacttgaacatccctagggaacgagagaagttgggcaacgatgggagagcagtgcaggccctggaggtgacgagtctgttgagattctgatggggatgggtcagaggacgtagaaagcagtgaaggcctagacgcccccaggtcagtgtagcctgctctgcttccagtgagctgggctcagtcccccacatgtcattgtcttagacgcccatggcctttgcacaggccgagcctgatgtttggaacatcgtcgcctctagggggcctggctcctaatcatgcatcacctcctccaggagaactttcctgcccctacactgagttcaagcttctcagacaccagccccagttgagttcgagttataaccgtcaccagttatcacaccatcctgtaatctgtgcggtgccccttagggcaggacctgggtcctagatgtctctgtacctctagccccaaaccaggcctgacctgtctcttgaaggagtatttgtgttgaagatgggtggtaacgttcagcaaaagccatgcccaggagacaggcacagtacccatggagacccagggccagctgatgacagtgatgaattccctttagaactggcggactcttgggtgcttggagacactatataaataaggaactctggctgtgtgcatgggagagtatattaacagggcttggcctggctgtgaggtgcagagatgccgtttctctcaggtaaggagccatattggggcaggggtttcctaatccttttttgactcacaaaatacacctaggaaatgttaaataaatagtcatttttgagtagtatatgataaagaagtgattgattttgactaaaaatattcatgttctatttttagaatatgaaagattgtattataaagatcacttgaaataaaattttagataatatatggagacaaatttctgctttttac

SEQ ID NO: 914340 - DNA, 4001 bp, Homo sapiens
gctcctggagggctgtaccccacctgcctcccccgtcaccccaggtgccacccagaaagggcctcagtaaactggttggatccaagaataaaaaagcacatggcagagcagatgggagtccaaattcctcacccagagacccacagctcgggaaactgaggcctagagacaggactaatctagtcacccagtatacaacagggactgagactgggatgcgggcctctttcttttcatgccacttcagaggccccagatactcagtttctttgggggccttcaaggcggggcctgcaggctgagctgggagggaggaggggctggttatcaagaaagcgcctgcattccaccagggccctagagaagccaattcaatccccaacaagagggcagggaacaggagtaggggcgttttctggagctgaaagtaaaaaggggaagcctagggctgggtatggtggttcatgcctataatctcagcactttgggaggctgaggtgggaggatcccttcaggggttcaaggctagcctgggcaacatagcgaaatcctgtctctataaaaataaaaaaggggcagcctagagacggccttagaggctgaggctaaggttagaggtcagagagggcttcctacaccagaattcacagacagcaggccactggggggtgcccccagttcagggcccacgattatcctaccccacatttgctcaccagggcctggcctacccccaaagcctagctcttctgcccagattagcagccccctgagtccagccacaaaactgagaagtccctgcctccatgcccacccctgctgctctggacctggtggatcgaccaggacgcgcctctaattggtggctccttcaaagctccccaggtcagctgagctgtgagtcagggctcctcaccgttcccagcctcaagcctctgaccttacacctcttggcctccctagcatctcccttggcctcctcccggcttgaagccagatctccccacctttcctccagggcctccctccaggcagggacactgagccgggggggtcggtgggagatgtaggtgggggccatccagtccctccctagacacccacttggcccatcccactctcccaaaagcaggaagtaggcagcgacccaggcacacgaggtgttgatcaacactggtactgacgtactgacgcggttgttgacatacacatccggtggtttgttgatcccacctacgggctcaggaccgtggggtcaagaggtcagggcacatgatccacaggtgtcctcgccagggctccggacccctaccagcttcccccaccagctgcgcaggcccaagtctgtcactgccctggcccagctcagttcctacgctccctccccagcccctcctcagcccgagagccaacctccttaactcagcccccaaactcgacgagtttgtcttgcattctccagacaggtgatcttgccctctccagcctcagtttctcctcccgtggagacagaaaccccttcccgctcagtttctggctctggtaaggaactgaagaggccagccggggtgcctctgacgcctggagagggcaagattcccctggcctctctacgcccggtgcctgatcccccagcccgatcctgccgcagggagcctcaggtcgctgcgctcccaccctccgcaccttcctggactcgggcctggctcctcacccagatttccaggtggatgtctcgcagggcaacgctgcccttgtacagatcgaggctgagctggtccaggctgaggtgctcttggaagaagtgacctaagtagtggtgcagcaagtagcggcagacccgctctttcacacagtttgaccatggccacagccatcgtgacatctcggagaccgccgggcctgggccgcctccgcttgccgcccgccggcgatccccgtccggctccgctgttcactagagcccccggctcgccccgccgcttctctaggcgccaggccgcgcctccggacgcccagccacgccccctacgctcactgtcattggctattgcaaagggcgaggcctactgattggctgcgcggggcggagccttcgggcgcgaaaaagggactgggctctctgcatgatatagggctctcaatcatgatttacgcttgcgtaaagtactgtgtgggaggacctttaacctcccctctacaggctctgggaaggctgttgctccaggtgccggcccctcaaaggaatgcgcatgtgctgattcgtccaaccactttaagtggttggggaggatttaaagggacagtgtcccatcaaacttcgtagaagccttccccagaggagtaaactcagtgcgcgatcttaagcgcgcatctgtggaaacaattaagtgagtaaacattcgcattttgcaaaatcttttaccatcctttatctcattgagccctcttaataatcgctcaaggtagggattattgccaccgctttacaggtaagaaaacagattaagatacgagaaagaccctgcctcaaaaacaaacaaaaataaataagggctctgaatccatcaccaaggaaggtcttttttcccctcctcaccccggaatgctcagagggagattaactgaccctcccttctctctgccgtcggtcaggccttaggcacctctctgaaataataatagcttttcatatctctagtcctaaaatcaaagaatggattctgcctcctttaagcaggggggcattgtttttgtacggcctttgagctaagtatggtttttatgtcttttaaatggttaggggaaaaatcaaaagaagaatgaacttttcatggcatgtgaaaaatcatatgaaattcacattccagtgtttatacataacgttttagtgtcacacagtcttgctcatttgcttaagttctgccccgggctgctttcttgctacaagagcagaattcagtacttgagacagaggcctgcaaagcctaaaatatttattttctggcccttcacagaaaaagtttgccaaccgctgctctgtagggggcagccacacaaaacctcttacatcatgggcgacttcaggaacagccataggtaattatgtttcttttcttttctttttgagacagactctctctgtcacctaggctggagtgcagtggcacaatcttggctcactgcaacctctgcctcctgggttcaaatgattctgctgccttggcctcccagagtagctgggattacaggcatgcaccaccgcacccagctaattaccgtgttgggcaggctggtctcgaactcctgaccttaggtgatcagcctgccttggcctcccaaagtgttgggattacaggcacgagccaccgtgcccggcctatgtttctattttatttattttttttgagacagagtcttgctctgttgcccaggctggagtgcagtggtgcagtctcctctcacgcaacctctggctcctgggttcaaggaattcctgagtagctgggattacaggtgtgagctaccccacctagcctgtgtttctattttaatcttacttgggagctggactcttacattctaatgccaaaactcagcctgaagcaagggcaaccgccctggcccaccgggcagggacctgtattccagtcccacccatgggtggtttcttctcctcttgtgaccctcagttttatcctatgtaactggggttgggttagtaagtggagatagttcattacctggaaggagcaggctccattcagggaggcaggctgataggacagccattcagaaagtgcttatgggccaggcacggtggctcatgcctgtaatcccagcactttgggaggccaaggcgggtggatcatgaggtcaggaaatcgagaccaccctggctaacacagtgaaaccccatctctactaaaaaatatttaaaaaattagcagagtgtgatggcgggcgcctgtagtcccagctactcgggaggctgaggcagg

SEQ ID NO: 914341 - DNA, 4001 bp, Homo sapiens
ctggtgctgggtgtacagtgctcacctggtcccagaagacgtggccccagtagcattcctcacggctcccattggagaggcccccaggactgaggccatggcagatgtatcctggggccttgggctggggcagggcactgagcaggtagtagagggagccacgcagggcctggcgcagctgcaggggccccaccacgtccaagccacattctacccagagctgggcccaggcctgtgcgtgagccgtatacagagctcccctggcctgcagctgcagggcctcagtgaggcaggcctgagcctcagcctggctgccgcccactgctgtcaggaagtcccacgtcctagcctcctcaccttccccaagggtcaggtctgggggtgctggtgtccacagcatgtgtacctcttgctgtggccccccgggctgctcaggggtgagggtgtggccatacaggtacctgtgagagcgtggccatgcctcagggatgagctccctccctggactccctggctgcaaatccagccccctccttaccgggctccctggaagtcaggaccctgatgcaggtccaggtctgggctttctggggagaaggctgaccgcaggagcagcgtgatgggcccgctccccggggccaggcgggcgatggacactcggaaagccagcacgtggggcagcgtgcgatgcgcatagatgcactgggaggcccggaagcgggggccctccagggtgtgaagaaaggagcctggggaggcagaagcgaaggcaggtgggttgccaagctatggcctctctggggcaggagtggaccacccgaccgctgcctctccccacaatgaggcggatccctctgggccctcggctgctcgttcccgctacagctgcacaggaggcctccaggtggagggaaggggggaccctgcgggcctctggggcctcctgtcttagtgagacttcctgtgtaaactcaggaggtgctggtgggattcgatgctgtggttgccccaccgacctggaacaatgcctggggcaggggtgaggcaggccaggtggcgctacctgtgttggtgtccagggcgaaggtctcggtcagctgctcccccatccctgcaggggcctccagccggacgttgagggggctgggcagcatggcccggtgcgtgtccccgccagccccattgtacacgccgctcacgtgcagcgtgtcgtgaaacactcgtgtgcccaggtatgcgttggtcacagtggccaagagacgggggtcactgggcagagagtgggcagcaaacgtggtggggtcctcgccggcgtcctccatggagctgctgggcctgagcggcctgatggggtgtcaggggccgcgggactggctgggcctccctcttgagaccgtctgtaatcccctgaagcctccctcagaactggggggagttgcggaaccagctgggcagccccgattttcctgaggcccctcctagacggggcctcgcaggaaaggagctcgactctcagaggggctcagaccccaaaggttgatctccaggaacccagctgagcccctgagtgtgtctctccctcctgctaccttagaattccagtcctaaccctgctttccaaacgcaccccccacaaccccggtcttgcccccaccctctgtggtcgggacctgcgtctgttggtggcacgtgggggcgggcgtgtgtggagggtggggggagcgctgggcgggatgggggagggagtccggggctgccggggcgccgggcgggtgggggtctcgggggtgtaggcggctggggcaggcgcgggtgggggagggaggatggggcgaccgggggctggggggacgggccggggcggccgggagctgcggggcgggggcctctgggactcaccgcagccccacccggtcgccgggcgccagcgtgggaacctgtgtccctctgctccacgccagggccgggaggaaggaggagccgcccggctgccgcgccaccaggaaggtccgcggtccccgccccgagggcccgggcggtcgctgggaggcgggggcggtccctgggcggcgggggcggtcgctgggccgggcccgggggcgggacgtggactcgcggccgcggccccggctcccctcggtccccgctggcagcggccgcgtgggtcgcgtccgggggcctggcgttccctgcacgaagcgccctgagtgagcaaagctcgagcctggaccccgagctgcgtcccggggcggctgtgggtggggcccgcgggccgggggttccctcccgcgcctcctccctccgcccgcgcccccggccgcctccacctgggtcctcgcctcgctgtcgcccgagggctcgggggcgctccgaggccagcgagactccagccccagccggcgcccgggttctcgacaccgtccggagaaagaactcggggtcgggtcagaaggaagcgagaggctggaagcgaagcgaaggcacagacccgccgcgctcggcggagcttgggtttcctccctggggggcggaatgatctttagggattctggaaacgaaggggacttcagggaaccccggcccccgccgcgcctgccccttctcccttattgggcgttttgccgggaaggctcatggacgtctcactcgcacgggtgtttggccgttttctcgctctcgttttgggttttctgttaaactgcggtccctttgcctcggtcctggtgcagctgctgcttgggttttccatcctcctgagaccaccggtgcaattcccaattcccatctcaacgccaccgcccacccggacgccgctgggctcagccctgggcccgctcgtcccggtatctcacgctccctgacccggcctcaatgtcctgaccactcggtgcagccggagacgccggggtccagcacgtgctcggaagcctgctgctcccacagggtccccagcacaggtgaggacgactccgcccgtcccgctgcccaggccgtgagccccggtttctctctgtcacccacacagcatccaacctatggacaggtcctgtggctccacctccaacacgccgtgggcccacacctcctcctggagtggctcagtcgctcccaacttacgcctttgttgagaacagaacccccacaacatttaaggcaggccctgcactctgcccagaaggcagccatggcgcccaactcacggaggacgatccaaaagcgctcctcacgcaagctccacccggcgcaaaccccctcctgcaactgcctgggttccctgacctcatctcctccccctcccctactccgctgcggctacctggcttccttgctgcttctggaactttccaagcacgcaagctccacccgcaaaccccctcctgcacctgccttggttccctgacctcatctcctccccgtcccctactccgctgcggctacctggcttccttgctgcttctggaactttccaagcacgcaagctccacccgcaaaccccctcctgcaccttcctgggttccctgacctcatctcctccccctcccctactccgctgcggctacctggcttccttgctgcttctggaactttccaagcacgcaagctccacccgcaaaccccctcctgcacctgcctgggttccctgacctcatctcctccccatcccctactccgctgcggctacctggcttccttgctgcttctggagctttccaagcacgcaagctccacccgcaaaccccttcctgcacctgcctgggttccctgacctcatctcctccccctcccctactccgctgtcgctacctggcttccttgctgcttctggagctttccaagctccccgcctggcttgctctggcagcataattgcctgaagccctttttctcaagacctctttggggcttgccccctcactccttcgggttttcaaatgcccagtcgtcagttagacttcctcagacccccgtttcatgcaacaggaaaccctgcgctccatcca

SEQ ID NO: 914342 - DNA, 4001 bp, Homo sapiens
gagcgcctgtaatcccagctacccgggaggatgaggcagaagaattgcttgaacccaggaagcggaggttgcaatcagccgagatcgcgccattgcactccagcctgggtgaccagagcaaaactccgtctcaaaaaataataataaaacaatgtgctggactactgcaatactgagatccttctcagccaagtgtttacaggtgttagagcggcaacaggaatttctggagtacaagctaatctctgtgggaatggaaaaaaaaaagcactaatttgaatttcagtacctatgttgcaatgctaaattcttgacagggattagtactccgtaggttatgcttcttaaatctccaaaagtaagccaatatgtgaaatcgtacatttttggtccgttattctaagactgacaaaacgttccattgcttcgtatttgaatttgagaactgagactcatttaaaaattcttcactgttcttttcctttttgctcttcgatttcgcaagtgaaacggtcatttcaacagcacacacattacactagaataaagccaagtaaaatgacagactaaatcagatccgtgaatacacggtgactccttatttggtttttaatactttcactatgtttcatgtcttcgggaaagcaaaagaacaacgtactgtgccaaaagcactaacttacgaaaaaccaatttagaccaattctttacagcgttaagtatgggttgaaaaccaactttcctaatacttgtggtcagtgcctcaaggtcgttaggataaaaataaagcttccaagacacttcgcagccttccagcacttccagaaaggccaaataaaccagcattcaccttcccgctccatccaggccccgattctccgaccagagagggcgctgagtgcccgggcacggaggggcagcgccctggggcgcccggctctgcccagggcggggctcggcggggccgaagctccggacgccgcccacggggaccaccggcccttgggccgcccaggggcagctgcagcccaggggaggagctggaggagcccccggcggcaccagggcccgagccctgacggcggccgcccccggccgaaaagtaaggaaggtgccgccctcgctggaccagctgggcccgaagaggggcccccccaccacaaattcggaaaccgagtgaccccggcgagggacgcgcggtcccagccccgggacgaggaagggcggcggcgcgggcgggggttcttttcagaactacagcagggaaggcggcgggggtggccgcggggcgatccagggaaaatcggcgcctcacctgctcctcttgaggcagctgctgccactcgctgaggggacaacatggagcctccgccttcaaagcagaagcagcaggggtgcagaggagagggacgggtgcgggcgggaacgaaccgggccctggaagcgggaaacgggcggagcctgggctctagaaaaaactagccagaaggtggggcacgcggagccgcgacggagcgagcgcagcgcggtctgcgtggcccaacggacagcccgaggcgtggcgagcgcaggacgaggctaggcgaggcggggcgggaaagcgcacgcggcagaatcccgccaccgcctgccgcgtgtgcgcgaagcgagccgccgggtacctgttggcggggcgctgagtgctaccgtcctttgggaattgtagtcccgcgctcactgggtcccggccagcggtcctcatactgcgcactcatctggggcggggcttggcgtggttctccgacgactgaactacaactcccagcaggctgtgcgggaaggggcgggctggctcgggtcctcctgcgagctgcggccggcgcctaacgtgcagaccaggccccaggccgaggctttatcctggaaccaccagtgtgagagacagctttggtgtttaactaggcctgggaccacaggtgggcagaagagaggcctcaaccctggatggcatgaacgtcactgggtctttaatgattttgacttcataagggcaggtggccgtgacttcattaccacctttattatcatctccctatattcctgtccctggccatggctgatgcgcaccatcaccgctctgatagctaatgtaagaagtccaggccgggcgccgtgcctcacgcctgtaatcccagcactttgggaggccgaggcgggtggatcacctgaggtcgtgggcgttcgagaccagcctgaccaacatggagaatccccgtctctactaaaaatacgaaattagccaggcgtagtggcgcacgcttgtaatcccagctagtccagaggctgaacaggagaatcgcttgaacccaggaggcggaggttgcagtgagccgagatcgcaccattgcacaccagcgtaggcaacaggagcaaaactccatcaaaaaaaaaaaaaaaaaacttgcacgcacatcccagcattctctgctccttttccctgcattacttttctccaaaagacttcataccacttggccaggcgcggtggctcacgcctgtaatcccagcactttgggaggctgaggtggttggatcacctgaggtcgggagttcaagaccagccaggctaacatggtgaaaccccatctcttctaaaaatacaaaaaattaaccaggcgtggtggcaggcgcctgtaatcccagctactcgggaggctgaggcaggagaggttgcattgagtggagatggcaccactgcactccagcctgggagaaagagcaagactccatctcaaaaaaaaaaaaaaaaaaaaagacttcctgctactatctgacttatgttttacctttcattgtgtttgtctcttcccactgaatgtaagttccaaacagataggaatttttgtctgttttgtttacttgtatatccccagtccctaaatactgctggcagataatagagactcaaatatctattgaattaatggatgaagaagatatatgttacatctaacactgctcactcactttctggttcctttaatattaaatacctaacttttactattgaacaaaataccctagtttattttaagggctccccagagattcactgaaatccaacttctcaggaagtgaccagcaaatactgatatatgtctcaatattacatcatcaaggtatcaaggtcaatgttagcacatcagcattgtagcccttgtagaagcttttggcatttggaacaaaacagtacaaattataggtggacttaaggattagtcacaacttagaaagcaacccctgtaaatgagaaacatgttttgtgttatttccttctcaaatatccagggtcatcaaaacactggacattgaaagtgccaaatattgacaatactggttacagcctgccttcagctatctcactctgaattgagttatgtgctatgatcagaggttgagcttcccttgaggttttccagaagtaggtgacatgtagacatatttgagtggacagactactggctttggggtcagacttacctggctctgatgttcactagctatgcaaccttgggcgagctacttaacctctctgaatccatttcatcatctgcaaaatgatttaaagacccacacggttgttctaggctaagtgagctgtgtgtttggaaatgatgactgcgtggttagtgatcaaaattagtaatcagcatattcattctggaaaagcaaaataaagtcataaatattcaagatactcaagtggtttatgaaacacaaaaatagcaaaattgttttctgcaatggcatccaccatgactcaggttccaaagctttccaaaaataggtcatttgttatatgccaggtaccgtgataggccataatgctgcataagacacattcctatcctccagagactcgcagtcctgtgggatagacagctgaggaaatatcattcactgtgactgtactgggacacagttcagctttctgccctctatgtgcaggatcattatttaag

SEQ ID NO: 914343 - DNA, 4001 bp, Homo sapiens
gaggtcaggagttcgagaccagcctggccaacgtggtgaaaccccgtttctactaaaaatacaaaaaattagctgggcctggtggcggatgtctataatcccagctactcgggaggctgacgcaggagaatcatttgaacccaggaggcggagggtgcagtgagccgagactgcgccactgtactccagtttaggtagcaaaaacgaaactccgtctcaaaaaaaaatagccgcgcatggtggagagcgcctgtaatcccagctacccgggaggatgaggcagaagaattgcttgaacccaggaagcggaggttgcaatcagccgagatcgcgccattgcactccagcctgggtgaccagagcaaaactccgtctcaaaaaataataataaaacaatgtgctggactactgcaatactgagatccttctcagccaagtgtttacaggtgttagagcggcaacaggaatttctggagtacaagctaatctctgtgggaatggaaaaaaaaaagcactaatttgaatttcagtacctatgttgcaatgctaaattcttgacagggattagtactccgtaggttatgcttcttaaatctccaaaagtaagccaatatgtgaaatcgtacatttttggtccgttattctaagactgacaaaacgttccattgcttcgtatttgaatttgagaactgagactcatttaaaaattcttcactgttcttttcctttttgctcttcgatttcgcaagtgaaacggtcatttcaacagcacacacattacactagaataaagccaagtaaaatgacagactaaatcagatccgtgaatacacggtgactccttatttggtttttaatactttcactatgtttcatgtcttcgggaaagcaaaagaacaacgtactgtgccaaaagcactaacttacgaaaaaccaatttagaccaattctttacagcgttaagtatgggttgaaaaccaactttcctaatacttgtggtcagtgcctcaaggtcgttaggataaaaataaagcttccaagacacttcgcagccttccagcacttccagaaaggccaaataaaccagcattcaccttcccgctccatccaggccccgattctccgaccagagagggcgctgagtgcccgggcacggaggggcagcgccctggggcgcccggctctgcccagggcggggctcggcggggccgaagctccggacgccgcccacggggaccaccggcccttgggccgcccaggggcagctgcagcccaggggaggagctggaggagcccccggcggcaccagggcccgagccctgacggcggccgcccccggccgaaaagtaaggaaggtgccgccctcgctggaccagctgggcccgaagaggggcccccccaccacaaattcggaaaccgagtgaccccggcgagggacgcgcggtcccagccccgggacgaggaagggcggcggcgcgggcgggggttcttttcagaactacagcagggaaggcggcgggggtggccgcggggcgatccagggaaaatcggcgcctcacctgctcctcttgaggcagctgctgccactcgctgaggggacaacatggagcctccgccttcaaagcagaagcagcaggggtgcagaggagagggacgggtgcgggcgggaacgaaccgggccctggaagcgggaaacgggcggagcctgggctctagaaaaaactagccagaaggtggggcacgcggagccgcgacggagcgagcgcagcgcggtctgcgtggcccaacggacagcccgaggcgtggcgagcgcaggacgaggctaggcgaggcggggcgggaaagcgcacgcggcagaatcccgccaccgcctgccgcgtgtgcgcgaagcgagccgccgggtacctgttggcggggcgctgagtgctaccgtcctttgggaattgtagtcccgcgctcactgggtcccggccagcggtcctcatactgcgcactcatctggggcggggcttggcgtggttctccgacgactgaactacaactcccagcaggctgtgcgggaaggggcgggctggctcgggtcctcctgcgagctgcggccggcgcctaacgtgcagaccaggccccaggccgaggctttatcctggaaccaccagtgtgagagacagctttggtgtttaactaggcctgggaccacaggtgggcagaagagaggcctcaaccctggatggcatgaacgtcactgggtctttaatgattttgacttcataagggcaggtggccgtgacttcattaccacctttattatcatctccctatattcctgtccctggccatggctgatgcgcaccatcaccgctctgatagctaatgtaagaagtccaggccgggcgccgtgcctcacgcctgtaatcccagcactttgggaggccgaggcgggtggatcacctgaggtcgtgggcgttcgagaccagcctgaccaacatggagaatccccgtctctactaaaaatacgaaattagccaggcgtagtggcgcacgcttgtaatcccagctagtccagaggctgaacaggagaatcgcttgaacccaggaggcggaggttgcagtgagccgagatcgcaccattgcacaccagcgtaggcaacaggagcaaaactccatcaaaaaaaaaaaaaaaaaacttgcacgcacatcccagcattctctgctccttttccctgcattacttttctccaaaagacttcataccacttggccaggcgcggtggctcacgcctgtaatcccagcactttgggaggctgaggtggttggatcacctgaggtcgggagttcaagaccagccaggctaacatggtgaaaccccatctcttctaaaaatacaaaaaattaaccaggcgtggtggcaggcgcctgtaatcccagctactcgggaggctgaggcaggagaggttgcattgagtggagatggcaccactgcactccagcctgggagaaagagcaagactccatctcaaaaaaaaaaaaaaaaaaaaagacttcctgctactatctgacttatgttttacctttcattgtgtttgtctcttcccactgaatgtaagttccaaacagataggaatttttgtctgttttgtttacttgtatatccccagtccctaaatactgctggcagataatagagactcaaatatctattgaattaatggatgaagaagatatatgttacatctaacactgctcactcactttctggttcctttaatattaaatacctaacttttactattgaacaaaataccctagtttattttaagggctccccagagattcactgaaatccaacttctcaggaagtgaccagcaaatactgatatatgtctcaatattacatcatcaaggtatcaaggtcaatgttagcacatcagcattgtagcccttgtagaagcttttggcatttggaacaaaacagtacaaattataggtggacttaaggattagtcacaacttagaaagcaacccctgtaaatgagaaacatgttttgtgttatttccttctcaaatatccagggtcatcaaaacactggacattgaaagtgccaaatattgacaatactggttacagcctgccttcagctatctcactctgaattgagttatgtgctatgatcagaggttgagcttcccttgaggttttccagaagtaggtgacatgtagacatatttgagtggacagactactggctttggggtcagacttacctggctctgatgttcactagctatgcaaccttgggcgagctacttaacctctctgaatccatttcatcatctgcaaaatgatttaaagacccacacggttgttctaggctaagtgagctgtgtgtttggaaatgatgactgcgtggttagtgatcaaaattagtaatcagcatattcattctggaaaagcaaaataaagtcataaatattcaagatactcaagtggtttatgaaacac

SEQ ID NO: 914344 - DNA, 4001 bp, Homo sapiens
caagtaaattgataaaccaatgcataattccaaattgtgatgtatgcctctgaggaaacaaaaacacagtaatagaaaataactgtagagagaatcattttagataaactgtcagggaacatatatctcagaggagtttataataaagccaagatctgaactaactggtgccaatcaaaaaaagggctagaggaccaacacttcagggaaggagactagcatagccaaagggttctacaatgttaaagaacacagtatgttggcggaactgaaagaaggcagaggaactattaggtagtcaactagagtatgagtgtcaccatataaagatgaacttcatttatacattaatccagaatatctaggttccactcaaggttcaaacgaaaagataaggatttcctacttcctacgagcctctgaattgacgaattcagtgttcctttttagatctcaaccaagttgacccctttgcacaacttgacaatgacgcttatatcccatcttcctagaaataactctgcccttggcatgccattcttttctagtgctaaggagtgtggcctctgtagtcagattgtattagttcaaatcctggttcagccacttacaaactgtataatctagagcaagttcactaatctcttcaaacctcagtttctcaatgataaaaggaaaaacaatactagtacctacctctatgagtccctttaaggacccatatacatgcttacagtgcctgaaacacagcaaatgttagcaatgatcatattaacttccgttatgactgtttcgaaagtctcctgatatctcttcttccgctcatacctcaaaaacagctttgttttcttggtctcatccattcctatgacttcagcagctgaaaacccacaaaatatatttcattcaatgccaggcctcacgctggagcttcagggtccttctacactttgtgcctttacacgcatttttccttccatctggaaggcttctaccatctgccaaggtaacactgcgaggtctcaccacaaactgaattgatagtctcaggctgagtttgcagagaaccaaagtcactcctctaccatcagagtactcccctatcaccacatacattatcatccactgtagttgtcttatctgtacctggtaaatacagcagctaacgctcacgagtgctcaccacaggtcaagattatctcacttatcttcacaagacagtagagagcggccacacgactgacagaattccaattccagccgtatgattccagagcccaagctcttaaccgcgaggctgaagttgaaatatcaataaatgctcgctgactaaaagtactaaatacgagagagagatcaaaagatgactagtcaagtcgcgtagttaaatctgaaccctaaggtgacacaaaaagaggatgcgcaggaggcagggttcaattcagggcgtttaaaaggaggaggttattggccaagtccgctaagcacccggagagaggccaggaaagatggagtgaggagagggaggagtcaagggccactctggaggggtgcatgagattggcggtctggggagaggacagactgggtcgcacacgactgaatttcccagcgcagaagccgctgcgttgcctccgcgcccctaccactgcactcggaaggtcaaagtagtatcaaccgcggcggtggctgcagcgcagatcccgactcctctcgcctcctcccgcggccacggcttcttttctccgttagccacgcagctacctactcccgcttccggttcaaaccctgcgtgactgcccagcgcccacttctggaggaagaagcaacgccaagcagccgcagagcacggtatgcccatgcgcatccagtatcacgcggtctccgcgctcaaaacactgccccaaaacattcggcccgtcggagcaaacgcgcctgcgccatgtccaccaatggccagcgacttagcgtttgcggctcgcccttcggctcgggctccggggctctcacccaccctcttcgccctcgtcgtcctccccgccctcctcatccccgcccctccaagtctgaggacggaagtgacgacagttccgaaggcgaacggaggcgggtttcatttcggcgcctttctttctctggcggaagcgattggctgccgtgaagcgaaagaggcgggacaaattgccgcgagttcagtgccgccactggaaccaggagatgcggcgcaggagctgtcgctgtgtttgctttaacctgagtcttgttccttattgtggttcctgctgtggttttgatcatgttgttaccctcggacgtagcccggcttgtattgggtaagcgcggacgcgggatggagggttattggacccggctatgctggacagaaggacctttgaggccaaaggttttcccttggtagggaagctttggggttttgcctcccagcttacgagttgagactggcggtgattcttcgtcattcggaggttctgggcagtttaagcctctttgtatgtagatgctcctctcttcagaggctgcgtggcgaggggaagcccgaggggaagctcggggtggaacacctggggcggattcggaaggaaagtcaggcctccacacttaattaggacccctgaaagagcatttgtctgcatgacggacggattgcgtgtgcttcaaccttgggcgcaatttccttggttcagtgttgggaccaaaatagggcaaatagggagttccccggccccccatctttgtagagagaccttcctggcgcccttctaataacccgcccttataactacgaatttgggagtaggggtgatcttccttctccatcctccacgcaatacgtcgtccagtgtagaggtgtgaaatgccagttgcatattttaaaacagcaattcctgttcctttgatcagcgaaaaatttcagagggttaattgccttaaattagttgaacgttttctagccctagttttaccttcatttgaggagggattgtttgtgggtcacttgtctgtcagggtgtattgtctgtgtgagagacgggttttgttgttgtttgtcccctgaaagaataaagaggattgtactacaggggacgagagccaggtaaagctcaaaacccgagccagtaatttacggacgtcgtatgcgacgtccctaaaagtaaatggcaagcatctgtgatgaaacctcccatagtattcacagccattactactattattttattgttcggaaaacccatttgtcttgtgcctcttttaaatgcccagcgctgtccacaaaaatgttatttgcgcagggctcttgataagcacattttgcaggaaacgttaaacggaaatggttccaccatccatttttgaagaaacttaatgacaagtttaatgttttgttaatgtctgattaatcttttgcttaagaattctgagttttggcagtttggtaatctagttgagtttcggtaactatagtcttaaacatggtttctcagcctcagtactgttaacattttgggcctcataattctttattgtggggagctatcctgtgctcaaacattgtaggatgtttagcagcattcctggcttctattcactagattacagtaggacacccgttccccaccctacccttacccagttgtgatcagtgaaaatgtctctagatattgctagtatgtcccctggagggcagaatcacccctagttaagaaagccctaagaaagcagtatcattttctaattgaaataattcacatcgatgtgtgagtattctttctccacaaaccagctactctgctgacttcctgcttttcatttaatggacaaaaaacgccagccatggttttcttatcttaaaaatctttgtcattcacattccattttcactgccaccaatcccgcaatgtgcctgccattacttctcttttggacttctgtcatggcttcccagacagttgtcctcgcaattcattttatttactgttgtt

SEQ ID NO: 914345 - DNA, 4001 bp, Homo sapiens
caagtagctgcgattacagacatgcaccaccaagcctgcctaatttttgtattttttgtagagatggggtttcactatgttggccaggctggtctcgaactcctgccctcaagtgatctgcccgccttggcctcccaaagtgctgagattacaggcgtaagctaccgccgcagggccatctcttttgatttatataaaattgtagagctctatgacaggtatcttaacaatcttagtaaagtaaaagattttcttgcaagcttatgaaattatttgggaaaatgtgtaaaatgtttcactagtaggctgtgaggttctgcaggacagccttcaataactcatagtttggctggtgatggagggaagggaggagagaatggataaattacccggctggcgctgtggctcacacctgtaactctggcactttaggagaccgaggcgggaggatcccttgagcccaggagttaagagactagcctgggcaacatggtgaaatcccgtctcttaaaacatacaaaaattagctgggtgtggtggtgcgtgcctgtgatcccagctactcaggaggctgaggtgggaggatcgcttgagcctaggaggtggaggctgcagtgagctgtgatctgcactgcactccagcctgggcgacagagtgagtccctgtcttctaggaaaaaaaaaaaaaaaaaagaaagaaagaaaaagaaaatacccaaaccaaactcaaacacagcaaaataggctagaaagtattacattttttttgaagttctgctttctattcacatttcataaacgtaggcaaaagttaagagatccgaccttcagtcacttactggaatacagcacatctaggaaaaacttacgtcaatttagcttatctcacttcaggaataaaatgaatagcttgccactgagaagacaactgaaatatttactggccaaataaactagtactcagaggctgtgattattcagggttgttgtgaaatacagcggtctaccagtgaggctcttcaagctgaaaaaattccacgaatgctaagcttcgtaacaaagattattgtttatacggatcccgtcctatgcttctcggggcatggatactcatccatgaagtccatttccacctaaaatttccctcggattaaagcggaagtatcttagaatccgtctaggacagaaagcaaagtcaacgttcaaaaaagctcacccatccttaaacatttctgttgacttccaaatactccactgagaacaacaccacatgtaatgaggccgaattgatttactttcacgtttctgcccttccttttcttagctctcctaacagaaccatcccctctagatccctgctcttagcgatctcagggggcgtaatggttgcagctgccgggcaacgccgggcttccttcacactacctctcttcccagtcgtggttagaattcaggaacttctaggttgtgtagagaacccaatctgcaggtcagacgagtggaaggctagaaaagagtcgccaacctgcttcctgctccctccacctgcaggccatcccgccccggcacccgcaggcccctcgggtcttcgcagcccgcttcttcctctcaggccatcgcaggcctccctgccgcccgtgtgcccgcctcggcggtctcacatcgcgctcaccgttcaccagcgccggggtcttctccacaaggttacggacaaattgggccatggttctggaatggagagtccgtcgccccgaaccgccggctgaatgtcacccgccggaaggacccgctgcaggaccccgtcccacttccaaggtcaggccgcctcttttcgcgccggtcgaagatacttaaatgtccaaagatctttgcagaatccagcctgtcaatttaatttttcaacatggaagagaaagtggatatgaaaagatggtattagagagcatgtgaagaacagtaggattccgcagagaagcaggcattttgtggggcagccactcgtagaggtccggaaaaccggcaaggagcggaaatgcgcatgcgccctgaacctgcagtgcttttcttggcgccgacctccgctattttgcgtagggtgctttcgccgcgattctgagaacctttgaagtcagtactggagaaggattcgctgagattcttctagtccaacacgatcgttgtacagaggtagagagggtccaaggccaaacatataaagttaggggccgagcaatcaccacacaggctgtcaccaggctcaacccatagccctttttatttgagacagtctcgctctgtcgcccaggctgaagtgcagtggcacgacttcggctcactgcaacctctgtcccccgggttccagcgattgttgtgcctcagtctccctagtagatgggactacaggcgcccgccaccacgcctggctaatttttgtacttttagtagagacggtgtttcaccatgttggccaggctggtctcgaactcctagcttcaagtgatccacccgccttggtgctgggattacaggcgtgaatcaccgcgcctggccccatagcccttttaaagttgattttttgtaatcccaatctccccaaagtgctgtatcacgattggaatccatttcccctaattccctagttaaccacaaggagctgtgcagatgtgaggaaaaaatcacctgtattgaacgcccacactatgccaggcattttggaatttaaagaaagcctgtaaggcattgtccccattgagactgggcttgaaaaatggccacacagtttggaagtggcagagttgagatctgaagttgcaatgtatactcagagagggggcattccatcagattaggcatggtgctgatttcagcatacttcctagaaaagatccttgagccgatgtgtaagagaacagctgtatactacagagggctgaaacttcatagtttaatatgaggaggaaaagatgtatgtagggaagtggcatttgatgagaggaacagaactataagtaatgtaacctggggaagtctgagcagaagtaaatctccgatttttggaatggttagagagatggaaagaaaaattagaagtgtaatcaaggaactaagaacttttcaatgaaggagtgattctgctgccctagatactgcagaaaagtcaaattaaggatgggaaagttaatttagcaatatggcaatctttaactaactagcgccttttcaaaaaattaggatagaatccagggtgaatggtgaagaaatatggctgtaaaggattacaagtcagaaaaccaaagggggatgtggaactcaggggagaaattgaagacagagaagaggcagtcatttatttatttagagatggggtcttgccacattgcccaggctggcctgaaactcctggcctcaagagatcatcccacttcagcctcttgcttagctctgggattacaggcacaggccatcctgcctgataaaaagggatattgacaagagccctgatgaggcaggaaaagagaactagccagggatctatggggccttttccacagatgtgattatgggagagaggtctgaaagtcttcaaagtctctgaagtctttatcttcccagcaaaatgaaggcaaagtcatcggactgtgaggggtcaatgggaggggggtatgagaaggaatttgaggaaggaggccaaagtttggaatagctgaaggacacacagaagggttgttgggcaacgttagagataagtttgtggttgtaccattctaaaaattgtgtttttcctccaacaatggtctgcagtttggatattacagcagaggggaatggctgagttaatctaggctgacatcttgcatggcaggggtatggaaacaaggagcaagaaaggggaagataacagcaaatgattacaaagacctggggttcaggccagataaagaaaaacagtgaagccaaaagagagctggttaggaaaaccatactgtgagattcatctcctg

SEQ ID NO: 914346 - DNA, 4001 bp, Homo sapiens
gcaccatgctcctgtccgctcagcctttcggttggtgcatcctcttccccatctcacactcccagctcctggccggcctcatcaccctgtgctccacacctaggaaaagtatatctgacttggtccccttatccccgagaaaccactaagagaaccttcaggtctccccagaagccgaagctgaggaactgggcttgccccagggcatcctcctgtgaagctccttggtctccgccacgggctccaatcctgttgctggagcttatctcctcagtgatttacctgccccctgcttctggtggaacagtgagtaactgcccaaccagaaacctacacacacatattcaacacagcgcctgcaagcttccagctcacctggacctggagtgatccccaagcatcctggggtcaggcacagaaacaggaacagcgagctcctggctccagtgctgaatggggcacagatgcattaactctcccagtcccattaaccttagcaagtatttctgcttccatgaaaaggggaagagggaaaatgtctctaagctctggaacctttggcagtgctgggcatggactgggcagagtgagaagtctgtctgaagaccctgggaaagggtcttcaccccatgggaagaaagggaaggcttgatgtttggtccagtaaggccattaatggtcaccaactgagcagactctgggaggaaatgtctcagtctctgcagtggctaccagcagaggtagggcgacataagcacagaagacaaatcttagaaaaccctagaacaacagtcctgtgcagccacatgccccacagccctagtaacttagggagtgatgtgcctcccatttccacacaaacacatccaggcattgcacagtgctaggccctacgacatccgtaccccaacattttcaacagtgcgtgctacacagcccaagctctaggccccattgggcaccccacctatgcaggtgcccatgcactgggctagcaactgtcagtaaaggtccccttcctgtatgtccagagtccttcagctccagcttctacaagaatccatgcagctaggcctggctgggggaggaaggggacagggaagttggccaaggctcccatgtgtgtgcatgtgggggtggttcttgaccttagctgcttggtacggggctgtcacctccttaccctggcactgtcggacctggtggcttccttctctatttcctgcctcaactctcagcctcctttttctggaagttgtgtgctctgactttggagggattgggacctcagacctgagcccaggtgcagatgggagggtggtgaactggtcgcgcctccttcctccttgctacaccgaaggtcccaagggccctttgccacccttgctacccctgggtccctcagcgcgccccgcagagctcgggccccctcaagagagttaacttggcagtgcccaggagccagagagcgatccagagagcgctgttgggcagcaggggtggggaggtgggggacgactgacccctgactcctcatccggccaccagaaaccacctgctgagggggccgggaactgacgactgagagcccgggccgattgttagaagctgctgagaaccagctcttcccctaatcccggtcgacgagggcaggctgtgccgggttttgtttcgcagcccctcggcagcagcgcctcccagcccgagctcggttctcggccccctttccagctgcccccagcgcgcgcagcgcacacacacacacacacacacacacacacacacaccccagcgcgcgcccgggaggacatggcgtgggcaccgatggggacgcagaaaggggctctgtgcgcggcggggcgcccgcgggggcgcggggagcactgacctgcggcgacgagtccggagcgtctccggtgcggtccatcgcgggcaacggcccctacgccccggccccggcgcccctagaccgctgccctgggccgcgtgcggctccctccccggggactgtcgggctccgggcccccgggggccacttcatagccgcggggtccgcgcgcccgcccgccccgcccggccccgccgccccggcccggctcgttctgggctcagcgaggcggcggccgaaggctgggagcgcgcgggagggagggcgcgggcagggaggcggggggcggggggcggggagggggagcggggagggggagcggggagcgggcgcgggggcgagaggggcgaggggggcgcgcggccggagccgagccgaccgggccggcgcagagtccccgaggtggcggcggatgcgccggtgccgccgcggctctgccggcgcctcccgccccgcccccacccgctctccgcccccgccccgcccccgccccgagcccgcgccagcgccggcgggacccgagctgctaatggtcggtaccaacctcgccagcctaggcgggggcgcgaggagggaggccggcgaggggacccccccccgggattggtatcacctccccaccgccccccaccctcccccggcaccgtcccccgcggaggcggctcccgcttcaggcggcggagcaggggtggcgggcaggggccgagcgcacccccagatctcggctctcgagagttaaagctcggcccccgcctgcacccccattccaccccgcctccatcctggctgctcctggcgcccagcttggcagcctctctcaaagggtgattgtttccggccgggctgctgcaggagggcggggggcggcgctctgggaccgagaggccgagctgggaagccggtgggggatgcggctccttccttggctccaggcaccccggatgggaggtggccggtgggggcggacggtgccgtgccggggtacggggtctgctgccccgtggaagggcacctcgagccgccgcgcgtcagcctcaccccagcctccccttccgggccggtgcacccggcgttccggagagaggcccgggaggcctgcgtgggcggacgggcgcggggaggccgggggcagcgggatctccaggagtttcccgggcctctgccgcggtgtgttggtcggcgggggacggaggccagtgagtgggcgcgcacttggacgtatgtgggtgcactggtagggtgcctctgtggagctgtatattccagatactccttcagcttgtcggagactttgaagccatccttgcactcgttttagaggttggcatctcccggtgctcttggacacctgtattcgggccacacccgctgtgtcctcttcacagccccaggagaaggccacctcccatggcggggttcgcggcgggaccagggactgtcggtactttctctagggtctccctccttcccgggaaaccagttccagccccactgctaggcactgcttaaccagagctgtgcccccgtgctatgggctggggctgaggaccacgggcctcttttccatcagctttcctgccctgttaggaccaagccgggccctgctcttcccactgaggatgtgcaggtggggagggggcagagactccagaatcagcccctttggtcaagattttgaggggaggaaggcacctcaccgtccgtatcatgccacagacatgtgaaagtgtccttagtgactatctctagggataactgctcctccttgtcgtgcgctctttcattgttgtgcttaacagccccctttgccggcaagaaacttcctctgaatctaacctcagtacctcctgctgcggtacaggagcatttcccccttctcttaatgagtggaatcccagccagccttgctccgccttcttctgcccctactacaaccctctcttttagactctgctaagagacctttcctaagtcggtgttctctggtattttcctagtctccatactctgcttctccttagactccacaccagctgaagggaggggaagggcaggtgcagaagcaggatgggcgggggtaccagagagcaccaaggaggggccaggccgtcca

SEQ ID NO: 914347 - DNA, 4001 bp, Homo sapiens
accacgcctggctaattttgtatttttagtagagacggggttttgccatgttggccaggctggtctcgaactcctgacctcaggtgatccacccgcctcggcctcccaaagtgctgggattacaggcgtgagccaccacacccagcctgaaaaagaactattttcccacaaatatttgagtataaatgtggttcatttatcctgtctttggcatgctctagtttgaggaacaactcctagcccagtgcctccccaaactcctcatcatcaactccaacttcttggacaacgcagacctcttgagtgcaccagagcccatacctggcataggtgggggtaacaacatagatagtaggcagggcctcgggttcagggggctgggcaggggcagggggtggccgtcggagttccgcttgcagctgggaaatcctcagatccttctgccgtagctgctcggctgctgcccgcaggggaggaaggcagtcacatggctggcctggtcccaggaagcattaatggggaaagaaggtggggacagagaaccgcagaatgttcagcatcccaaagggccgtaatcgtctcattaattcctaaccaatgcaggtatcaccttatgacttccctagtagccttttctatacctctcgtgtgggaaactcactgcctcaagcagcagaccctctccaactttaataaattccattgttacaattttatgttggatattgagctgattccatcttttctacctgctggtcctaattttgccttctgggcttctaacaagctcatgtccttaaacaggacagtcttttcagagtccaaggtgccaactaaccattacactatggaaccccttttggacagtctttcaaatacctgaggataacgcagtggcactgtccctaaatctttgcataaggggcagggttcgatccattcccttggctaggtgaccaaagactcattgttaaattcattgattccatcgtaggataaatatttattgaatactcttcctaggaggcactgccttaggtgctggggatacagcagggaacaaaacagacacagtccctgccctcatcgagctttctgtttagtggaggaagcagacactaagcaaagaaacaaattaataacattattacaaactgtgatggggccatgaagaaaataatcaggatagagaataaaagggaatggaattaagaatggtaactttagctatggtggtcagggaaggcctctctgaggaggtgacatttgagctaagacctgaaggatgagaaagaggcagcccgggaaacgctggaagcaaagcaccccaagcagagggaacaagttaagtgcttgagagagtaatgagcgtggggttttcgagaaactgtcagcaagccagtctggctgcagcagagcgagggagaggggtggaaatggggttgggagaggcggacggcagcaggatcatgcggggccttgcaggctctgggaaggagtctggatttcatccgaggtgcggcgggtagccgcggtgcgttctatagagggcagtgcgcctgaggccgcagagctgtccggagggccgagcggatgaatggtgtttgccgggggttcatccccagggcgggatgcacggcggcgggcgccctcgggccagcccgccgcacccccgccccgccccgctcaccgagctgtaccagcgcgtagaggaggccggcgatcgacaccaggaagtaggcgagaaacacgttcttcagcttcagcttcatggccgcgccgccgcccgcgcccgagcaggcggggtctgcaggggacgaggggttcccgccccaaaccccggctcctgtccgcaggccccgcccctgcagcggctccgccctgcgtcccgccttcctcgcactcccctaccagctcccagctggggctggcagcgccgccagggcacgcttccggtcatctgtgcacccccccgccttgtagacttgatttccggtcccaccgccaggttccgggaaccaccgggtggtgacgtcacatccggcgtgccaaactcgcgtggccggcagtcaaaaccccgggtaggtgcagaatctcgagtaggtgcacgtggtacctacctcgagacccgccccctcatcacggaattgcctgagaaagccagtcctggcgcccagatcttcaccttattcatccatccagtcagtcacgccacccaatagctgttgctcaatacttattacacgaatgaaatctaaggcccaccacatgatcctctgggtgtctctcctggaatcctcactataatactttgagatagataagaaaccaaagttgacaaaaattatgtcattgccacagggcagttttgtgtcctttctggacacccgattccagcatctctagtgtgtcctctggcccacatttcttcaacagatgacaacaggggtgccaaggaagtgttttaactaccaggaaattgattggaaatagttcctgagctggggaattccatgaatgcatccccttcctcctcacaagcacaagccatccttctcatttttcctttaaaaaaaaaaaaaagggcccggcccagtggctcatgcctgtaatcctggcactttagaagcccaggagtttcagatcagcctgggcaacaaggcaaaaccccgtctctacaaaaaaaacacaaaaattagctgggtgtgatggcgcgggcctacagtcccagctacttgggaggctgacatgggaggctgaggctgtggtgagccgtgatcatgccactgcactccagcttgggtgactgggtgagaccgtctcaaaaaaaaaataaccccccaaaaaaagtttctggtaaaataatctctgacttgtggtcagtctacaaaatgaggggaagggggaacagtatacttcctgtcactaaaacaatgggaaactttaaaaagtgctgttagcagctgggcgcggtggctcacgcctgtaatcccagcactttgggaggccgagacaggcggatcacgaggtcaggagatcgagaccatcctggctaacacggtgaaaccccgtctctactaaaaaacacaaaaaaattagcagggtgtagtggcgggcgcctgcagtcccagctactcaggaggctgaggcaggagaatggcgtgaacccgggaagcagagcttgccaagagccgagatcgcaccactgcactccagcctgggcgactgagggagactccgtctcaaaaacaaaaacaaaaacaaaagtgctgttagctacaagcagaagcctctaggttgggcacagtgatcgatgcctgtaatcccagaactttagaagcctgggaggtcaaggctgcaatgagccaggatcataccacagcactccccgcactccagcctgagcaatagagcgaaactatgtctcctcaacccccgacatcctccaaaagtttagtttgagaaacagctatctgaccttatggctatttctatccaagagggactccattggctctgatcaccacttactaactaggcctactaaaatgtgatgatcttgctgggctcttctacgaaaatatctagcaacccaaggaaggcttgcacttgctcattttgctgaaatcaaggatgctcatgctggccgggaacagtggctcatccctgtaatcccagcactttggaaggccgaggcaggtggatcacttgaggccaggagttcgagacaacatggtgaaaccccatctctactaaagatacaaaaatcagccagacgtggtagcaggtgcctgtagtcctagctacttgggggctgaggcaagagaatcgcttgaacctgggaggcagaggttgtagtgagccgagatcacaccattgcactccagcctgggcaacagtgagactccatctcaaaaaaaaaaaaaaaaaacccaaaaaggatgcttatgctgaagccaaatgaaaatgtaaggcccatggccaggcatggtgcctcacgc

SEQ ID NO: 914348 - DNA, 4001 bp, Homo sapiens
aataacaacaataatactgcgataatattaatacttcacatttgtacgaagcttacagaatgttttcacatatagcatctcatctgagcctcccaacagttccgtgaggtaggtattctcacctccctttttacagacagggtaaccgaggctcagagaggtaacgggatttactcaaggccacacagctagttagtggtaaagctaggaatcgatcccagcaccccatatccaagtccagtgtttcaacaccacagctacctctgtaaagtggagcgacatttcttaccccagtcaggcctaaatggtggcctgaggagccaagaggctgacttctcagattaggggagggaagggctcagcagcgtcggggagagttggggtacttggccttcaactcctgtttgaactggcgatataggatcttattgtgctgattttcagcctccttttggggatggaacttcaacgcttctttgaagcccttatgaaccaagaaaccttcgttcaggacctcaaaatcaaaccccgccacatgcagctcgcaggcctgcaggaggaaagacaggttagcaaagtttgatgacattgacaggcctgagactgacttccctaaagccacagtccagcgtcctcacccctctggaagtatcctggatcttccacaccatccacccacctcctgaactatgatccctcctgcttcattgcctcctttccatccagggccactcctcataactccctgatcccaccacccctcctgccccattacccctgccctctcccttatgagcacctggctgattcggttgaagccgtactgccgaaagcgctcgtcgaaggtgggcaccttgcctcctgccacgtagaatggctcccaggggtcctgccaaggtaccacgtaggcgggccgcagcaagctctcttccggcaggttgacccagcgggaatagttggtgggtgcctggcagggggtgcacaacccataatagaagggccgcacctcgccaacctggtagagctgcaccagctcgtttttgttcatgggcatgcggcgggctcttcggatttcgaaggcaggcaccaccagcgcggtgcctccccactggttgctctgatccagcatttcccgcaggcctctccacagcccctcgctgggcaccatgtccacatcgatcaccagggcatagttggccccctcacgagccagattcctcagcaggttattggggtaggagacattggtgcccagcgcataattaatcccgggctgggccaccctggctagcttgtcaaagacctcctggcaggaccgcagcagggcaaactcccccggctcccgggggtcgggcacggctgcctcgtaacgcgaggggcacacgaggtgcatggcgaccctggcgcgcatgtcggggcagtggctgctcagcgcgtaggccagcaccgtggccagctgcgcctcctccttggtggccgcgaacaccgacacggacagcgggccctcccagcgctccagcagacccgacaggtgcagcaggttgtccacgctggcgtgcgtggccaggatcacatcgttggggtccatggtggtcttcagcaggcccctgtagacgcggtaatcgccgctagcgtccaggacgcctccagaggccagcgcggtgcggagctgcgccttgacctggtccacggaccgtggggacgggggaaagaactcaaaatattggtcttgctcctcctgcccgtgcagtccggacagcagcgacaggtagagcagctgcagcatcgccaccagcatgagcgcggccagcagcagctggtagaaggcgcaccggatggcgtaggacatctgcatggctctcggggctcggggcgcgcagcaacgaccacccggccacagactacgccagcggccgcaagcccggatttaccgcagcctgccgagcgcagccgaggcgagccgaggccagccgagccccgagcgccgccccgcccgccgcccgccgcccgccgcccgccgcccgccaccgcccccagcccccggcgcgccggctcgccccctacgagggaggaggagccacggccccgccgctcggccgcgcgccgtgcagacgcccgcccgcccgggccccgccggcttcccgggacgcactcctctccctccccgccggcgcgcgcaccctggaccgggcgcgccctgaacgcgcggcgcgctcggccggactcggagggaaaccgcggcagagctcggctgcagcgtggtaaaggatggcgcgggctcagcagaaaggaaatcaaaacgctcccttccttccgcggcttcttctttccctgtgtccgaagaggtctgcgttgcgacttacgtggtagtgcttggaaggtgcggagtagatgagagataagtgaatgtggacaaacctgtcacgtaggacgaggtggccgagtggttaaggcgatggactgctaatccattgtgctttgcacgcgtgggttcgaatcccatcctcgtcggccctgttttatagaggttgggggggaagcatctacattttcacatcctgcctatttggagcagcaagctggaggtgcgaggggtgaggcatctaaattttcacatcctgcctgtggagcagcaagctgaagaaaactgaactgggggtgagagtggaattcgatcccaagtctctctggtctttatccaccacgcatctcctgcctgctcctacttcaggtgtctgtagctctgggcagaggccaaaggtgttttctttccttctagaaagagggcccaggggttggtggcacggaaaagactagaaccgggattctggccagtgtgaagttgggggccaacgtatgatctgcaggaatcagggaagccccccattggaggcatcgccctccccgtccgaagtagtggtacttgtcctactctccagcacttctcctagggcggagaccttgtgtccacatgccctgctccccaacacacacaatctctttttttttttttttttttttttttgaggcggattctcgctctgtcgcccaggctggagcgcagtggcgcgatctcggctcactgcaacctctgccttccaggttcaagcgattctcctgcctcagccccgagtagctgggactactagcgcatgcagcacgcccggctaattttttgtatttttagcagagacggagtttcaccgtgttagccaggatggtctcggatctcctgacctcctgatccgcccacctcggcctcccaaagtgctgggattacaggtgtgagccaccgcgcccggccgcacacaaactcttaagcagaaggctttgaacattccaatatcaggccactatactcttaataagtatttgtggattaattcatctgtggactctttagaacaggagaggccgtgggaagggcagacactgccactgctaaatcaattaccgtatattactcaactttttaggctgagccagggaggcccctatagggcagagtgctctgaatcttgggatgtcaggacagactgggcagggcttcaaataaggataaagtgtttgtcccactattccacaggcagtagggtgccaaggttgttgagttgaagagtgatcagaaaacctttattttgcagcccagagcaaaaacacacactgagtacctggtctctgccaggaactgtgttaggcacgagggatgggccttggaggagacacaggtattgtccttgagagtttccactggtgaccttggctgtaaagaggagaaaagtaagtgcagatcctttcagcacaggccttatagactggaggctcagaagtcagacatgctgccatgtggattttctttgacctcctcagtgttttattttttatttattattattattattatttgagacagaattttgttcttcttgctcaggctggagtgcaatgacgcgatcttggctcactgcaaccttgcctcctaggttcaagtgattctcctg

SEQ ID NO: 914349 - DNA, 4001 bp, Homo sapiens
ctgagtgctgataagaaatactagagtattatatagtatattgctcttcacttattcctgcttctgtgttagaggcactgtgagaagagggcttgcgagataagctatgtctcttttaccgtcaactgtctactcagtgcgcagtcctgtgcctggcacatttggggaatgcaatatttttttttcaatgaatgaaagaataaaaaaatgaatgaaaacagaatttggagtctgaataactgagtttgagccccagcttctttcctgagttaatctcctaggtttcaatatcctcatttgaaaaattgagaaagttaacattcatttttcaatgaaataaggagagaatcctgtttatgttaacgtgctacacaaatactagttaaaaaagttaagcatcccccatcatttctggaaagaaaaataatcttcttaatgtaacaataaatcttgtttcaaagaagtttgcgtttactctgataaaacggatagaagatcttggatcacagccaacttctgatgtaaaggaaaaggtgttgggcaaggccctgttcccaagggcggtgctggctcgctcacctctgttcttggatgccacactgtgcagcctgagggctttgacttgctgtgaagtattgggcatttctctctatggttctttttcatcaggcatcctggagcccatgcaccttaaactttgccagcctctgctggccctgatcccttgtctctcaggacacagctcaaataccacctcctccagctcacctcacggtaagtccaggtcaacataacctgtctccttgttgatgtcatggctgttgagtagcaagtttggtaaagaggacaaatctgccacttactccatccctttgaacctcaggttccttgtttgtgagactttgggcaactcctttatctcagtgtctcagaattatatgagttaattcatgtaaggcattcagagccatgcctggcatgtagtaggcaccagaataacattagcagttggctaacacaggagaccatctttttatggatgaagtctagccttctcacacagtatggtataaagttcctctttataagctttataaagttcctctgtgatcctctaactgcaggcatttctcactctgtttattgccccacacatattaacacatccatttattgcttgcctttgcaatgctattcactctgcctagaattcccctttctttttctttttctcgactcagtgcaacctcaggctcccgggttcaagtgattctcctgcctcagcctctctagtagctgggattacaggcgtccacccccatgcccaggtaatttttatatttttagtagagatgaggttttaccatgtttgcgaggctggtctcgaactcctgacctcaggtgagccacccgccatggcctcccaaagtgctgggattacaggcatgagccatctcgcctggccaggaattgtccctcttcttttcccaggaactactttggtcattccctcctctggtttgatgctgagatagctagctggaacacagattcctgggccacccacccattccatactatcccagggtattcctggaggaatattcgtatagcagaatattcatatagcagaaaaggcaaagaaaccttttattagctattagggccttggccccaacccccagcatgaatccctgagccctggggtctgcactggacctgtgcaataggggcaattctgtcctcattcctctccccttggcctccccctgtttcttgcttggcactctgattagaggggaatgcgaagaaggaaaaatgtacctccttcccaataggaagaagcccaggcccccagcttacctgcagtctctgagagagaagaaatagacaggagccatccccagcctgagactagcctttaatccctttacttcacacactgaggttccacgcaggcctgtggttcagttctcttgaatctgaccaatccatgacatcacccctcctccttaggggtaaggtgaagagggggagggcagctacaggcttccttagccaccagtgactgcctgcttcctctttaagctcaaatgtccttagagtgtgggtccagtgaatatccttggaggagattctctactaaaaatataaaaattagctgagcatggtggtgggtgcctgtaatcccagctactcgggaggctgaggcaggagaatcactggaatccaggtgcagtatcgtacctgtgctcctggagaaggtgcatcttgtctgtaaagacagtgtgtgatgacggccctcatgtggaggccccctgcaagttgcctggaaaagtgtattgtgtgccttcagaggcagaggcaaactgcctgaagggctgtggaaataggcacagaaataacaggttggccgcatctgtaagagtaaagtatttattgttgttgattgaataaaatcagtttaattttaatattaggtatggggccctaatggatgggatcacaatgttaagttgtagtgatccatcacagggtaccatatatacacatttatatatttaaaatagagataaaatctatattacatttatatattaaaatatataaatatattcaaaaatataaatctatattaaaatgtatatacataaatatatatatatatatttccagatttgagcataggcaaaattgggctgctaaatggagaagtagtaggggataatcaccctttttaaaactaaggttttttataatgagttttaatccttgaagggcctgcttctacttacattgggccatattaactataaaatgggggctcatggggtcccattttatcaagccaatgacaaagagacactttaatttattattattattaatattgaaacagggtcttactgtgtctcccaggctggagtgcaggggcactatcagggctcactgcagcctcagtctcctgggctcaggtgatcctcccatcttagcctcccgagtagctgggactataggcacacatcatcacacatggttaatttttgtattttttgttgagatggggttttgccattttgccccggttggtcttgaactcctgggctcaagagatcttcctgccttggtctccctaagtgctgggattacaggcatgagccaccatgcccaatctaatttattatttattttgtcaaagcatctatgtccaatagaaaacattttatagcagtgggtatatgagcatgggaaatttaggcaaggctacacttaaattgaggcatacgcatttaaaaactgttatatgtcgttaccctctcaagattatagggtcagagtgtgtaaattagtgggatccccaggtataattatattttgacccccaatattaagttcatgaatttttgacaattagtacattttcacaaatgttaagttagaacctatgttgtagaggcgcaaaaaccaatcagtgctgtttttaatctttttgttacacaacttctttagtatataaattaggaatcttgaatttccaattaaatcaaattgtggaaaatatagcatatattcagcttgccatatatatatatatgtatgtatgtatgtatatatatatatgtatgtatgtatgtatatatatatatgtatgtatgtatgtgtatatatatatatatatatatatatatatatatatatatgtatgtatgtatatttatttatttatttatttgagacggagtcttgctctgtcacccaggctggagtgcagtggcttgatcttggctcactgcaacttccgcctcctgggttcaagccattctcctgcctcagcctcctgagtagctgggattacaagcatgtaccaccacacccagctaatatttttgtatttttagcagagatggggtttctccatgttggccaggccagtctcaatctcatgacctcaggtgatccacccacctcagcctcccaaagtgttgggattacaggtgtga

SEQ ID NO: 914350 - DNA, 4001 bp, Homo sapiens
acatgcacctccatctggccattcttgttgagtggctctgcctccaggaagaccccaggactgccctgtgccctcagcactttctctgtgtgctggagtgttccacgtctgcctcccttaccagaactgagaactcagggttagtgccagggactgtagtctctcctgaaggatttgagctctcaaagtctggactgaggaacaggcatggatgctgacgcccaggcatggccctggagcagagggtggccctggattgagtgtccttgggtaggaggaccaggaggggcagaattggggtgaagagaagcatccctacagatgctcagatcccagggcgtggaaccccctggggctgcagtggggatgtctaggtcctcagcttagggaggtccaggaagtggagagggctggggtgcagagctggcctgcccaggcttgtggggaggcagtagagatgtccacaggcagatctgggaagggtcccccagggctcccctgacttgggccccaggtcccccgacagaacagtctgctcactcgccctctccctgggcagctgttgggctcctctggtcctggccctagcctcagaggtagcaagtgtacaggtgccctggggcggagctggcttagcctcaaggggtccttggaagaggggtccctatgcctccgccccctcctggttgggcttagacccctgcgctgctcagaaaaccacagaggagcctgcagagggggctggttttgttctgtgtcactgggccagctgtggatcctgccctgtctgctgatagctggggtggggctttttagggattcagcagtatcgggggtctcttgagggtgtggaagctgtgaggtatgtgggttgggacaagccccagacccttggcctgtgtgggtccaggcgtcccggtacaggaagagaacacaggggctttggcaggtggagtggcccaggagtccccagccagtatcattgttctgccccctcaggacacctggctccctggaaaaggctcagaggcagccagctggggtctctcctggtctgggcatggcactaacctccctcctccagagggggcattctgccccaccttctcccccaaccccaccgccaggctttcatctgcgccttcctgtctggaatgctctttcccccaaaggtgtatgtcaaagatcaccatctccaggaggccctaccccggctggctcaccgtgaccccatctgctttgtttgtgggttggggttgggagagtttacgccaggctccccaagctgggccccatccctacgcatggacccccacaacactggcacagttcaccgaaggcgcccccgccgggaagcgtcccagctgcaccggccacttcagcaagccccggcccgggtccccagcacacagggaaactgaggccctgctaagcgggcagggggtggaggcgaggcctgagaaggcctcttggaagcctcagcagggtctaggggcagagacttccccaggagcccaccgtcagcccctcactaccggatccaagccagatcccagagtcagggaccctctctgggagggtcgcgcgcgtcactgccgacgtcatcgagcgtccgggccgagccgaaccgcgccccctccccccaaatcgcagagcggagaacagcgggcggggtctccgggagggtcgggcccagccgagacctctgtgcggtgggaggcccggcccgcgccccggggcccccgccgcccgcgccgcccgcgccccccgcgccgcccgcgccccccgcgccccccgcgccgcccccgccccccgcgccccccgcgccccccgcgccgtacctcgcccgtagcccaggcgctggcgcagcgcgcgtccctggcgcaccaggcccaggtgcacgtaggtgagccacgcggcgcagctcagcagcagcagcagcagcagcagcttcatctgcttacggatcttcttcaccgggagccgcggcatcgcggccgccgcgcccgccccaggccgcgctcagcggcgccgctgcagcccccggcccccgcccgccccgcgccgcatccccggcccgccccgccgcgctcagcgcccgcggccccgcatggtcctttgtccgccgtgcgcggccaccgggtgcggccgcgacccccccaggccgccctcggccgcgggcccggggtgggcggcgggggcggctcctcgcggtgccccccgcccggccgctcccggctccgcgctcctggggcggcggcgggaccgaacagcatccacggctgccaccgcggatcgggccccggccgcgcgcgcggaaccaatcggaccgagccaggccgcggggagccaatggcggcgcgcggggaggggtgcggggcgcgggaaggcggggcggggcgcggggtgcggggcggaggaggcggggcgaggggaggcggggcggggcggggggtgcggagggtgcggggcggggggtgaggggtgcgggacggacagggatgcggggcgcggggcgcgcgtccacctgggccacggagcgcgggggcgcggcacacagacgcggggctgggaagcgctggggctcggggaccgtggggggcggcgggggatgggcacagcctgactgtggggcggggcggcctcccgagaacagtgacccgaaggactgcaggcggacaacacggaggagggaggggagggacccggggtcctggggggcggggaatgggggcgggcgagagaggccggggggcgggggggcccaagcaccggcttcagcccaggggtgggagtcgttgcgggatctcagcctgcagggctggggccgcagggggccgagctgtctgggcggcaggaggggcctcagctggtggcccccgccccaccgagcgcggcctgaggcaggtgacagtgtcgtgcctctcaccgggaccttgtcccacttcgtgccctttctcacctggtctgcaccaacccctgccagtccctctgtccccccagtacttcccttgtccagctgccagcgtgaccctactcttctccctctgtctgctcagctgtctctgggtgtgtagcaaaccgcccagcttcagtgctgtccaacagcagcgttcctgtgttcctgtgtcctgtgggtcaggaactcagggcactcggggacagctcctctctgctcctcgaggtgctggcctccggtgggaagacgtgagtggtggggccggctccgcgggacaggctggagccatccagagacttctgccccaagccagtgcaccctcggcaggaatggctgggctcaccccgggtggttggccagagcgcctgcaggctcagctgccaggggcagcctcccggtccagcacacagagtgaagcatcttggagtcacccctcaggtttgccacatgccgcacggccacccaagttcgtgggttgtggggacgtggaccccacctcacaatggaagattgcccagaagttgccttcttaagacctcaactccttccctccttcccctccatcctcctcccctaacttctgagcacagaagcaagctggttacatcctgctgttcataccggcccttaaacaacacccggtctctcaaaccttcccccaccccatcagctcctcatctcctgcctcctgcagtccacttttcatatttctgttatctgcatattcattaaaatatagtgccccacccctttttgagacagggtctcactgtgtctctgaggctagagtgcagtggtgcaatctcagctcacagcagccttgacctcctgggctcaagcgatcctcccacttcaggttcttgaggagctgggactacaggcatgcatcaccatgccggactaattttttgtatttttttttttaacagattcagggtctcaccatgtgtcccgggctggcgttgaactcctgggctcaagtgatcctcccgccttggcctcccaaagtgctgggattccaggcgtgagccactgtgcccgg

SEQ ID NO: 914351 - DNA, 4001 bp, Homo sapiens
cataggtgccttgattcctttctggaataacgcaaaaaagaaaagaatggaaaaataaagtaagggtagggaatataaagaggttcctcctgattctaagtatcggagccaaaactgtggtgtagctttcaggaaggggagaggatggcacccatctctccctcaatgccaggacctcccctctctgaggacctactcaccatgctccctccgacagaggccagcacttcagactggttgagggggaagccagcaccacaaagctgcagggagaagaggttgggaacgtgggtctgctttaccagagagtcaaagaaaggctccagggagtcgtcaggctttggcagaaagagacaaggagtgagtcctcatacggccctaaaggcagaggccagcttcctgtctaaactggaaggcaaatttgaaggcttgggggatgctccttgggaaagaccatcttaaggcactgagatttggcagaggaagggttagcaggagccctggcaatgcaaacaggacagtattgataggttcacagattcatagatcttttttttttttttgagacagagttttgctcttgttgcccaagctggagtgcaatgttacgatctcggctcactgcaaccttcacctcctgggttcaagtgattctcgtgcctcagcctcctgagtagctgggattataggcatgcgccaacatgcccggctaatttctgtgttttcagtagagatggggtagatggggtttcaccatgttggtcaggctggtcttgaacttctgacctcaggtcatccgctcgccttggcctcccaaagtgctgggattacaggtgtgagccaccacgcctggccaggttcatatatctttgatccccctatgcctaacctgcttcaaatttatgggggcctttattaaagatcttagagtggctggtcgcggtggttcatgcctgtaatcccagcacttaggaaggccgaggtgagcggatcacctgcggtcaggagttcgagaccagcctggctaacatgatgaaaccccatttctactaaaaatagaaaaaattagccgggcgtcatggtgggcgcctataatcccagctactcgggaggctgaggcaggaaaatcgcttgaaccgaggaggtggaggttgcagtgagccaagattgcaccattgcactccagcttgggcaacaagagtgaaactccgtctcaaaaaaaaaaagatcttaagagtacatagaaagcacagcctattcttgtacctatcacagcttctgtcactatggttctgccctctatagggctaaaatttagactgccaccctatacccctgttaaataatcctttaaactgattgttgccctccttctgctaattccccttctctctcctaattccttctctgtatagtgcagtgtgcatagagtgtgtagggccaagccctgttcctctcaccctggcaatctcagcataggccagccccaggatgccttcccagttggagccgttgatgaagaacttgtctgattcagtgatggcagcaatgttggcacgcacagtgacgttggggccatgggggatgcttaccaggtcggtgcccagctccccttcccacttgccctgggtgtagggcacatacacacccttccggaggtcccggtatgtgctggacctgtggaaagaaggcagagatctgtggatgcataaccacaactggtataaggatctaagttaaacttactcccaaacaccaccttatctcatctcaggggaatcctagagtctgctttcaggctgctcagcaaaacatccctagactcaccacccagaacagagtgtaaagtgggcttgcagatagatgaagggaaccattggtgaggcttgctctcctatctattgctcatattcctagatcttgagctcaggccctgtgaagaacaagcctgggctttgtgcattgtgcctgctgctgctgctgctgcagggacagctagtgggcatctcttccgccctctggctccgtcaagctccccgagaaaaggaaccattgactctcttactgccttggaacctagtggtaccatccgagtggtagagaaagtgccaggcagggtgaatgtggaacctctacagcaagttctagagaaggggtttgttcaagcatctcagaaaagcaggttggtattacacaccacttctgtgaaacgtgctcaacatgtggcagccccacctgtgtttaatcacaccactaaccagggcttctgtgtgtggtgggggcagtgatggaactggaacgaggaactggagtgaatgccctttcatcgatcctacctgcaccctcctccctgactgcttcttttagattgggacattagaggaaacagggaaggtgcgttttgcagctgcctacaagtccaaggataggatttaagcctctactcacgtttgcacacactgatgtctcagatattggtgtcctctcatcccttcttcttcctgcttttatgctaagggggcttccagattacccctcactgcctcttatcttaaagcccacttcaacccccctttcaccagtcccccactttcaccagtcctcttcaacccccctttcaccagtaagctgaatccaactggtggcaccctgggtggtgcatggaggagatatttcagctttcagttctgatactggtctaggcagaggggtttatgaaagaccctttccttcatgtccttggactatgcaaagccacctagagtggcccctgggtaagaacacagcaaggggagccgtcactgaggcctgttcagcttagacttagctggtgttagagaactgagagacaccgaggggatgtggggttttcgtctccccattcaggcagagaaaatgggccccctaagattgttctgtgagctatgggctcttcttcctttccctcccacaggaggctgccctgtctcagcactgaagcacttcctggctacctctcaattcaccctttcccatggtatagctcctctcaccacccacttcaccctgtctctcctggtcactgtctttttttcgcccttccccttccctggcaagaagaaaatctgaggatcaactctttctctctgtacccctcccctgacccttcttagccctggatccttggaaaaggtacttcccccgggctctccccaggactcacagctgcctctggtagtagcgatgcaggaaggggtggggggcagcacccactgcaaagttactgctgcctgtatccaccaggatgttgagctgtcagagaaaggggagagaaaagacagtatagacaggaggcttcggtcacaccacctttattatccctcacgccccagccacagtctgccccttagaatgtccagagtgaagctccacgatgcaggactggtccaggctggcacccgttaccaccacgaccacagacaggacctggggtcctgtggtgctgcaggggccaaaggaacacttcccctgtgccctctgcaggtctgctgaaaaaccaactgaaaaaaggcagattagtagaagaactaatatgcaagggagtcaaaaaaatataggaagtcaaagagatagccagatggttgatgattttataccatcttgaggttacagaaagaatgggagcttgggcaaggtgcagtggcttacccctgtaatcccagcactatgggaggctgaggcaggtggatcacctgaggtgaggagtttgagaccagcctggccaacaggacgaaactctgtctctactaaaaatacaaaaattagctggacatggtggcacatgcctgtagtcccagctactcaggaggctgaggcatgagactcacttgaccctgggaggtggaggttgcagtgaactgagaccatgccactgcactccagcctgggcgacagagaccctgtctcaacaacaaaaaaaaaagggacttggactttggcaaaaatagttatgggagggataa

SEQ ID NO: 914352 - DNA, 4001 bp, Homo sapiens
tcccactggagactactgctggggaagttatggtgcacaggaaagaggatgagaaagtggggaagaccaggctttcgactagctgagaggtagggctggggagcacgcacctaggaaggctggcttctgtaaagtaattgggaggtgggggtttgtgtttctcccagatccagctgtctgagaagttcaggaaagtgtggctgtcccctccgcccaccccaaacacactcccaccttcacagaccctcccaaggacagacttcccagacacagatccggaggtggctcacagatgtgcaggatcagattcaaggtgacacgcaccagcatacacagaaccacagggctgcccgggcccggactgccccacagaggcggcagatgcacacagaggtcagccacagcaccccacatggagggctgctcacccacagaggtgcagagggtgccacctccaccagccaccttgaaggtaccttggagattgtcaggaaggatggggagggcataacagtgttttctctgtaactcccctctcccccgccatggaaggagtcccactcttaaaagggagctctggctcctttcctaccatttgttctttcaccaggctcagttcagttcccctctggcctggggaggtgtggggtgggggaggggccggagtgtagaccgcgagagggagaaggggaggaggaggggacggcaggagcctgtccagggcttccgggcggagtgcagtcaggggggcctcgacaacctcactttgccgtaccagtggcagcccagatggtgggagcaaggtgcttattcaactgctgccaggattccttggtcctggaggtactgggaacaatggtgggaatcagaggaggggacaaggttgggtggccaacctctagagtggtgggatttgggagactcggactgggccactgtcagagggggctgacacctgttatagtgcccctgtggcggacccttcctccaggtcagggtccccagctgatgtgtctgtcttgcctcaaatccttccagacggcgtatgtgtcagatgaggagcaaggggaactaggcagccaggggagacgaggagggaatggggagcttgggaacacttctgccaacaaccacgtgacccccggggaatggctggggaggggtccctcctgctgtccccaccagcccatttgagcaggggctagcttgaggcatccccatcctgtctcccctctgctcatgcaggcggagggctaagggctggcctgaccaccttaccgtctgcggggggctgcccacggtcatctccacgtagtagccctgccccgacttgcccctcaggttgtccaccatctccacaaagctgcccctccggccgggctcctcgggctcttcgtcggtctcccggggcagccgcagccccaggggggcgccccccaggccgctgcgcaggggcagccggatgccgtgctgggtgccgtgggcaggcagcactcccgcgcccatccacagcaggagccagggcagggcttgggccatggtgggccccggccttcgggccctctgggctcgcactggcccacgtccgtccctggcgcctgcccccaagtctgggtggtgctggtggcttctcaggagagggagcttgggggcatcaggacgccagggcctgcagggccctgggccagcccccgggtccgggctgtggagagcggtcaggggagatccgcagagcacgggagcaggggagaggctgggatccggagcccgctacatcggcacggcggcggccagcctgggcagcgggcgcgggctcccggcggggctgggaggggcgggcatggcgggccggtggcggcttccctggtccccccggcgggcggcggcgcgggcaggggcaagggctccgggctcctgcggctgcgttggctgctcaggccaccataatccagctcgcggctcgcagctcccgggcgggctggggaggcggaaagacttgtggcggcggctgtcaaagccaaaaggttttcgcttttccctgggatcgctgggaagtgtagtcttcccatggcaggcaatccggcttccggggctggagaggggtctgggatgccctctgccgaggtggagtccgccctgcaaggccctggcgggaagggccagacggatggagaggggcacacctcccgtctgtcagtctttctttcagcatggaaggagcacccactgtatgccaggcacactgccaggcgctggagatacagagagaaataaacggtgattctacacgggacagttaagtgattcctgccgcggtggggtttcacactatacgatgtggcattaaggagtagggatttggagggacatctaggggatctgggaagactcagtgggagaaggtggtatttaatttgagcgtttaaaaatgggtaggattttcacgagcagagattgagggagcaggatgaaaggggaggaagagtttttccaggctgcaaaccagcggagcagggtccaaaaggggaaagtgcagttgtcttattttctcctgcgcctgcgatctgcgggcaggtaagagccagtgggtcttctcccatctgaacctgtttgtgcccttgaggctctacttgaatccttatggctcctctgattttctgcaccatcagccagactgaggagaaatggctgttgatagctttaaagtgttaacactccgaaaagtatctctatattaactggtaagagcttaaagccttgaaccaaaagcgttagagttctaatagcttaaaggagaaaagccggtatggttttaacaatatattgtttatcaaatgtggaaagccattgataaaattcagcagttactctgatttaatttttttaaaaaatgaaagggaatcttcatttttcttttgaaaaggagacttgctctgtcacccaggctggagtgcagtggcatggtctcaagtctgcaacctccgcctcccgggttcaagcagttctcatgcctcagcctctgagtagctgggattacaagcatgcgccaccatacccagctaatttttgtatttttagtagagatgggatttcaccatgttggccaggctggtctcgaactcctggcctcaagtgatccgcccacgtcggcctcccaaaatgctgggattataggcatggaccactgtacccagccaggaaactttttaaacaagataacgacaacaacaacaaatgtagtaataacaggctacgttactcccattaaaggcaggctttggaaaggaaagatcattatctctactctttttttttttttttttgagaaggcgtctcgctttgtcgcccaggctggagtgcagtggtgggatctcagctcactgcaagctctgcctcccgggttcaggctattctcctgcctcagcctcccgaatagctgggactacaggcgcctgcaaccacgccccgctaattttttgtatttttagtagagacggggtttcaccgtgttagccaagatggtctcgatctcctgacctcgtgatcctcccgcctcggcctcccaaagtgctgggattacaggcgtgagccaccgcgcccggccgatcattatctctactcttatcctacacggttcagaccggtctgattgactcaaaagacaagaaaatggaaaaagtgttatatatgttggaaagcaaaggaatcattagttgcagattatatgatatggatagaaaaccctaatcaataagatgattagacacaagttaaaaaaatcgaaatcaaaatagagaaatgtatctatgggaattgtagatatgatagagatggcattcgtattagaggaaaatggacgcattattcaaaaactgttgttgggacgtctggcagcccatttggaaggaaaaaaaaccaaatccaatttcattcctctgaaaataaactccagatagattaaagaatttaacattaaaataaaactacaggaaaaatagaat

SEQ ID NO: 914353 - DNA, 4001 bp, Homo sapiens
ccatctctaataaaaatacaagaaattagcccggcatggtgacacgcgcctgtagtcccagctactctggaggctgaggcaggagaactgcttgaacccaggaggcagaggttgcagtgagccgagattgcaccactgcaccccagcctgggcagcagagtgagactccgtctcaggaaaaaaaaaaaaaaaaaaagaaaaagtaaaaaataaattaactgggtgtggtccacacacctgtattcccagttacgtgggaggatcacttaagcccagaagttccgggctgcagtgagctgagatcgcacctctgtactccctcctgggtgatagagcgagaccctgtctcaaaacaaaacaaaacaaacagaaaaaaagaaagcaagctatggggtccaatctgagagaatcgagtgtgggtgtttatccgtaagagagcgaggggaaagaggcctcttaagccttcttaatcctgaaaatggggaggaggtcttttaagctgcagtgccagagtgacatgacctagttttctatttttagagatggggtctggctatgttgcccaggctggtcttgaattcctgggctcaagccagcctcctgagttgctgggactacagacatgtgccaccccacccagcttgacctggtttttgtgttcagaagatatctgttgttgttccaggtgccaaggccagtgctgggcacaggggtgctagagcctactgagaaatggacatagaaccccagtgtccatccttccatcttggagcctgtgcttctcaccccacacagccctgctgtctgggaggactgtctgccccttgaggtcatctgcccctggccactgtgccaggacagtcctgctgtgggtacgagccacagggcaagaaagaacacatctgggagctggaaggcctaatcccagggaaagcatgtagcctggggcagggcaccaaggaggcttccagcccccacattctaaggaaagaaacaccaggaaggtgtggccttaggcaggccccttttccttttcggatcactgcctgcctgtcactgatttctgtcctaaccccacactaatagctgctatatatatatatatgtattttaagagctggagtctccctaagtcactcaggctggccttgaacttctgggctcaagcgatcctcctgccttggcctcccaaagtgctgagattacaggtgtgagccaccacgcccggcagcaaccattttttagctttaatgtgcaccagctctgtaatcaagtgcatcctatatgttcctgctaattaactcaacagtcctacaatggtggttattaattgctgttttacgaaagaggaaactggggctctgagagtttggggaccgacccaaagcattcagtgcctgtggatgcaactgggatgcagggagccagtgggctgggggtgaggtgtcccggcaggtggaggtggtggggtacttacctccatgatggctgctgctggttggctgctcctgctggtgactggcgtcccacaggaggcctggggcctggcgatgatgcttgccggagcctgagggcccgtcccctgcggggctggggcccaggcccctctctgcagagctggagtcttcctgctcactcggctcaaactctgggatctggaacatgctctgggctgtgaggacaagatgttacgtagtcaaggcacagctggggccaacggtggccctggaaggcagaggcaggtacccctggcttcctctcccaccgtagcgcccccaggcccgccaggcctcctgggccctcatctgtctgccgggtctggcctggcagggagctgaggctgtcggctcaggacctcagtctcccctcagaaccccggtggacccaggccccgccccgcccgtggtgacggcgcacaggtctcaccccaagcccgatctcgaggcccctgacccgggcctgccgcctccctccagcaccccgggctccgggccctagttgcttgggcaacgggaactgtcagcgacctggcccaatcacctctcggaacgtcactcgggtaggtccagaggcggggtcaacccggcccggccccgcccccccgccggatccaaggctcctcgtccgcatcctttttcctccctccttcggccccggggctcacatcctcgctgcctcacaccttgggcgtgtgtgggagcaggagagggattctctggggtccccatttggaacctggagacccacttctgccaacaagtccttcagcccctctgggccttagtttccccccagtgaagtggggatagtgacagctcccccgggagccagtgaaaactttgtgaagggagtgattactgcgggcgaaggcgcttggcacagccacaactgaagctcagccgtcggatgtgattattgttgctattgttaccgctccgcctggactgggtgcccggtcggaaagtcccgctccccgctcctcctcccaggcgcggaagcttcgcgccgcccgcctcgggggacacctcccgcgccatctcgggggcactggagataaggaaaggaacctcctccctggctgggatggctgcccgggcgcgggaggagggccggggacccggtgagggaggaccgtagggcccgtgggggcttcacgcctggcaggcggccggccaggtgagcagggccgcgggcgcgccggggcgaggggcgggcccgcgcgggggattcggggctccgcgggttcaggcccgggggcggggcccgggggccatcttggctatgggcggaagttttcttcagagaccgagggacgggaatccgttgccgcccccggccgggcggcacgaccccgatttgggtataggagagaggagcgtgggaactggcggacccccatacaagtaaaggcgggcggcacggggcacggcccacccggggaccccctggatgcggcacggcccccgcaactcggccgccctcctgccgcctcccgtaaccccgggcgcccgccagcggcgcagctcgcgccaattctcgtacggtttcacgccgggtgcggcgctggactgcggagccagccgggccgctgcgcaatttgcgtagcgaacggcgcccgcgcaggcgcggagggggaggggggcggagcagcgggagccggggagccggagccccgggtccccacgacctgagccggctctcccatcagcggcctgaggacctggcgtccgcctcctccctccccttgaggctggagcgtggacgcggtgggggagggtggggcgggggcagctttcgagaattacgaggacaggaggcagaggccctccccatccgcattattggaggagagagagcctcccccagcttggggagggggagagcggggcattgggcgcccctcgcagcggccgctgccctgacccgacgggtatcagccggctctccccctccacccaggacgacatgaacgaccgaggccagggagtcctctccttgggcctctgcatccccccatccttggctctggggtaggcccagggaggagacacccccaacccctatccggtctgtcctggagaaaagagactgcccttccatgcccctgagtgaggggcctggggcccaggctgcctgtgttccccaagggcaagggtctctctgttgaggaggaggggcctgtcagccacaacttctttcctcctgagcgccccatctccctctctgcaccctgcaattcccacccctccgtatttatttccctggtcccgccgacagtccctccttgtctgtctccgggattcaggcctccctccctgacatggagagtaacctgtctggcctggtgcctgctgccgggctggtgcctgcgctgccacctgctgtgaccctggggctgacagctgcctacaccaccctgtatgccctgctcttcttctccgtctatgcccagctctggctggtgcttctgtatgggcacaagcgtctcagctatcagacgg

SEQ ID NO: 914354 - DNA, 4001 bp, Homo sapiens
gccaaatggtatcaaacggattgaaagtgagggtgggggtgagggatggggccgggaatccattcaggaaagctggtaactgtcaccagggaactggcaagggaaaaaggacgggggaggcatgcaagagcgagaatccaaaaaaaagttgaaatggttaggggagaaaactcccaaaagaccccggagtacgtcggaggtgagtacgacaatagcaatcttttccttcgtagaggacaggggaggagtccctactcggctgcaaactctggatgagggctggggattgagagcttcccagagagcatcacaagaaggcgtcgcaccactctcgaaggcatccgaagcagtcccgggactgcttggcgttggcgccacaagtgtctttcagccattcccggaagaggtcttcatctttctttagcaccagaaactggccaaggacaacataggcctgcaaaacagggaaaaggaaggagcgtgctgctcagtgctcagtgagagataagagcaagacagccattcctgtgccattcagagcacacaagcccaggaagcagcgcgggttttgcccccctctcctctccaccaggtgcccaggctctggcagcctcttcagattataccttactgtccatcccccagcagatggaatcacttcccttccaccccccgcttgcactaggtacacgcagccaccccacaccttgtcaaaacccctttcctccagcttcttgcccaggacttcaccaatcccagccaggctccccactggcttctcccccatgggctctgccacgaagtctcggtgcttttgggaggttgtcatcttgatcaggcttaatctaggaatcccaaaaaaaaggcagattagggctgaagacctggaacttctaagggcccacgagcaatctcatagtaagaggaagccaagccaggggttacagtggcttgctcgatccccctcatcctgaaaggagaaaacagttccagggagactcttccctactatttttaagaggagtttcttcctgcaggacctggattttgatcttgccccagaggaaaaacgatcctgcctaacaggtggcgcaagcggggcagtggaaagatgcccagagtccgtagccagggctgcgcggaagctatcactccctctgtgaccttggctgaaccaagacgacactgcctgcctggaacggccacttggcgtggaaagctaaccaaagggtctctctacctacagggcgaagcgcacacctagcgctgcgcacacccgctccccgcccgcggggttcacgccgcgccccagctccgcccccaccgcgcgccgctgcggcccgccccttcccgcggcccggctcccacgcgctgcaccccgccccctccccgcagcgcggccaagctctcccccagggcccgccacagcgcctgcgacccctctcctccccttctccccgcaacccctctggcctccaatcagggccctgctccgcggctggcgctcacccgcaacttcagttcccgtaacggttcctcccgccacccggccgctcctgcggatacctcaagccactagaactttcttccacttccgcttccgggtcgcttcaagagccgcctttaaaaaagaaacattccacgttgggcacttctagccagttagagctatagagttgaggcgccccggacctcgacggcgtccttagtaggcgctcctttccggtccttcgcgggaagccctgccttctaaggtctcgcttctcgcgcagttctgagggagataggcctccagggagaggacttcctttctctgctgcccggacccggaactcaaggacttaggcttgacggacctggcgtggggaagagttagaagacggacaagggaggggacgggaggcctccgagacagcgccggaagtacggttttcggagggatcagactcagactcacgtcgcactcctcgcagttggactggtgggaactgggaacactggagacctgatttctaactgacgctaccgtcgcggccgccggcaagttcctttactgtgttttcttggttcagccttgaagtgagtcgtggacgatcctctctcagcgtccagcctagacggcggtgttgctccggcagcgttcctgggagccgagggccagagactaagtgtgggtgtttctctgagggtcttttctccgggatagacagggaggaggaaggaggacagcaactagagacgacagtgtttctttcggaaaccatcagtcttaagggtactggccttcgtcttctaagtacgcaagtcagaaatatgcaaatgtcgcagacaagcctgctcacctcaacctttaattaactagttcctggcttgaaccatcacggtggccacctagtttgtctccggctgtagtgtgttgccagactgaacttctctgttgtgtgactatgctagacttggggtgtacaagcgtgttgagaaagatacggtttatttcaaactccttccagagaggttgccaggatgacttctctggagcatgcgtatagttttatattacactagtacttaagattataggagttactttttttttttttttttttttgagacggagtcttgctctgtcgcccaggctggagtgcagtggcgcgatctcggctcactgcaagctccgcctcccgggttcacgccattctcctgcctcagcctcccgggtagctgggactacaggcgctcgtcatcacgcccggctaattttttgtatttttgtagagagagggtttcaccgtattagccaggatggtctcgatctcctgacatcgtgatccgcccacctcggcctcccaaagtgctgggattacaggcgtgagccaccgcgcccggccggagttacttttacatgacatgcattgtattgtcccattctgttgtagcaggacgagtcgcagacagaactcctcagacaccagattaaagaaggaagaggtttttttattcggccgggagcgtcggcagactcgtgtcttaagagccgagctccccgaaaaagaaattcctagcccttttaagggcttacaactctaaggggtctacgtgaaaaagtcataatagatcaagtaagcgtgagaaacgtgactgggggctacatacatcagctaacagaacaaaaagttttacagtgctttctcatacaatgtctagaatttacagataacaccagtagttttggtcaggggttaataatattattattattttagccaccagggccaggtggtggtgccaaggtcgtctagctatttatcttacttctgtttctttccaactttttgctttctcccttttctcctgtcttataaactagggaaaaggggaggttggagagaaactaagaaggccaacaggagaagtggtggcctcataccatactgtaacagtgctgagttagctgttatttttctgggacctagagaagttgaatagttaggaaataaaccaaggtaggatttgaatccaggcagttagacttcagaacccatgttcttaaccaagacaccgtgtcacccctcagtaaaaggcccctccccatcttcagaacagtcctgggttctgagcctgccatccaaggaactcaggaggaggagttgacagtctcttcgttcctaaccagtgtgggacgacttcagcatgtctcaggccaccaagaggaagcatgtggtgaaggaggtgctaggggagcacatagtgccctccgaccagcagcagattgtcagggtgagtggcgtggggcacaagctgttctgctccccacccctgcagccctggagggcccctggggtgggggtagggtgcagcgtgtctgagagggtgtttgatctgactgatgagactgattcttggtctctcctgaaccaggtactcaggaccccagggaacaatctgcatgaggtggagacagcccaagggcagcgcttcctggtgagcatgccctccaaata

SEQ ID NO: 914355 - DNA, 4001 bp, Homo sapiens
taaaacacgacacttactcagccacctctgactgaatgactattctctgcagctatttattactcctcttctgccacgttttcttctatgatccaattctgtgactcctataagccaggaaaagctgccttcaagtcaacacagcacaaagtcactgaaaattctgccggcactaggctctacctaggtgcttagaagttgttctgttttgtcctgggaatgtcccatacgcaatgttaatgactgaaacagatcctctctttttcctcgaagggaattgagttattataacaaaggatgatttgtgctcaaaacaatattcaacttatcacccctattcagtatgtatgtgtccaagggtccacaaccacctatacacaaatgtaaaaatatcagttctcaggagatctatcttgtttctaaaatttcttatttgttccttgtttcatatatttcttggttttaaaaattcagtattacaaggcttgttatgggacatcaggcctaattctaccttacagacaaattaactttaaaaaggcataactgaatacagtatacattttacaaccaaatacatgtaggaacaatttggttttaaaagaacttcactgtatgtatttatcatatgtttactgattgtcatatagggactatcaatggaaccaagagaaaatacaggattccacgcattgagcattaacaactcaaatgttccaaaaaatatcttccaaaactgttggcccttcattttttcattttaagtgtaatttaatttatctcatgcctctcatgcaactaacaatctcaaaggttcttttggtttggaaatactttatgcttacctttaatggaaagcacactcaataacttttttctgataaaaagtgctcctacttctttttcgttttattatacccatgttccataacctaaatcctaacaatgccgagatactttgaaacttggatcttctcttaatgcattcaaaattttaaaagtaccttggatttattttcgatagaaactctactacgttttcaatatatgtattaagttctctttatctttactattgctcttacctcccgtgaagagagaaaaccaggtgtgagtaatgttttcattgttaccattgctggttttggtcacttaagacaaacgagggtgaccttttcggcttgacttaagacaaacgagggtgaccttttcggcttgtgccacaaagacaatgtacttcagaactactttctcagagggcgatcattgtaagcaaagctcagtgaattcgagattttgttgagaacctcaggatactgatttacttgcaaaattcacagtggagacagtaggaggctggacaagttaactcaaggtgagatgcaaggccgccaagctcaagtttgaaattcacacacaccaccacttcctgaaacaacgatttagacgctgaacctgctcaagtgtttgaactttcagcaggaaacgaggaagcgttctcctccgagcaggacaatcaggcgttgcgcgagcagcccactcctaaggccctgccgcctttatttccactcgtgccatccacaccttgcgtggtccttcccggccacgtcgcagatgcctttgcaatgcccaccgcttgctgaggcgcaggaaaagaatcccttaacttaacccttcctctcgccctcggatcgcaaagcacaggccacctacacggacgtgaaagctaccgaaccccacttatcccctagcggagcgtcttacccgtacaggaatgcaggggcttgggtcgcacgaccagcgacgggcacacggagtagagggaaagtttctcaaagtaatcgcaggtctccttggagaggatctcgtcgatcatgaaagtcttgtagcgccgcctggctgctttgagctggccgggcgagctcagcctcagctcggcgtggcagtgcatggtgagccggcgcgagcgtccgccggcccgagcgcggctgcgagtgcccggcccgctggggccgcggggctggcgcgacggcggggcctgggccccgctcccggcagctggggaggcggcggggctcgggtggcgcgcggaggagagcgggtagcgggcgcgcctgccgcgcgtctagacccacccgcagatcagcatcttcgctgagcctttttgggacaacgcagctgtcaatcagcgcgagcttcctgcagggccgggtgcggagtgtgtgctgaggggcgtccgcgcccaccccgcccccgcccgcccgtgccactccggcgccgacctgcgcgcctagtgcccggcggctctcagtcgctgcctcccgctctggtgtctcgcgctcctctgcctggctctctattttaagacgctcgttttggctctcctccccctcccccccgggacgcgctccaggtgtgtgtgcaggagtgtgcgcgcggtgcggggagcgcgcaccgccccagcccgcggccaaggcccaggccggtagctccccggggcagtgttccccatgagcaccttactgcctgtcctgccacccgccggcccggctcccagtgtccgcagcccagcgggagggcacgttcaggtctcttactagaaagaagtctagtcctcactaggctcccgggacttcgggccacagagccagtgcccccgaggacccaccgtgcctttctccttccccgcgtggacggtttcccgaagaccgcggcttcccaagccctccactcgcagtctcgcagcccgcgctgagcctgcgcgctccgagcgtaagacttttgagctgaagttgcaaacttgactgccccaagatcccaaatcataaatgaccctggccccgtccgttaccctcataaaaaactgagaaaaaaaaaaagataagaaaagaaaaactaataaaagtgtgagttatcgccgggcgcggtggctcaagcctgtaatcccaacatttgggaggccgacgtgagacgatagcttgaggtcagaggttcgagaccagcctggtcaatatagggagaccctgtctttacaaaagaaaaattaaaaacaggcatggtggtgcacgcctgtagtcccagctactggagaggttgaggcaagaggaaacctgtagtcccagctattggagaggtttaggcaggaggaaatcttgagcccaggagttcgcggctgcagtgagccgggatctcgtcactgcactccagcctgggcgacaagagcgagattctgactttttaaaaaagtgtgcggttttttttaaaacattgtttataaaaacattttttcctcgttggaaagggtcagagctgcacgattctagggagccggcgggcactggggcagcctgtcccatgcgggcttctcccagcgcccgagtcttccggcaaaggggctttcaatatccggatccctcgcgatacgaccgggttagagagtcgcgaagacaggcgtttattgggtgatttgcctttttctttccaggctcttagtcttagggtctgttccaatcaaaatctgtacggactttagttgttcattggaattgctgcgtaaaggggaccccgccgagcctccgcgcccgggaagcctccggcagcctgagtcgcgcccggtgttcggcgggaacagcccagtgcacgcccgtttccacgactttatgttggaatgagtgtgcatggggttggaaggaaaacgcacgacagggacactgagaagtatagacgcggatggccttccctagggccgagtttggggccggtgacatttcctccccgctcccagcctagaagcgtccgcgagtgccggcgggctctctgcggagctgcttgcccagggggccctggtggccgcggaagcaagtaaatgagggcgcctgggccggtgattaaactaggagggagggacacgcccagaggactaatcattaggctgttagagaaaatagattttttcttttttttttgagaccgagcctcactctgtcgcccaggctggagtg

SEQ ID NO: 914356 - DNA, 4001 bp, Homo sapiens
caggtacaagcccatccctgcctgcaaataaccttgcacagggtccttcctcattctttcctcttcctttttgtttatgagatgaatggctcttctgctgtggctttaggggcagtggggaggcagggagctatttgggaacagcctggaaagctgaccctgcagaatctcccagaagccttggtgtggctatgggtacccaggctgtagaaatcccagatggtcctcttccagacctctccccaactccagctcacagtttcagcttcttggcactgaaaacactactaggggaagcaagagtccacttcagggcttctgcttggcctctacccaccagggcttggactctggacctgccccagctaggttggggtttctgggactgcatggctctggccctggaatcacgaagcagtggggagagcccttctctgctctgagcatgcaaaccttctcacaccagcccacggtttccaggatttcagcccctaggatgcctgggccaggacaggagaaggaggagcagagggtggtgtttcgggctccaagaaagtcttcgtgaccttggacttgtcacttggcttccctgagcctcagtttccttgtctgaaaaagtggagtgataatctcgatttctcaggtcaactgtgaggttgaaataagatattggtggtgacagggcctgtcacagtgggaggcatcagtggtggcttccttttcgactgtgaaatcctgggccagctggtcagccacgcagggcagcacccagtagtgagggaggagaggcccgtgtgctaaggctgcttcctgagcccaaagaaggggccaacccagctccgaagaccaggttagaagtggacttgagcagaggagagcagaggaaaggccaggagagggtgagggctgggatccacaaccagcccttgccaagtggctgctgagagagcaggtttgtgctccctgctctgcagacgtgcaagccccagggcagaggaagggttgtcgggagaggaccccagcttccctctggtgggatgctccagctcgaggggctgtggaggggcagtttgggccgtgaggctgggctggagggcactgagcttagaggaagacccctgcaggctggaaccagtgtgcgaggcaaacaggagagggctgggggacagctggacaggaggttcagcaaccacagcggggccaagggacagtgagggcagggggcactggaggaggctgggagaatcatgaggctgtggacctggagagagcggctgagctgggtaacaggaacccggggtctggaacagctccagctgctcccggcagccatgttgtccctgtgggccagggcccaggagcccctcagcctggtcccagcagcccaggagccctggagctgagcaggaggcacaatccatggggcacaggcgctcatgcacgtgcagggtccggctccaccacgccagctcggcctgcagggactggatctccttccgcagggcgaggttgtctttttccagagactcgtgctgctgcagagaagcagatgggcggggaggggaacctcagccagtgtcaggggccccgcatgagccttagccccttccagggtcctcaacttcaggagaaagatgccaccaccattggaatagccaagtggggtctcttggccactctctggccagcccttcataaccacctaccaagtctcccctgtcccaccctctgaagggggctcagatccgcctgctgtcatcccaccactagtgccctgagccggtgccatttctcacctgggatatgcacgggcctccaacccgtgtgtcccccaaaccacctattctcttgcccacaggagccattcagcaaccatgtcattaattgcaggttaaagccctttagaggcacccaccaaattccctgtggtagaattccaggcctgtgtagtggctgcagctcagacctccggtctcctctctctcgccttctttcttgctcccctcccttcctgaccctcacatgaactctgcttcccggccacatttcctgtttcctctgcctggacacccttccgccgcccttctctgtgcaaatcccaacagggccttcccgtggcaaccttgatgtcattctgtcctagattgcttattgccactgcccttttgagggcccagaactcgcccctacgagcactgtgggaggattcaggggattgttttacaggttgacagcatgagtgtgttcgattctgcatccctgaatcagcatttattaagttctgttctgctgaacgccggttctgagaacccctgagacacaatcaatgtgcagttctaaataaccatttatgatgacagtaatggtaaaaatgcagaaagaattttatatccacatctcacagggctgaataaattgaacgacttccttcagtcccccacccccttttctggacactttgaaagaagaagttgcaaaggtgttttgcataaaaatgtggttttggccctggactcaaagttcttttttttgagatggagtctggctctgtcgcccaggctggagtgcagtggctcgatctcggctcactgcaagctcaagctcccaggttcacaccattctcctgcctcagcctcctgagtagctgggaccacaggcgcccgccaccacgcctggctaatattttgtatttttagtagagacggggtttcaccatgttagccaggatggtctcgatctcctgacctcgtgatctgcctgcctcggcctcccaaagttctgggattacaggcgtgagccaccgcgcccggccctggactcagcctgaaagccaccagccccattgccacgctggtttctacatgtggaatgatgaatttttttttttttttttttttgagacagagttttgctctgtcgcccaggctggagtgcaatggcataatctcggctcactgcaacctctgcctcccaggttcaaacgattctcctgcctcagcctcccgagtagctgggactacaggtatgcacaaccatgcccagctaatttttgtatttttactagagatggggtttcaccatgttggtcaggctggtctcgaactcctgacctcgtgatccgccagccttggcctcccaaagtgctgggattgcaggcgtgagccaatgtgcctggccggaatgatggacatttctaaaatgtatcattaggccacccttcacctaaattctccaaaggcttcaactcacctccaggaacggagtcactcactcattcatttattcattcgtttgccaccttcaggaggctcaaggagtaacaatttcaatttcatcccttccctcttctctgctttagttttcccaacaggatttaacaccatctgacatcctgaccactctagggactttttgtttgtgggtctggcttccccaggagaatatgagccctgtgggtggggctggggtgggcgtttgtctactgtgtctacagctctatatccagtgcttagaaatgtgcctggcacacgggagacgctcaataagcatttccagaaggaaggaataaacggatgcgtgggtctcctaggcaccattctgagtaccagtcctcactctcacctggtctacagggtgctgctccccacgcctgtgccagcactgtgtcatttgtccgcaatgcgttttcttaccttcatcctctgggaaaacgcccatttgtccttaagctcaggcttcatcgcctttttttgttgttgttgttgttgtttttgagacagagtctctctctgtctcccaggctgaagtgcagtggcacgacctcagctcactgcaacctccacctcccaggttcaagcaattctcctgcctcagctactgggattggctaattagctaccacatccctgtaatcccagctactggggctgcctaattagctacaatgcttggctaatttttgtatttttagtagagatggggttttaccacgttggccaggc

SEQ ID NO: 914357 - DNA, 4001 bp, Homo sapiens
ctcatgttggccaggctcatctcaaactggtcttgaactcctgacctcaggtgattcaccagcctcggcctcccaaagtgctgggattacaggtgtgagccaccgtgcccagccgagccccatattcttgaacccaatcgccccatccctgcaatggaagcaccacagcagagggttaaagcccatgcggcaggcagcccagagccggcgtgccataaagctcagcttccattcttctcattgccatgatttccacaccaaggtgtgaactttcctaactgtgagctccatgagggcagatgtggttctctgtgctcatgcccagctcaagcccaaagcagatattcacttactcaacaaacatgtataagcacctactatgttccaggcagtaagctagagggacatgatagcaaacaaaatacacacaaatccctgccctgaaattgctcacattgtagtggggtggtagcgaaggatgaatgaatgaagggtttattccggtggaagagtggactcaaaggttgtgaccaccttgtaccctgggatcaatgaaacttagataaaatattttacccaaatgtccagagctctgcaaagtcagagcaagagggactgttggagagctcacagcccagcccccgcccccaagtctctctggggtatgtgttttgagggtaaggacctcaggcaaggccctggccgccctggctgcagattctgaatgctcctaggctcctgctccatatgctcccttgggccatgtccacagcgggctcactgtagacactggggcaccaagaaactaaaggctgagacaggacccacggtgagtgaagggggctcctgtgagataagcagagcctccaagggaaaccatggcccagggaatttatttattattttactttattttattttattttattttattgagacagagtctctgtcgcccaggctggagtgcagtggcgtgatcttggctcactgcgacctccgcctcccaggttcaagtgattctcctgcctcagcctcctgagaagctgggattacaggcatgtgcctccaccacgcccagctaatttttctatttttaatagagacggggtttcaccatgttggccaggatggtctcgatctcctgacctcaggtgatctgcccgcctcagcctcccaaagtgctgggattacaggtgtgagccactgagcccggcctattttattttattgagacagagtctctctctgtcacccaggctggagtgcagtgacatgagctcagcttactgcaacctccatctcccgggttcaagcaactttcctgcctcagcctctcgagtagctgagactacagacgtgccctgccacacctggctaatttttgtatttctagtagagacggggtttcgccatgttggccaggctgatcttgaactcctaacctcatgttatctgccggcctcagactcccaaggggctgggattacaggcatgagccggcctgggttatttggagaaggaaggaaaggctgctgtgagtgtagtgaggggggaccaggtacgttaggagagagcaagtacacagaggccaagttctaaaccgaaggctggatctgcaatgtgagagctggaaacaactcattccaatccaatcccgacttcgggggaggaaagtgagacccagagaggggcatgcagagccctctgtcacactgctcagagtatagagctgggactaggagctcccgactgcagccctcactgcctgggcactgaggacgggatcccagctccccttctcatccccgatccccaatcccctgtactcactgtctgggtcagcagcccattgcccccacagaggtgcatggcttaggcgggggagcagagtggtccctcagcagctgtgacttcccagtgccctctggaggcctaaggaagtggcagctctttaaatccccagtggccactccgcccccagagggccaagtttcagtttctcctaaagccaccagctgctcagaatccctggctcaggcttgctcacgtggctagaatttcctaacatgaactggccttccggttgggccccttctctggaaagaggatggtggagggtggagaggagggaagaccaaaggccaggtatgaggagggtgttctaggggagggaggacaggcggccagggactgagatgagagaagaagccagtggggaccgatgctcatgtggggtagagagagcccttgagctctggaattgggggaactctggatcacagcacacattggagctgtccaactttcagaaagtgactctccttctctgagccctagttttctcatctggaggatggtacaactacccactcccaggctcattgcaggaactaagccagataatacaaccacccccaaaccttctgagaccactatggaagcatgtctgcaaaattaagcaatggctgttggatagaacagatggatacattactgttttcatacaacagaccatgaagcagtggaaagattgatgtccagtggttaggagcccagcttccaagctatgtgacttgggttcgtaatttcatctgtgtttctgtttccaaatctgtaaagtggggataaaaacaattttgttaggccagatgcagtggttcatgcctgtaatccaagtactctgggaggccaaggcaggaggattacttgagctcaggagtttgagaccagcctgggcaacatagcaagaccttatctatattaaaaataaaaaaaataactgggcatggtggcacacacctgtattcccagttactcaggaggctgagatgagaggatcacttgagcccaggagttcaaggctgcagtgagctataatcttgccactgcactccagcctgggcaatagagcaagaccttgtttcaaaaaaattaattaattaaaaattaaaaaataaagacctagcaaaccctgaagccccgggcatacctgcatgcttgttgtatctctaagagggacacttggatggggcatctgtttgggggccagaggggccagtaattcctgtccaagaacagcatgcatgcagtatgtagagtcctatggtctggtgactagagcatcttggagttgtacctgagacctgagggctcatggctgatgatgtggtatcacaagaatggcaaatacagatatgatcttctgataggtgatggtggctggaatgttgttttaaagagttcatggacacctctgagcttagtaaaaaagagtactgcagttgattagcaatgtctgccacaccatgatcgattagtgatgcctgttatgggcagaggtgtggagagtgcagtcccctgctatccctagaaccaggcataaaacaagtctgggtttcagagacaaaagacttgactctccatcctggcactccactcacccagtttatcacctggagcctcagtgtcttcaaagatatgctggtgatcacaaagaaatgatacctatttgacagttgttttgaagatgggaaagaatgagatgagaagaaagctcttgggatattgtaaagtactatgtggcaaggattccccctcctgaaatttgtggtgtcatattctggattctaagattattaatgcaggctcctaatttaaaatgcctgggtgggtgagattgggcataagagctgggccttgccctcctagcttctgaggggcctgggagcagaggcggaagtgggatgccccacgcagtgaggccatccctgtttctctgaattattgtttcctggaaaccaggaaggctggggcgtcttgcctgaggcaggcacctgaagggctcattaagccagcccatgagctcccctgggaggatctgcaggcaccttgtgcatgatgtgactacgaagaaacacccgtgtgtgcttgtgtgtgtgtgtgtgtgtgtggaggggctaggcctgagtgtcccactccagatcccagcccctgccccagac

SEQ ID NO: 914358 - DNA, 4001 bp, Homo sapiens
agacattacaccatgaaggcttaactacattgttattattttatattttaacctttaaataacaaaatcaattaatttttacttggtaaggtggaggttgaccagacaatatttgtagtgcctgcagtttgacatcatttgagtacatacatactctactcaagacacctgctacctaaggttcttcaacttgaaatctttttaaaattataaaatggttattattattatttttaaacttggtttaataagtggctgagatacttaacaatttgtgaatatattctcatgtgaataatgaattctataaagcaattagaagccaggtacagtggcctgtaatcccagcactttgggaggccggagcagaaggattgtttgaggccaggaatttgagaccagcctggacaatatagtgagacccccatatctacaaaagaaaattaggcaggcatggtggtgcatacacatactctgagttacttgggaggttaagacaggagaatcgcttgaacccaagagtttgagattacagtgggctgtgattgcatcactgcattccagcctggatgacagagcaagaccccatctcagcaacaataacaacaaaaataatgccattagaaaaaccagtgcattctctaaaataggttcacaattctgcctgtcttgcttaaggcattaaatttcatgcaaacacttcatttgtaaattatacaaaggaaaactttagcttcactttagtggaatcaccattttcagattggaaatcaaattatcaaggctttgttttctgatgtaatgcaaagtactgggtttagattttaggaaaatttctaaattatttaaaccagaacatatattcattatgagaaaccttacgtttttaatcaaatccatacctgtaatataccttcttgagcttcgttaagggaacaaaacaattgaagatgtgcatagtggctttaattggccagcattttaaagaggcatgttatagtcagctttttgagcttaacaaagagctagggtatcatatgcagtcaccattctttgggatgggttgtggattattcagggaacattttgaaaatccaaccagaatcctccttgccccatccccagtctctttttagacagcgttctctctgtctcttctgtttactttctggatcagcttagggattataaagtaatttgactatcagactaagccaaacataattgggaaagagaagctgccaagaagcaatcagatccactgcattccaaaaccaagcctattctaaatgcttgatggaccatccccagcacagcccacatgactgtgagctacatgtgaatggagttctaattggatgctccccaccacctcagtccacagacttgaattcacaaacccttgcaataaggagaaaaggaagatgagctcaatcatacctgttctcagatatgctttacacagcaaaccacccaaaacttaccaagtaaagaaactgtcagctttggtccttagatcctttggagagggagcattctggtgcccgtcacatcccaggaatgatctgtccccagtttccaatctgatgtggtactttttcttggaagcctttttgctcctggcagtttcactgtggccctgcccccagacacagctgaggtttgtaaatgaggaaggatgtctcaatctgaaggtgtagcaactactgaagggagcttggaggttttttgtctttgtttttttgtgctgtgttttttttaaaaaaaaaaaaaaaaaagaaagaaaagaggctttatggcctagaggggaagcagttagcaagagaaaatactttgagtactgttggttcccaaaaccacaaaaccccaggactcaatgcaaagcattgcctcagtttggaatctttcttgatagaaggaaaagcagttctcacctgtcttaccttctatttctgtaccagcagtggcaacagcagcaagtgaacaagcagttcacttctttcccacctgttcagagtgacagctcatttattgcacaactcacttagggcagaggcattgagatgggcatttaacagggaggagctaccagcgctcaccctagcagaggtgaagtggtatctacttgtcaacagagtattccaatatgagcctctttaaagggagcttgagtagttatcagggactggtagaaagacagggattggtcccctaagcttgatgccctcctttctctgcaattttggctggaataggaagtagtttccagagagcttggggctgtttttgaaggtacttggttgcccagtgatttgattcacaacacacagcccttagggcaacaaaagggaaaggccagaataggcagcatgccagcattcagagcctgactgccaggcatactcttggagagtgcccagtgtgggggagaccctgttggactggtctcaggtcctaggtcctaacagagtctagattacattaaaagaaagtctacaggtggaaactaaggtccaggagagagacgcttgagtcatctgccctcctcccacctaacaccctcttcctaggcagatgtagaagcagcctgcaacttgttgcttcttgcccgaaggattcgcagggctgtgagtgagactcagtcaaaaaagaacaagaggtagccacacagagagaaaatgcagcccaactgtctggtggcctcctttatgggaaatctccccttccagaatgtcagcatcccctccctaaacgatgttttttcagatcctttaacaataaaatttaaactgtttccctgcatctgaagaaaggaacctcttttccactttcctcctttcttcccccaagtctccaggtcaaattactgacacccactggccagtgaaaacaacagcaggttttgttttccatgtatgagaggagggtgtgtatatgtgggtgccgtcataaatgtgaccagcatcttaaacccacggtaactgaagttataagtatgccaaaagcaatcagataattatattttaataattcatgacatcacagaaatatacacaatgaatttttcctttacactttgtactttagtaacaattactggaataaattaggtaaattctgtttcagctttaagaaagttgctgacaagaatgtgccagatataaatagtttctaatggaatgattaaatagaacaaacaataaataaaccgacaagtaaatctgttaataaagtttaaagacttgcacataaagaattgattctcagaaacaggtaaataatcaaaactctgctctccactgtaagaagcttcttaaatgaacatgggagtgcagctatctctttgacatacttattctatatcctctggatatatatccagaggtaggattgcaggattatatgagagctctattttcaattttctgaggaaccaccatactgttttccataacggttgtaccaatttacatttccagcaacagtgtatgtattattctattctcacactgctataaagacatacctgactgggtaatttatcaagtttactgactcatcgttctgcatgtctggggaggcctcaggaaacttacaatcatggaagaaggcaagagagaagcaaaggcacatcttacatggtggcaggcaagagagagcaaatgaatgaaggaagagccccttataaaagcatcacatctcgtgagaactcactcactatgacaagaacagtatgggggaaaccactcccatgatccaatcacccaccaccagatccttcccttgacatgtggggattatggggattacaatttgagatgagatttgggtggggacacagagccaaaccatattagtatacaaagattcctttttctctacattctcttcaatactcatctgttgtctttttgatgaaagccattccaacagtgtaaggtagtttctcattgtagtttgcgttttaatttacatttccatgatgattagtgatttgacca

SEQ ID NO: 914359 - DNA, 4001 bp, Homo sapiens
ctcactattgtaagcccagagccaaatacaaactaggtattcaatcaatatcatggaataattgtcgacagtgtatctcctcctgaccacatgctgatgcatttctgagtgtagtgtccccatgatgcctgacacacagtagggactcactatacacttgctgaattactgaatacattatggataggaatttgggggcaaaaaccactgagtcctattgcactctctgtgtggggtgggattccaggactatcttctagccacccacatgatatatccattgtggtgttgttgcccatggtgagggctgagctttggtagaaaaagcacaaaacttggaatcaaacagacccagttacaaattcagtaaacttcacctctttgaaactattttcccattcacaaaatgggaataaataaaatccatgtttatgtgcctccatggaatgtctagtccagaaatggatactgaatccatgctaacttcctttcttttatcccaatatatttctctacctttaaaaaacttgtatctttttaaatttacatttttatttaaaattaaatatatgtatatatatatacatatatatacacatatatatacatatatatacatatatatacacatatatatatatatatttttttttgaaactgtctcactctgtcatccaggctggagtgtagtggcatggtctcagctcactcaacctccgcctcctgggtttgaccaattctcctgcctcagcctcccaagtagctgggattacaggtgcccatcaccatgcccggctaatttttgtatttttagtagagatggtgtttcaccatgttggacaggctggtctcgaatgcctaagctcaagcgatccacccacctcagcctcccaaagtgctgggattgctggccttaaaattaaatttaaaatgtaacatttttactatggaaaattttcattcacatacaaaagtagagagactcatataatgagtccccatatatcccattatccagcttcaaaaattgacagctcatggcccatcttaaaatcttttgataaacatcaaacgttcacttccctcctttttactttccctccagattctagtgcccacccccaaccaagggatttgcccttccaacaaagaaatcaggttaactaagaggctttgtcttagtagaatccccagaaatatttgatctgctttactttctgcagtctgtattatgaaatcaataagttctcttcactttccatataaaaacaaaatttaacgctaaatgtgctttttcacagtatatgtgaattccagagtatgctgggcctattttcagccgtcaggaaatctcatttctgggtacacccccctaccctcaactctcctggctagggtgatatgcttaccttgtattccccatccccatgtaaatctgccagcgctggaaaacaaaagggccaaaaccagagtctcagaatcccagaggcttcactacaggaccattgtctgactccccatcccactagaacccagggttcctggttccagagactcacctaggcaggcagaaaaggtgtggatattggccattgggtcgtagtgcgcatccaaccacttcgaattggcctcattgctggaagtgggggaaagacagttggggagtgagtcccatgggaggggaaaaaaaaactttgaggaagctggtacaggtcactctgaacataaggtacagaacgtctgggtacaagtccaggctccgccactggctcaccgagcgacctccagacacacatatgcacatcttaggcctcggtttccctatctgacctcttaagagtccttccagactgcccgagaacagcaggagcccagagcccggggaccaagggaccctctttacacgggtgggaaaagaggccttgaggagccctgccttcacctctcagctccgcaggcgtcggaatccgatgaggacgcagcggccatcttcgcaggcgtcgtcctggcaaccggccccgccctcgcgtaacgcccaatagtgcccgagcacagggaagggcgagtacaaaggttccgggcgccaagctttcccacccaggctcaggaggacgcgctggccaccttcctgggttgaggaatctgtctcagattcctcaaagatatttatctttgctccttcccagtcagagccacctttccaggcgtctgggtcctacaatctctgggtcagccacagagccctctggcttccagggttggaaagaagccccttctagcatttatgagcagcaaaaagaactcctcctgtctccatcttcatggttacccggttgaaaaggaccatgtcctgccttgctgcgttactgtagaggtccaggcccagagaaacaaaacacgagggttatgggacaaatgcagaggattctgactgaagttgagtttgtaggttcccagaactttttttttttttttttttttttgagacgtagtctcgctctgtcgcttgcgctggagcgcagtagcgcgatttcggctcaccgcaacctccgcctcccgggttccagggattctcctgcctcagcctcccgagtagctgggattacaggcgcatgccaccatgcccagctactttattttttagtagagacgaggtttcaccatattggccaagccggtctcgaactcctgacctcgtgatcccctcgcctcggcctcccaaagtgctgggattacaggcatgagccaccgtgcccggccccagaacatttaaaaatgcaaggaatgccacaaaggagagctgcaaaaattgtgctatgttcagctctgtgactgcgtatcctcatctagagataatgtcaacatcctgttgtggaagggaggctaaaaatggccctccttgccccctccccaggccttgagcccatcactctgctgggagtaaatgagaagacaggcaaaggcaaggaggagccacacacgccgcaaagatggtggttgtctctaatatttatttgtctggttataaaattaatatgtgaggagcattggatttggtgagaacgttttgaaccctagctgtcacgtgccacctgcgggatctagaccagtgacttctcagaactgccatttcctcatctggtagacaggatggtaagccctgtcttgctcactccacgtatggcagtgcagatgaaatgagatcacagaggggaagcaattggcaggctggaaagtgctgacaaatggaaggggttgtgtcaccaccctcagctgaggtagtaccaaggtccaagctcctgcccctccccctccccagcccctaaatacacacacgaatggagggccacttgcagccttggtctgatggaattgggggcaaggccacacatcttcctcaagcttggccagatggggcctcactggggcccttccagaatcgggcatcggctgtggccagctgtgtgaggatctcctccaactcgggtccatcctctgggaaacgctcagagaaggatcggatgaggccagcagctgacgcctcgtattccagaagctgcacgtctgagcctggggaggagatggagagaaaacagcagggaaaggtctgaatagggaaactgaatcatcataaaaatcttaataatcacaattacagcagcagctgtttcttactgagctctgccaaaaaaacctgtgctctacgttttaggttaattacttaatttactctttacagtaaccctgtgaggaaggaaatactacagggggagtattaaatgcattgctgctttcgttcattcagtcaatcaaataaagatttaggctgggcatggtggctcatgcctgtaatcctagcaccttggtaggctgaggtgggaggatcacctgaggtcaggagtttgagaccagcttggccaacatgatgaaacactgtttatactaaacatacaaaaaaattagctgggcgtggtggcatgagcctgtagtcccagctactc

SEQ ID NO: 914360 - DNA, 4001 bp, Homo sapiens
gaaaccagggcctagagttggcagaattcacccacctcagccccaaaacacccatcagcctgcaagcttctgtggcaaccctgtcctctgtatcagacttaagcatcctctcttctaagatctgctgtcttcagactccttccaaggtctcaaacctcaactcccatatgtcccaacaccagcagagaagggccacaggacctggggtcactgcacatgcccgggtctcattccccagggacagtgggaaaacgcacaccagggagtgctacccactggtccagacagctggaggggaaggcctgaggaggggggcttggcaggccaggccggcaggcagaagcaggaggaaagggggaggggagcggtgtgtcaagcagatggggagtgtagcttgaagccaaggattcctgcagcctaggctgcgggccctttaagctccagcccgctccccccgccgcctccccctccccggagacctattaatagccgctggaaagatcacatcacgggagaggatatttatcccccctcattccacaccagctcagatttatttcagctctgctgtcctgctgctgccgcctggccctgtctgccggcttctccggggaggggggagggaggcaggcaccgccccctactccagctcccacctccagctagactgaggccagaggcggccttcggaccccacagtagggtgggagggggtctgctcaaaccattttaaggagggaagaactagaagggaccagaagccgcaagcatagctggctgccagtcccctctgccccccacccaggcccaggcactaaggctggctgcgcctcctgcctcgggccaggccttcccatgctaacccccctttagcccactggtggcctgggagccaggtgcccagggcggctcctctcctggccagcacagcttgggccccatcaccactgggcccttcccttcccgcactccacacacacacatcccacccgccacgacacccacacaccttgtcttgttagccaggatcctcatggctcccacacacagtggggctacggcccctgtgcgtgcccagggcccagccaggtactcggtactggagcacggactgcagcaacaagccccaaagagaaaactcgtgacttggggagggggtgtcagagggggaggggagaagggaggacccaacagccctgggactagggagctggatagggtggggtggcactggaaaaagaggattacgagatggggtctcgatcctggaggccagccctgtccccatccctcccgcaccttgccctcagggggcttgcagtctccagcaagcctccgccccgacgggcggcagagacagaattcactaaaaggctaggtagcaaaggtgccgtgtggggcggctgtgaggtctcccctggccccctgagggattcctgctcccagacgcgcccctcacccagggtggggtacccctcgtgccccacccccagagcgctccagccgtggagggggcccggggttggggccacgccccgccccgtccccagctcgaggcctagcccgtgcccatcccagcaggcccgggcgggcagcgagaggcctggcggggccccggggctgcagctgggctcttctggagaccagtaacgctggctcggattcctccccgaccgcaagaatgcaggagcctcccctccccccgccctgcacccccaccccgcccccttcggcagagcccgggcggagaggcagagcgagcgagcgacagccagcgaggcagcgagcgggaggcggacaggactgcagcgtgcttctccaggccccgcgcgcggacagacacacggacaagtcccgccaggggctgggcgcgcgccagccggcaagagcttggcgagccccgggtgctgccagcagaggctcagagacccacagacacccgaactctgactcacacacactcacagctcacacgtggacagggagacaagacacgcacggagcccaggaagctagaggcgcgccgaggccagggaagcgccgccggagcgggaggcgcggagacagcctggggcacgcgcagacaccggggctgcccgagggctgagtgggagcgccggacccattgaacagatgaaaagactgaggccggccacaagagagccgaagaaagttgagcctggtagtcacaaagaaacacgcacagggccatagatacagcaacagacttacacaaacacagaggcctcacccaaccgcccccagccctggctcccccctcgcctcccctacccgccctccagcagccctccagcagccgatcccggtcaaaggggaggagtcttgggcccaggagcttcgtcccggtgacaggcccggccagacaccggtgcacactcctgatgctccctgcggggctgctggaggctgggcggggacctgggggtgagggggccccacctgccaccctgcgggagtctaaccccaacttaaccctagggcacattggccttcgccactccagccgtgtctctggggaggaaggctcctgggggaaggttccaaagtccaggacctgcctgggaagcagcccgccacccccagcttctccatcacaaccagggaagagcagaggcagaggctggagtcactgagataccagggctctgagcaggctcctggctggcatgcatctcaggctctcccttcaccagctcgctgattctcaaaaggatcgaccccatttcaacgaggaaactgaggtctgggaaaaggaagtggcgtgaccttgagtcacatatccagtatgtggcagtgtggggacggaccctcattccagacactgcagtgaccccacctccccacgccagccatgactgctcctctgagcctgcatcagatagttgggcttcccacattccagccacagtgcccaggtcccccataaggggggaggggcagggcaagggccactcactacctatgttcacagcctcaaaaattgagaacctgtaagaatttgggaaggggctattagaaaatcagtcctctccagtggccgttcaggcctaggctcctccccagaagactcttccagtcaccctcccctccgggactccaccccctctctcccaccccgccgcagggcgagctgagtcaagcgtggatgagtcaggactttcccatctcacacctcccccctttgcccctcaagagtctgccccagctcccgaagacccctcctcctccacacactcacagtctccgaagacacctggaaggcctggtgatgggaagccaagagggctgatcccagcccaatgcaattttaaagcacccagtgaagggggcttgctagtaccaggccaggggcccttgaggtacgagaaagcaaagggatggggctctgggaacacgtcaccgtgcctccctcttagggggttaggtggggaggggtagcaagctcacaaacagggagcaggtgcgagtcacctgagtggaaggccaggcgcataccaggagaatgaatcggaggagcggaagaggcggcttgacaaagggcctgagatatccatccgctcccccaccccgagtgacgcgagggtaggagctagcagcctaagggttgctaagggttaaagtggacttgatcctagctgggggagggagctgaggaaggctcagatgcccagagcctccaggtatgacacaccggctctgctccacacacaactaccacaggtagggcaggcgttcacacatccagtggcaacctgcctgctcctagctgcccccacgttgggagcctctgcttggctcaccagctggcccagcagtgtcactgcctagctcaaaaccaccccaaagaggcagtgaggaaatgttttggagggttcatgctcctgagctgccagggccccctgtgatgacgtgaaagcccaggaccctgctggggacaacagggcgaacgagatccttggcctctggctcagggagataca

SEQ ID NO: 914361 - DNA, 4001 bp, Homo sapiens
aattcagcttgaagcacacgagacattctactcccctatatgacatgtaacaaatgagtcaaacctaattctttactgatttttcaaataaaattctctttcaccctgaatgtctttcccaatgtccttttctctagttctaagaaaattccagcggggcacggtggttcaagtctgtaatcccagcactttgggaggccaaggcaggtggatcacctgaggtcaggagttcgagacctgtctggccaacataatgaaagcccatctttactaaaaatacaaaaaaaaaaaatagccgggtgtgttggccgacccctgtaatcccagctactcaggagctgaggcaggagaatcgcattgaacccaggagacaaaggttgcagtgagccgagatcgcagcactgcactccagcctgggcaacaagagcgaaacttcgtctcaaaaaaaaaaaaaaaagcaaattccattaattggtcaaggtctatctccagtgttacagtacttcccttaagaggcagcacagtgtaatatttaagggtgtgagctggggctctacctggctccagactggttggtttcaaatatgccctctcctaaataagaaggcttgagaaaggcacttatcacctctctgtggtctgtttcctcttttctaagatggtgatgatgataattcatattacttctaaggctataagtaataaatgagttagtttatgtaaagcttttagaacagaatactcaaaaaatgctattattatatttacatagcttttaatgatcagtccaataaggtgtaatatctcctttattttattcagttgacgaagtacttggtactgctgagaataaaaagcattagaatcctgaaataaaagaactgactgcctagtaaacagatcactgacactgtgttttatttcagcattgtttctcagagtctggtatgaggactacttgcaacagaaatacctggtgttactgctaaaatgcagtttcctggactccattctggtcctaataaatcagaatctctggggaaggacaagcaggtattcttaagcatactaaaatctgggaactacagtatcagaagtacaaagaggatgctttgaaaagatagagaaggaaactctcaggtatttatgttactctacttttattaacattatgcaccatttatcttattctcagattaaaataaattccctaaggtcaggtatgtaattttactcatcttacttttttaagtaaattgaatggcctgattgggcatttgtctaagtagagatacacaaatttaaagcattttacattgtagaaaatatttacatgtctatatgttgtatactctattgcatgctactggtaatctgctacatgctcttcaaagtttccatagaatttgacattaacactttcttaaactcctttctattcgtagcttctgagacattgtcctattctaactttcctgctgccctataactactctctgcattctgctagttttattacttattagctgacaaccttgggcaagttacttaatgtctctgagcctcaggtttttccatgataaaatggaaataaaaggaggttaatacttcctgtttatgtctgttgtcataatcaaatataaagatagtggatgctttccaaatgttaattccctttatgggctccttatcccccttaccacttcatgaatgttcctaaggtcctaccttggatctttaatctcagcactctcccttggcaatctcatctagtctcttaatttcatcaattacttcttgcaggtgactttcaacatgtcaaaatagaatgtttaattcccccccccccgccaatcaattttcttcatctaggatatttcccaactccttcagatgaaatttactcacctaactcatccttcaagatccagttgccatgtcatttgctttataaacacagcattccccttacctacagcaagaactgattctccttagtctgaactcacagcatctgtttatagctctcatatggaccttatcttatctgtcttgtatgataaatgatactaccagtactccttgagtacagggtctggtgtttgtctcctctctccttccagtacgtaatacattcccttgcatactgcaaacattaaattactacattaagtaattttaaaatttatagtgcatattagtatgatttctgaaagctctagatcagccaatttctatacataaaatcatgtaacaatggtaactataatagaaggctataaaacataaatgagttttaaggcagtccccgcaaaatgcaaatagagaaaccaaacaattacattagaacgtgtggcagtgatttttcaatttagaaaagcctaaatattgaatattcttcttattgcaaatcccaaagaataccaagtccctgaatcctgccttaaatattgcataaaatatacaaatgtgaaggctgtttccctgaccatgaggaaacaatcctaactcagccttctttaacttccaggactctgcggaattgctatctcatctgagccacacaggacacaaagcttcagaagctcccagcaaccttcaggaaagaggcacagaattctaagcgcagactggcaagaagaggaggatgaggaagagaaaggggcaaaccctctacctgggagccggtgcaccatcacaggaaggaaatccactgcagtggcagaatgactcctgataaaatggagaaagactcgaaaaaacatttttgtattgagcagatccagtgatttccaaatcctctcacactggcagttttgagtactactaaacagtgaacacgcacagaactgcctggactgtccctccctcactgacaggtcaaagagaggacgcagcttaaggggcggggcttatttccatgacaaccgtccaaacaccctagctataatacgcagctgtttgaaatattaaaattagaccaccaatagtggtctcccccgccctaaacttttctttttcaaacctgttctcacactacagttaagtccgtttatcctgatgcacagcatcaatttttttatgccactcctcttctggaagattccgacacagaataaagtccgaatttagactgccactagaggacgctacaatctggcaacaatttacctttcatcctttttctctgcctttaaatcacttcatccttccttttcttttctattcattaattttacagaacattttctgacaatctagcatgagtgaaagtatgcccttaaaatgtatatgactttattaacatttttagcaccaatgtagcaaatactgtgctacaaagtaagaataccaagaaacaagattgtccctgctctccagtttagaccatacactattccccttcatgaattatcatcccagcaaagtgactaacataccatgatacgtttgttcttctgtgccactgaagaaacttttcccctgcctgaaatatcccctttccttttcaaaaatccaatttaaaatctacctctctgactcccttaccaaaaggtcttctagtaactcccacagcactgccacagagttgcttttaacattaacatatcatgttttcctagcaaaattgtatttcaagaaagaagtggttaaaattgtcagaagggagtgtcttaatacatatagcagagtacgaagatagttcggtatatattttgattagtaatcaatgaaaaataacttataaatttgtgatattttattgaaatagtaaagagtaacattagaagtgtaaattaaagggcaatagtattcctgcaatagcatttctccagttgtgagataataataattattattattttctgagacagagtctcactctgtcacccaggctggagtagagtggcacaatctcggttcactgcaacctctgtgtcccgggttcaagtgattctcctatctcagcctcctgagtagctgggactacaggtgtacgc

SEQ ID NO: 914362 - DNA, 4001 bp, Homo sapiens
ctgactgcctagtaaacagatcactgacactgtgttttatttcagcattgtttctcagagtctggtatgaggactacttgcaacagaaatacctggtgttactgctaaaatgcagtttcctggactccattctggtcctaataaatcagaatctctggggaaggacaagcaggtattcttaagcatactaaaatctgggaactacagtatcagaagtacaaagaggatgctttgaaaagatagagaaggaaactctcaggtatttatgttactctacttttattaacattatgcaccatttatcttattctcagattaaaataaattccctaaggtcaggtatgtaattttactcatcttacttttttaagtaaattgaatggcctgattgggcatttgtctaagtagagatacacaaatttaaagcattttacattgtagaaaatatttacatgtctatatgttgtatactctattgcatgctactggtaatctgctacatgctcttcaaagtttccatagaatttgacattaacactttcttaaactcctttctattcgtagcttctgagacattgtcctattctaactttcctgctgccctataactactctctgcattctgctagttttattacttattagctgacaaccttgggcaagttacttaatgtctctgagcctcaggtttttccatgataaaatggaaataaaaggaggttaatacttcctgtttatgtctgttgtcataatcaaatataaagatagtggatgctttccaaatgttaattccctttatgggctccttatcccccttaccacttcatgaatgttcctaaggtcctaccttggatctttaatctcagcactctcccttggcaatctcatctagtctcttaatttcatcaattacttcttgcaggtgactttcaacatgtcaaaatagaatgtttaattcccccccccccgccaatcaattttcttcatctaggatatttcccaactccttcagatgaaatttactcacctaactcatccttcaagatccagttgccatgtcatttgctttataaacacagcattccccttacctacagcaagaactgattctccttagtctgaactcacagcatctgtttatagctctcatatggaccttatcttatctgtcttgtatgataaatgatactaccagtactccttgagtacagggtctggtgtttgtctcctctctccttccagtacgtaatacattcccttgcatactgcaaacattaaattactacattaagtaattttaaaatttatagtgcatattagtatgatttctgaaagctctagatcagccaatttctatacataaaatcatgtaacaatggtaactataatagaaggctataaaacataaatgagttttaaggcagtccccgcaaaatgcaaatagagaaaccaaacaattacattagaacgtgtggcagtgatttttcaatttagaaaagcctaaatattgaatattcttcttattgcaaatcccaaagaataccaagtccctgaatcctgccttaaatattgcataaaatatacaaatgtgaaggctgtttccctgaccatgaggaaacaatcctaactcagccttctttaacttccaggactctgcggaattgctatctcatctgagccacacaggacacaaagcttcagaagctcccagcaaccttcaggaaagaggcacagaattctaagcgcagactggcaagaagaggaggatgaggaagagaaaggggcaaaccctctacctgggagccggtgcaccatcacaggaaggaaatccactgcagtggcagaatgactcctgataaaatggagaaagactcgaaaaaacatttttgtattgagcagatccagtgatttccaaatcctctcacactggcagttttgagtactactaaacagtgaacacgcacagaactgcctggactgtccctccctcactgacaggtcaaagagaggacgcagcttaaggggcggggcttatttccatgacaaccgtccaaacaccctagctataatacgcagctgtttgaaatattaaaattagaccaccaatagtggtctcccccgccctaaacttttctttttcaaacctgttctcacactacagttaagtccgtttatcctgatgcacagcatcaatttttttatgccactcctcttctggaagattccgacacagaataaagtccgaatttagactgccactagaggacgctacaatctggcaacaatttacctttcatcctttttctctgcctttaaatcacttcatccttccttttcttttctattcattaattttacagaacattttctgacaatctagcatgagtgaaagtatgcccttaaaatgtatatgactttattaacatttttagcaccaatgtagcaaatactgtgctacaaagtaagaataccaagaaacaagattgtccctgctctccagtttagaccatacactattccccttcatgaattatcatcccagcaaagtgactaacataccatgatacgtttgttcttctgtgccactgaagaaacttttcccctgcctgaaatatcccctttccttttcaaaaatccaatttaaaatctacctctctgactcccttaccaaaaggtcttctagtaactcccacagcactgccacagagttgcttttaacattaacatatcatgttttcctagcaaaattgtatttcaagaaagaagtggttaaaattgtcagaagggagtgtcttaatacatatagcagagtacgaagatagttcggtatatattttgattagtaatcaatgaaaaataacttataaatttgtgatattttattgaaatagtaaagagtaacattagaagtgtaaattaaagggcaatagtattcctgcaatagcatttctccagttgtgagataataataattattattattttctgagacagagtctcactctgtcacccaggctggagtagagtggcacaatctcggttcactgcaacctctgtgtcccgggttcaagtgattctcctatctcagcctcctgagtagctgggactacaggtgtacgccaccatacccagctactttttttaatttttattagagacagggttttgccacgttggccaggctggtctcgaactcttgacctcaagtgatctgcctgcctcagcctttcaaactgctgggattacaggtgtgagccaccatgcctggccaagataattactcttgtctacgtggatggtaccaaagccatccaaatttgatttaaaaaataagccttcgacacccaagaatgatcaataaaaaaataaataaataagccttcatgattaggctttcaggcacctttatactacaaggtataacaattctgaacagtgctgaacagtaaacacattgtgacttaaaatcagttctccagtcttaatcatatcaaatgaaatgatcaaatcaatttactgaacctgcaaagggaagaactagatgttaaacaatggtgataccatcaggatataacaagtatattatgaaatctagtctcaaacaatctgttggccttatttttcatattagtaataaatgcttagaaaaagaacatttcttaatgatggtaggtcgaaatccagatgacatgtcgtattaactcacaaatcttcttgttgtatttagttttaaaaaatttccttttggccgggcgagtggctcatgcctgtaatctcagcattttgggaggctgaggtgggtgggtcacctgaggtcaggagttcgagaccagcctggccaacatggcaaaaccccgtctctactaaaaatacaaaaattagccgggtgtggtggcaggcgcctgtaatcccagctactcaggaggccgaggcaggagaatcacttgaacccaagaggcaaaggttgtagtgagccaagatcgcaccactgcacttcagcc

SEQ ID NO: 914363 - DNA, 4001 bp, Homo sapiens
gaatccacctgcgcagagttgggattctttctttcgttcgttaaaacagtggtcttgagtttcggaaacagatttttcctacgttcccctcacccctaccccaagctcttgccttttaattaagaagagctgatcgggggaggagtccagaacgaccaaaccctggggcgaaaactgccaccgggcttggctctgtggccggaacaaaaggcctgagaagggggtgggggtgagggttataggagtgtggagagcctggtggcccccgcccaggggcgcctaagtccctgagctccctgaagagtggcaagaggataacgcagccgcgcgttccggcagttcgctgtcccccgggggtgcaggcgggggcgggagaggtagaacacaggtctgggcggctccgcgccgcttctatctcacccgccaagcccctcacctccacccaccgccagtcccctgcccacccgggtggcggcggcggctcagcgactagccggccgccctccaccggcgcctccggacgcaacctcgccctggcagggcggtctgcgcgtccagctgattggtggctctgtccagccgccgcacggagctaaaagtgttcttctccaccgcctccagccgcccaggccccctcgcccggcccgctctctggctcttcggtccggaaaggaccttctactcccaggcggaggctcccctttccctgagttaccccgactgactcggacctgggctcagtgaggcatccggcccggctggggagcggagcgcggtctcggcagctccccttcccttgagaaagcgggaaccctctaagccagcgcccgaaactcgcggggagggaggacagaagggaaaaaaaaaagaaaacccagaaagaagcatccagcgaggagcgagggcgacggagaggaagagatagaatgagggagggatggaggctggaggagggggcggggtggaagaaggggggcgggaaggagggagggagggggaaagagagggagggagggatacagagagaatgaatccttctcactagaagagctgaaattaccttgattcatttttttgtgttggaggtttagctttacctccttccctcttcccaacctccacctcctctccccaccgcacaccacctccaccgcctgattctaaatgctacaaagtcaaattttaggaattcgaatgttttgcaaaagcttcataattagtaatgaatctactgtacacacacacacacacaccagcaaagagaacggaaaagagggaggtgaagaggagaaaaagagagataaatcttacatttgaatcagacatttgcaggtccaagttaactaaactcattatatccgcaggaagactgagtttcttttttttctttctccctttgccccagggttctcacctagggcaattcaaactgggcaaataccaagaaacaaccccctctcatgctctccctctacctcctcccctccaccacgcgtcctctccggaagacagtatcaaaatagctcaagaattggggatgcaaggggtccccgccctggtgcttaccttctttgcggcttacaccaccccggtggctagatcctggagataaacacttgcatttcccaaagttaacccagtataccaacccggagcttgccaagagtctattccagcctacaccgctaggaagccaacttcagcgagctcaatgaggggaccaaactggggctcgctttccaaacgctccgctccaaaatctgactctctctccagccccgatctcagtgtgagccgaacctcagaaaagacgctttttaagggcgacacagggttggctttacagcggggccaagaagactacctgggggtaccgccacctcggacaaatccgttggctctgtccaaggtgctgaatggactcctatcgcccggattacacacccggcacagcaggaggaaaaggcttaaaaatctctaattaagtgatacttgatattgctctagacggtttcttccacttccttacggtttgtcacgtgcggatggctttgccaaagccatcctgttaatagttgatcacatgttgatgagaaccttttcttctacgagaggattacccattaccggtgatatgcacttctgacttatttctctccccccaaccccaccccccatctacacctaaactcccagtctttaccccacccttacccccactccaccccctaaccccaacctctaacagcattattgtttttagatggaaattaacccccttgcaaatgtcaattacatgcccacatataaatcatagaatatgatcatacaccatacacattaaggaaaagaatagaatgcaagactgctgagagacaagcatcagccttgaacaaccaatataacacacacccccccacccagctccaagtttgttccacgcagttccacatagctgtgtcaaatctcaaatgattccaattaaagttgcactgtgtaaaaacccgattcccctggcctgagtagctgctgttctttggcgtgtgaagtgctaggaagagccgtgatatgcccgttgttaagcaacatgtcaagatttttcaattataatgcaggttttattgctactcaccattgtgcctttgctgtcctggagactcaagtgtcttaaaatctcgtctccccaacagatgctggaaggtaatgtgtcttgtttgaagtcatcatgtgagaagttcggctttgctcagtggatcgcccaccacttggtgtgacttatgaatctaataaccctttgcaatatccgcaagcttaaactctcaaccaccttggcgactacagaagacaaagcaactggcatcgatgtcgaaaaacctatagatttacgcaaacgccctcactccgagagacacgtttccttttgagttcttacgtgattctaatgaatgagcgaggttaccaatgattgcccaactgccctgctatgtagcaggtgtttcctagggctgccttctaaccgcccgttactgggtcctggcactgaaagttcccagagaaagtgaggagtttcagggtacccctgtaaaaaaaaaaactcagcctgcacaccgctcccttgcccactacgcaggtcacacctggggctccggcgaagctgaattcggctcgggagatttccctgtcgccaggtaagaaaaccttcgccttgtcaggctagggcgggaagaccgctggggaacttgttgcttatcagcgccggcagactaccgctttaataataataccagaaaagcgcagcagggagggggtggggggcggcaacggcgacgactaacctcgctgtttacgtgaccgactcactgtgactctctgggtaaaaaaaggaaacttcttagaaaagttcgtgcccctccccctcccccatcatgactaagggtctccagccgatgaggtcgtgagtgatgatcaaatggggactggggggaggggggcgagtaagtgacttgtccttgggaacatctgcatgcgtcgaagcgcgaaccagcccaacaactttcccttttcctcttaggtactgatgactaggcgagaggcaccaaggcgagccactagttgcccacaggaacctgtgtaagccgagctctcgagcggctgagttgaatgaagttatgactgcgtttgctctaatgggttatggcttcccaaatgtgagttaacagccccggtgcgcagctaggtcggaaggcgagccgcggagagcggagccgcgggccaaggcagggacgggaggggaggcggcaggttgggcgctccgctgctgctcggtgctgcttccccggagccgcttcctcatcctgcgggggctgccccgccgccggggtgccggggtgagcgcggcgggagccagggctggggtggcgaacctcggagggggctctcccaggaagccctgcggttagcgcccgcgcttccccaccagtggctgcgcaagctgggaagcg

SEQ ID NO: 914364 - DNA, 4001 bp, Homo sapiens
gctgaagagctctttgtaaatacacataaacagtgaatatcaggtgcaccatttttaaagtgctattcatttccacaacagtttaggtgaaaccatgtcatcttacaagttgagtgtgtgtgtgtgtgtgtgtgtgtgtgtgtgtagaggatgacgtgacacttttgaggtttatttaagttgttaaagacctcaaggttacaagacttagactgttaagcatttttcctcccagagacacgaaatctacaattttctcgattcaactgtcaactaaattggcaagtcaactaaaaggataatattcccttaacgatgcattcatttgaagccctagcaactgtattaggcagcagcgagtattcgctagcaagggatggcgcggggagagggaactctgcaatttagagtgacagatgatttctttcccatccatcaagctgcctcaaaatgtcacaatatttacacctctttcttggtgaattagaatccagagacaagcagacagaaagaaaaaaataataattccggccggttgccgcctgattggaaaaagcaagcgttgcacctttaaattctgctcctccattccccgttccgcacaccacccccccccgcccctcccgggattttgcaataaatctcccagttctgcgttcagccctgcagatccgtatttaaaacagcaccatctgggaagggtgggtggcgatggtgatgcgggcgccttggagttcctttgcagcacgcttggaattgcatcagactgatcagaaatccccccgcccccaagctcagcccctcccgccacgctcccctgcccgcccctcccctcccctcccttcgcgtagatctgactgagaaaacgactggatctcggaacaatctgtgccccattcgctgcaggcttgctccgtaaaccctgccctacgctccctttgtgtgccgagcagcctatcaccgtcatctgatcctagcgcctgttttttatcttttccttctgaatttccacaatatcctcgcttcgcctatgaatccacctgcgcagagttgggattctttctttcgttcgttaaaacagtggtcttgagtttcggaaacagatttttcctacgttcccctcacccctaccccaagctcttgccttttaattaagaagagctgatcgggggaggagtccagaacgaccaaaccctggggcgaaaactgccaccgggcttggctctgtggccggaacaaaaggcctgagaagggggtgggggtgagggttataggagtgtggagagcctggtggcccccgcccaggggcgcctaagtccctgagctccctgaagagtggcaagaggataacgcagccgcgcgttccggcagttcgctgtcccccgggggtgcaggcgggggcgggagaggtagaacacaggtctgggcggctccgcgccgcttctatctcacccgccaagcccctcacctccacccaccgccagtcccctgcccacccgggtggcggcggcggctcagcgactagccggccgccctccaccggcgcctccggacgcaacctcgccctggcagggcggtctgcgcgtccagctgattggtggctctgtccagccgccgcacggagctaaaagtgttcttctccaccgcctccagccgcccaggccccctcgcccggcccgctctctggctcttcggtccggaaaggaccttctactcccaggcggaggctcccctttccctgagttaccccgactgactcggacctgggctcagtgaggcatccggcccggctggggagcggagcgcggtctcggcagctccccttcccttgagaaagcgggaaccctctaagccagcgcccgaaactcgcggggagggaggacagaagggaaaaaaaaaagaaaacccagaaagaagcatccagcgaggagcgagggcgacggagaggaagagatagaatgagggagggatggaggctggaggagggggcggggtggaagaaggggggcgggaaggagggagggagggggaaagagagggagggagggatacagagagaatgaatccttctcactagaagagctgaaattaccttgattcatttttttgtgttggaggtttagctttacctccttccctcttcccaacctccacctcctctccccaccgcacaccacctccaccgcctgattctaaatgctacaaagtcaaattttaggaattcgaatgttttgcaaaagcttcataattagtaatgaatctactgtacacacacacacacacaccagcaaagagaacggaaaagagggaggtgaagaggagaaaaagagagataaatcttacatttgaatcagacatttgcaggtccaagttaactaaactcattatatccgcaggaagactgagtttcttttttttctttctccctttgccccagggttctcacctagggcaattcaaactgggcaaataccaagaaacaaccccctctcatgctctccctctacctcctcccctccaccacgcgtcctctccggaagacagtatcaaaatagctcaagaattggggatgcaaggggtccccgccctggtgcttaccttctttgcggcttacaccaccccggtggctagatcctggagataaacacttgcatttcccaaagttaacccagtataccaacccggagcttgccaagagtctattccagcctacaccgctaggaagccaacttcagcgagctcaatgaggggaccaaactggggctcgctttccaaacgctccgctccaaaatctgactctctctccagccccgatctcagtgtgagccgaacctcagaaaagacgctttttaagggcgacacagggttggctttacagcggggccaagaagactacctgggggtaccgccacctcggacaaatccgttggctctgtccaaggtgctgaatggactcctatcgcccggattacacacccggcacagcaggaggaaaaggcttaaaaatctctaattaagtgatacttgatattgctctagacggtttcttccacttccttacggtttgtcacgtgcggatggctttgccaaagccatcctgttaatagttgatcacatgttgatgagaaccttttcttctacgagaggattacccattaccggtgatatgcacttctgacttatttctctccccccaaccccaccccccatctacacctaaactcccagtctttaccccacccttacccccactccaccccctaaccccaacctctaacagcattattgtttttagatggaaattaacccccttgcaaatgtcaattacatgcccacatataaatcatagaatatgatcatacaccatacacattaaggaaaagaatagaatgcaagactgctgagagacaagcatcagccttgaacaaccaatataacacacacccccccacccagctccaagtttgttccacgcagttccacatagctgtgtcaaatctcaaatgattccaattaaagttgcactgtgtaaaaacccgattcccctggcctgagtagctgctgttctttggcgtgtgaagtgctaggaagagccgtgatatgcccgttgttaagcaacatgtcaagatttttcaattataatgcaggttttattgctactcaccattgtgcctttgctgtcctggagactcaagtgtcttaaaatctcgtctccccaacagatgctggaaggtaatgtgtcttgtttgaagtcatcatgtgagaagttcggctttgctcagtggatcgcccaccacttggtgtgacttatgaatctaataaccctttgcaatatccgcaagcttaaactctcaaccaccttggcgactacagaagacaaagcaactggcatcgatgtcgaaaaacctatagatttacgcaaacgccctcactccgagagacacgtttccttttgagttcttacgtgattctaatgaatgagcgaggttaccaatgattgc

SEQ ID NO: 914365 - DNA, 4001 bp, Homo sapiens
gatcccgcaaaaccttcctttaccacttccccacccccagcctcccgcccccagtagctgctcttggcagcatggccggcagagggcaccctctaccttccctagcttcgttctctgggtcccctcctcctcctcgcctcccctccaccccggtccctcatccccgctctacccccaacacacaaacactgcatcctccagttcaccctcgcagccccgaggcttcttccttagggatgcccctagtctgtaatctccccttcttcttgcccgtcaggcacagagcccccaatcctcagctatttctttccaggagtaactcactcacccattcctcttcccggctctgcatccccagagactaacccgagtcaagaatcccccacgtacatcccaaccactccccgaaagtcaaaactcttaacttccctggagggcgcttcagaagaggggcgcaggatgggtagagatgtgggttcggcctgcccgagagtgtcgcagaccctttcagttcccagcggtaggaattccgcctcccaagttttccaagctacattggcttcggacttgtaagtccacttcagtctcaattcctggggagcaggtagccgtgtgcagctccggggaagggatgcgggctgaaggcgcaagcttccctcccactccccccgcaagtcggcgcggggaccacccaccccctggaaggattcctagcctagccccagcaccctcccctcagtcaggaccctcgacagctctggccccctaagtctctctcgactactcctgggctgggggagggctgcgagggatccccgggtcgccgtctttgctcccatcacgcagctctgggtctcctccaggccttccctcctctacttcgtgacttccccgggtccctttttccctggtggtgccggctgaccttctgggttgtgggatgggggagaaaactccccaagagtaactccaaatcgtcccttctaccggaggggaggaaagaaggagactggcctcgtcccacaactttggggtgggggatcccccagtcaactctctcccgcggacgggcagctcctgcaccaagccccattcccagcgcttgcctacctcggggtccacacaaacctcacgggtccccggcggcggagtcacatcgtggttccgattctggctccagcgcccagccccggtccccgtcgcggtgctgctccccgccggccccacagcagcggtgggtgtctcattaaagccccccgagcaggaggtggaggggcgcaccgggctggctcctctgtccggcccgggagcccgaggcgctacggggtgcgcgggacagcgagcgggcgggtgcgcccgggcgcggcggcggcagcgtcggggacccggagctccaggctgcgccttgcgcccgggtcagacattatttagctcttcggttgagcttcgattggtcaaacggcgccgcccccccccccccgccccccgccccccgctccccgctcgcccgcgctaccgatacccgttcgaggcggccgcttaaagggaacgccgcgtcttttcctcgcgcggggaaccgaggggcgcccggaactccccgctcccccggggcctgtcctcacctcctcccctagggccccgcgacatcgccctgcgagtcctgcgccctcctggggcgccttggacaggacgcccgcggcttcgaggggtgttccagccccagcctcagccccggggaaccccgcgtcccgcgccctctgcagaaaccccggctgtgggcgctggggcgggagggagcgagtgagaatcgcacgccccgaggtctcgctcccctagctttcaactctccccttcctccccatcccagcacccaagttctctgggagagggcgtgcgtttcccgggccacagacacaccttcccgcaccttcctgcactacggagcttgcgaacgcgagcacacaatgaaatcgcacagagcatgggggctattggtttactctgctgccttaaacacgccggcttaaacagagttcgcgcactgacctctctagagtttgcctaataggaattcaatcaagataataacagcattttttattgatgaacgcccccagataacgttacaccaagttacttgttccagccaggaagcccaggcaatgacagacctcgctaaagccacacgctttctagccgaccaaacagaaaaacggaaagagaaagaaagaaaacaaacccaccttttcagtcactacttgtcaaagtaaccatcaaggcagctgctccgggaaagacttcggccccaaaactcccacactctattattttttcacgttcccttcgcttaattaaaggggggagggggcgcgagtctttggtgcccggtatgtactccttctgttctgcagcaaagaagttaaattattgatagtggaaattgcatggcggaggtaatactcgcaccccatcagcgagaagctccatttgatctcggcagaggcagggagatttcatgctagttcgccggggggagcggcagcgagagcagccctctccgcggtgaatgggaaagtgggtgggagtccacgagagggctccacggtgccttgacgtgcgctgtcatatgatacctccgctgcctcgaaatagacactctagtgcacgaattaccagaatcaaaattcagcgcatttaaaatgatacatcttttattagaagagttccgttccagggcattgcatgcttttgcagatgttttcacttccagccccagcaaacacacgtataagctaacccttttaataacgaaccagggcagccaagataaataaaaagtcttctgctttaaccagagtgggggtaggtgattcgagggtgggggcagaactggctcagttaatcctcccccgccctccacccccaccactgcccgcagcaaaagagcaaatagcctttcgggttctcatttgcctgtagccaagacccttgaagagaacttatatggctagggtccagaggacattttcaattatccatttgatgaactctgtcaaccgtctacctgtgtttctgctttaaagctgaattttcttctcattagttcaaccaatttgtgcagaccttaaaatttagaataaagaataagacagcagtaccgtacttaacttggagtccctggacctcctcggagcataaaaatcacctgggtgagtgttaaaatgaaggtccctcctcctgaaattgtgatttagtaggggtggggcagggcccaggagttataattttaataaataccacaagcaattcgaatgcagacaatctgaagtcacactttgagaaacactctcttgggggtacaacactgggtatcagaggaatctcccaccaagcccacacccaaattctgcaggcagctttctgtgtgtgtgcgtttttctgtaatctcaaaggggtttgacctaataattgcgaagactattgctgtaagaatttccctaaagactccaacattaattttgctaaagggaaagatttataaacagtttcctttcctggaccctcttgtggttaccaagaatgtgctgttgaactgaatatataatattattacatactcagttcaatttacctaagggtttacagttagcaaaatgaattcactaacattagctattttagaacttctaaagactagtgacagaaattatttacccgttttataaaagaagaatccgatcctctgccaggaaataatttacccacgttcacacagtgaagtaccagggacaagacttcagtgaactcaagaattcctgctagaaataaccctgcttccatctcccccaccccctaagtgaagctatctgttccttggaagtgttatcagaatgtgtgatcattcagagcgcctttgcaaattgttggactaaatagtcaaattattcaaatatatgcatattcttcgagtgtcacacatttagctttgcacctctgtcaac

SEQ ID NO: 914366 - DNA, 4001 bp, Homo sapiens
cgaggcttatcaaagctcccccagcgcgaggaaaacttgcatagaagccaaacaagaacgaggagtcaaaatccaccgacgacgagtcgcacgccccaccgagctggagtcagcagcaccattcaacaagtccctcctaccagctctctaagggatcccgcaaaaccttcctttaccacttccccacccccagcctcccgcccccagtagctgctcttggcagcatggccggcagagggcaccctctaccttccctagcttcgttctctgggtcccctcctcctcctcgcctcccctccaccccggtccctcatccccgctctacccccaacacacaaacactgcatcctccagttcaccctcgcagccccgaggcttcttccttagggatgcccctagtctgtaatctccccttcttcttgcccgtcaggcacagagcccccaatcctcagctatttctttccaggagtaactcactcacccattcctcttcccggctctgcatccccagagactaacccgagtcaagaatcccccacgtacatcccaaccactccccgaaagtcaaaactcttaacttccctggagggcgcttcagaagaggggcgcaggatgggtagagatgtgggttcggcctgcccgagagtgtcgcagaccctttcagttcccagcggtaggaattccgcctcccaagttttccaagctacattggcttcggacttgtaagtccacttcagtctcaattcctggggagcaggtagccgtgtgcagctccggggaagggatgcgggctgaaggcgcaagcttccctcccactccccccgcaagtcggcgcggggaccacccaccccctggaaggattcctagcctagccccagcaccctcccctcagtcaggaccctcgacagctctggccccctaagtctctctcgactactcctgggctgggggagggctgcgagggatccccgggtcgccgtctttgctcccatcacgcagctctgggtctcctccaggccttccctcctctacttcgtgacttccccgggtccctttttccctggtggtgccggctgaccttctgggttgtgggatgggggagaaaactccccaagagtaactccaaatcgtcccttctaccggaggggaggaaagaaggagactggcctcgtcccacaactttggggtgggggatcccccagtcaactctctcccgcggacgggcagctcctgcaccaagccccattcccagcgcttgcctacctcggggtccacacaaacctcacgggtccccggcggcggagtcacatcgtggttccgattctggctccagcgcccagccccggtccccgtcgcggtgctgctccccgccggccccacagcagcggtgggtgtctcattaaagccccccgagcaggaggtggaggggcgcaccgggctggctcctctgtccggcccgggagcccgaggcgctacggggtgcgcgggacagcgagcgggcgggtgcgcccgggcgcggcggcggcagcgtcggggacccggagctccaggctgcgccttgcgcccgggtcagacattatttagctcttcggttgagcttcgattggtcaaacggcgccgcccccccccccccgccccccgccccccgctccccgctcgcccgcgctaccgatacccgttcgaggcggccgcttaaagggaacgccgcgtcttttcctcgcgcggggaaccgaggggcgcccggaactccccgctcccccggggcctgtcctcacctcctcccctagggccccgcgacatcgccctgcgagtcctgcgccctcctggggcgccttggacaggacgcccgcggcttcgaggggtgttccagccccagcctcagccccggggaaccccgcgtcccgcgccctctgcagaaaccccggctgtgggcgctggggcgggagggagcgagtgagaatcgcacgccccgaggtctcgctcccctagctttcaactctccccttcctccccatcccagcacccaagttctctgggagagggcgtgcgtttcccgggccacagacacaccttcccgcaccttcctgcactacggagcttgcgaacgcgagcacacaatgaaatcgcacagagcatgggggctattggtttactctgctgccttaaacacgccggcttaaacagagttcgcgcactgacctctctagagtttgcctaataggaattcaatcaagataataacagcattttttattgatgaacgcccccagataacgttacaccaagttacttgttccagccaggaagcccaggcaatgacagacctcgctaaagccacacgctttctagccgaccaaacagaaaaacggaaagagaaagaaagaaaacaaacccaccttttcagtcactacttgtcaaagtaaccatcaaggcagctgctccgggaaagacttcggccccaaaactcccacactctattattttttcacgttcccttcgcttaattaaaggggggagggggcgcgagtctttggtgcccggtatgtactccttctgttctgcagcaaagaagttaaattattgatagtggaaattgcatggcggaggtaatactcgcaccccatcagcgagaagctccatttgatctcggcagaggcagggagatttcatgctagttcgccggggggagcggcagcgagagcagccctctccgcggtgaatgggaaagtgggtgggagtccacgagagggctccacggtgccttgacgtgcgctgtcatatgatacctccgctgcctcgaaatagacactctagtgcacgaattaccagaatcaaaattcagcgcatttaaaatgatacatcttttattagaagagttccgttccagggcattgcatgcttttgcagatgttttcacttccagccccagcaaacacacgtataagctaacccttttaataacgaaccagggcagccaagataaataaaaagtcttctgctttaaccagagtgggggtaggtgattcgagggtgggggcagaactggctcagttaatcctcccccgccctccacccccaccactgcccgcagcaaaagagcaaatagcctttcgggttctcatttgcctgtagccaagacccttgaagagaacttatatggctagggtccagaggacattttcaattatccatttgatgaactctgtcaaccgtctacctgtgtttctgctttaaagctgaattttcttctcattagttcaaccaatttgtgcagaccttaaaatttagaataaagaataagacagcagtaccgtacttaacttggagtccctggacctcctcggagcataaaaatcacctgggtgagtgttaaaatgaaggtccctcctcctgaaattgtgatttagtaggggtggggcagggcccaggagttataattttaataaataccacaagcaattcgaatgcagacaatctgaagtcacactttgagaaacactctcttgggggtacaacactgggtatcagaggaatctcccaccaagcccacacccaaattctgcaggcagctttctgtgtgtgtgcgtttttctgtaatctcaaaggggtttgacctaataattgcgaagactattgctgtaagaatttccctaaagactccaacattaattttgctaaagggaaagatttataaacagtttcctttcctggaccctcttgtggttaccaagaatgtgctgttgaactgaatatataatattattacatactcagttcaatttacctaagggtttacagttagcaaaatgaattcactaacattagctattttagaacttctaaagactagtgacagaaattatttacccgttttataaaagaagaatccgatcctctgccaggaaataatttacccacgttcacacagtgaagtaccagggacaagacttcagtgaactcaagaattcctgctagaaataaccctgcttccatctccccca

SEQ ID NO: 914367 - DNA, 4001 bp, Homo sapiens
ctgtaattatgcctcaataagttaaaatgtaaagacatatcaaattgtaagaccaaaatggcttttgaccttacaacaaactcatataaaaatagatttttccataataataaaggggagagagagattttgcaggatattgagtcagtagggaggggtctcatttaatatcatgtcgccttttatatgcagttagaaaatcaacgttcccaattacatattactttgctttaaaagattactaggaggattaataaacactcagaaatatgcctttctttgcttctggccaagaacattcctgcgtgcttgtcggaaaatgttctttggttgctactgacattaaggagtaagtgcaggataactagaggaccctaaaataagatccaagaagccctaacacaccgccaatcgaggcttatcaaagctcccccagcgcgaggaaaacttgcatagaagccaaacaagaacgaggagtcaaaatccaccgacgacgagtcgcacgccccaccgagctggagtcagcagcaccattcaacaagtccctcctaccagctctctaagggatcccgcaaaaccttcctttaccacttccccacccccagcctcccgcccccagtagctgctcttggcagcatggccggcagagggcaccctctaccttccctagcttcgttctctgggtcccctcctcctcctcgcctcccctccaccccggtccctcatccccgctctacccccaacacacaaacactgcatcctccagttcaccctcgcagccccgaggcttcttccttagggatgcccctagtctgtaatctccccttcttcttgcccgtcaggcacagagcccccaatcctcagctatttctttccaggagtaactcactcacccattcctcttcccggctctgcatccccagagactaacccgagtcaagaatcccccacgtacatcccaaccactccccgaaagtcaaaactcttaacttccctggagggcgcttcagaagaggggcgcaggatgggtagagatgtgggttcggcctgcccgagagtgtcgcagaccctttcagttcccagcggtaggaattccgcctcccaagttttccaagctacattggcttcggacttgtaagtccacttcagtctcaattcctggggagcaggtagccgtgtgcagctccggggaagggatgcgggctgaaggcgcaagcttccctcccactccccccgcaagtcggcgcggggaccacccaccccctggaaggattcctagcctagccccagcaccctcccctcagtcaggaccctcgacagctctggccccctaagtctctctcgactactcctgggctgggggagggctgcgagggatccccgggtcgccgtctttgctcccatcacgcagctctgggtctcctccaggccttccctcctctacttcgtgacttccccgggtccctttttccctggtggtgccggctgaccttctgggttgtgggatgggggagaaaactccccaagagtaactccaaatcgtcccttctaccggaggggaggaaagaaggagactggcctcgtcccacaactttggggtgggggatcccccagtcaactctctcccgcggacgggcagctcctgcaccaagccccattcccagcgcttgcctacctcggggtccacacaaacctcacgggtccccggcggcggagtcacatcgtggttccgattctggctccagcgcccagccccggtccccgtcgcggtgctgctccccgccggccccacagcagcggtgggtgtctcattaaagccccccgagcaggaggtggaggggcgcaccgggctggctcctctgtccggcccgggagcccgaggcgctacggggtgcgcgggacagcgagcgggcgggtgcgcccgggcgcggcggcggcagcgtcggggacccggagctccaggctgcgccttgcgcccgggtcagacattatttagctcttcggttgagcttcgattggtcaaacggcgccgcccccccccccccgccccccgccccccgctccccgctcgcccgcgctaccgatacccgttcgaggcggccgcttaaagggaacgccgcgtcttttcctcgcgcggggaaccgaggggcgcccggaactccccgctcccccggggcctgtcctcacctcctcccctagggccccgcgacatcgccctgcgagtcctgcgccctcctggggcgccttggacaggacgcccgcggcttcgaggggtgttccagccccagcctcagccccggggaaccccgcgtcccgcgccctctgcagaaaccccggctgtgggcgctggggcgggagggagcgagtgagaatcgcacgccccgaggtctcgctcccctagctttcaactctccccttcctccccatcccagcacccaagttctctgggagagggcgtgcgtttcccgggccacagacacaccttcccgcaccttcctgcactacggagcttgcgaacgcgagcacacaatgaaatcgcacagagcatgggggctattggtttactctgctgccttaaacacgccggcttaaacagagttcgcgcactgacctctctagagtttgcctaataggaattcaatcaagataataacagcattttttattgatgaacgcccccagataacgttacaccaagttacttgttccagccaggaagcccaggcaatgacagacctcgctaaagccacacgctttctagccgaccaaacagaaaaacggaaagagaaagaaagaaaacaaacccaccttttcagtcactacttgtcaaagtaaccatcaaggcagctgctccgggaaagacttcggccccaaaactcccacactctattattttttcacgttcccttcgcttaattaaaggggggagggggcgcgagtctttggtgcccggtatgtactccttctgttctgcagcaaagaagttaaattattgatagtggaaattgcatggcggaggtaatactcgcaccccatcagcgagaagctccatttgatctcggcagaggcagggagatttcatgctagttcgccggggggagcggcagcgagagcagccctctccgcggtgaatgggaaagtgggtgggagtccacgagagggctccacggtgccttgacgtgcgctgtcatatgatacctccgctgcctcgaaatagacactctagtgcacgaattaccagaatcaaaattcagcgcatttaaaatgatacatcttttattagaagagttccgttccagggcattgcatgcttttgcagatgttttcacttccagccccagcaaacacacgtataagctaacccttttaataacgaaccagggcagccaagataaataaaaagtcttctgctttaaccagagtgggggtaggtgattcgagggtgggggcagaactggctcagttaatcctcccccgccctccacccccaccactgcccgcagcaaaagagcaaatagcctttcgggttctcatttgcctgtagccaagacccttgaagagaacttatatggctagggtccagaggacattttcaattatccatttgatgaactctgtcaaccgtctacctgtgtttctgctttaaagctgaattttcttctcattagttcaaccaatttgtgcagaccttaaaatttagaataaagaataagacagcagtaccgtacttaacttggagtccctggacctcctcggagcataaaaatcacctgggtgagtgttaaaatgaaggtccctcctcctgaaattgtgatttagtaggggtggggcagggcccaggagttataattttaataaataccacaagcaattcgaatgcagacaatctgaagtcacactttgagaaacactctcttgggggtacaacactgggtatcagaggaatctcccaccaagcccacacccaaattctgcaggcagctttctgtgtgtgtgcgttt

SEQ ID NO: 914368 - DNA, 4001 bp, Homo sapiens
atggacatgtccaataaatagattgtagaaccactgtactgtataaacttcatttatacatgcagttcataaaattatttttttcttaactgaataatttaccctgttatgtatatatacaaatagataatttttgtctcaatataatctaatctatacaacataaatccactatcttccccttttaatggtcaatgtacatacacaagaagtgtctatccttatgaatcgccagccaattctctttttgctatccatggtaagggcccgcacgtacgactgggtagttcggcactgggagttccaatgccttttgtctatgcccctgcagccttcttttgtgtaacccatgggattgcacttggtctcgtagaagtattgcttcagttggccttttgatacagggaccttttcaaggactgtgaccgtcccgcccgacatgtccactgcagtctttttgtctgccgccgttacccactcactaatactgtcacacacgctcagctcccctcggcgggcagggtcagagtggcgccggaccctcatggacatgtttgcagcatctaggtaatttttgtattcctccagcagaaagagaagaggaggctccaaaggcacttgactactgagcatcaccctggacgtgtacaagtctgcgtccttattgttttcttcattgggccgaactttctggtcctcatccaacagctcttctatcacgtgttcgaaagtgtcagccaatgatgtcaagcctcttgaacctgccttgggcccattcacgctctccagagtcccatgggtccgcacacctgggtaggccaagccaccttgtcctcggatgtttgcttctttcatgggggcagccttcatgcaaccaaagtatgaaataaccatagtaaggaaaaggatggtcatcactcttctcacctggtggaactgtagggagaaagcagaaacaagacagaaaactggttagggctttctttcaccgggatgccatgtggcccatctgattgtaattccaggccattctgcagggtcaaggtttttttatgtcttggtgataaactccagctgcaccagacacaaatcagtgtcagtagtgtgctgtatgtggtttaatataaaccagagacatgcagtgtttcccccaagatctagcatataaacctgagattagatggcttctaagcaagtgcaaaaattgtggcttcaagttctccttcttcccactttagcagctttgtaagtttaatttttaatgatctctgctcatgctgtcacgagaaacacaaaatcataaatgttactaagcaacaactgcaagtgtaattaatagtaatttttttcaagttagcaacatggtcctttgcaggaatgtgtgacaggaacagcagtggcctgaggggtctgatgggcctttctagctatgtgatgtctaggcatgaatagcacaataaaacagcagttggggaactataaggagcctttaaattgactttttttttcctcttcccacagagatactctattatagcaaagaagaaagataatttcattgagccatcctgttttacaggtaaggaaaccaaaggccatagaagacttgccttatgtcatgaagaaagtttatgttagaactcagggctcccaattccactgttctttattctacacctgggtggtcacaactgaaaatgttttgcttatttctaaacagaaatcattttttgacatgttcattttaatgatgtgtctatgcctggggctaatgtcatgaaaacaatgtgtctggtaaggagaaaactgaaaaagtcagcattaaaaagacatttaagtccatttcaaatgcctcccatatgcagactccactttatctcctccagttctctaaaacccttcactccttggctttttctggctaatacacacatctagctaagaaagctcaacttttctttttactagagatgttctctctgtgtgtgtgtgtgtgtgtgcgcgcgcgcgtgtgcgcgcgctctgagtttatcctacttttaaaaagctgagtggtgttttacacattttggaataggcagctagtgcttctttttctgcttttgaagtttcctgggaagtcccttaaaagcataccacaaaattaatctcttcctgtttgccagagggttgctctactctaaatttggctctacatctacaagcatgctctaggaagccaattaaaatggatgaacaagcaaaatgaaaacatacctatggaccaacccaaggttaccgtcaggtggtgaaggacttcagaatcacttacctgaagcattgtgtttctcagcagcaaagagtagcatccccagccctgaccctaattttattcctacttctcagttctgaggcatggacttacaaaaagacacatacatgcaatggccatcatgatatccaaataagtaggaaaaggaactgtgtttctgcccatgaagttttactgaattcaaaggcaacctacctccagtcaataggtcagaatgcagaaatggctgaaaactctggtattgaaaagcaaatgttctccacttttgtaagaaataacattttcaaccactaagagactttattaccatccctaaacacacaaaaaaatttcttttagatttactctcactttgcacgaatagcaaacatgcttagaactgcttagattgcacaatgttctcagattaggaagggaaaattggtttgaataaaatacagatgtctattccgctaacaactaaatctttgtgaatgttctgagtcctgtaccatcaaagaaatagatcgtccatgggggtttctatttctggtagattgtacttacacactgaatgaaaaagctttctcctaatattcccagtccaaataaaaacaacccaaggggcacctcttatttaggtcaataaaagtttgcaaatgtggaatactttagccatctacatcacactggtagagactttctgtgatcagctattttttaataccatatttaatcaaatctaagataccatcattgtgaaactcgacattttatatatcactaagaaagcaaaaatgcagcctgggtgaccagagtgaaactccatctcaaaaaaaaaaaaaaaagaattaatgaactatagtttaatacatatttactaagtgcccacactaactacttaaaaatggtccaaaatactgaggcatcttaagctgttggaaaattgttttgttttcaccactacagtaatgagtctttgaatgataccattttctatacttggcttctagtttactctgcctttcactgatcttatctttttattaataactttatgagaaaaataattaatgctttatatattgttctctcagttccatgagcaaatatttcagagggaaaattggcatctgagtaaatattacttggctttcattctgaagcccaaacatgggtattcctcaagctgagcatctgcatagaattaggaattaacacaatggtgacaaagtccaaccccacattgcaagccctgctctctgagtggcacttctgcaattctaactaactgtctactcacttgtaaggccttgaagttaagtgggtgcaacaccaaactcaatactttttgttggaacagtggtatctcctaccttttctaacaatggttccctgatattttgggcaacccaggcataggatagaaatcctggaatcaagtttgacaatatatttcctgcatagccttccaatccagtcagtaaagatgtcctgttaatttttcctttaaaatatttgtcctggccatccctttttatccatcccactgccaccatcttggctcagccctcaccacctcattttgtgaccacaacgtcccgatgctgtatcagacactctttctgctccattcaactctgatgaccacttcctgggtaaccaccctaatactattctcttacacaaaaactggcaatggcatttttgt

SEQ ID NO: 914369 - DNA, 4001 bp, Homo sapiens
gtgaagaggagaaaaagagagataaatcttacatttgaatcagacatttgcaggtccaagttaactaaactcattatatccgcaggaagactgagtttcttttttttctttctccctttgccccagggttctcacctagggcaattcaaactgggcaaataccaagaaacaaccccctctcatgctctccctctacctcctcccctccaccacgcgtcctctccggaagacagtatcaaaatagctcaagaattggggatgcaaggggtccccgccctggtgcttaccttctttgcggcttacaccaccccggtggctagatcctggagataaacacttgcatttcccaaagttaacccagtataccaacccggagcttgccaagagtctattccagcctacaccgctaggaagccaacttcagcgagctcaatgaggggaccaaactggggctcgctttccaaacgctccgctccaaaatctgactctctctccagccccgatctcagtgtgagccgaacctcagaaaagacgctttttaagggcgacacagggttggctttacagcggggccaagaagactacctgggggtaccgccacctcggacaaatccgttggctctgtccaaggtgctgaatggactcctatcgcccggattacacacccggcacagcaggaggaaaaggcttaaaaatctctaattaagtgatacttgatattgctctagacggtttcttccacttccttacggtttgtcacgtgcggatggctttgccaaagccatcctgttaatagttgatcacatgttgatgagaaccttttcttctacgagaggattacccattaccggtgatatgcacttctgacttatttctctccccccaaccccaccccccatctacacctaaactcccagtctttaccccacccttacccccactccaccccctaaccccaacctctaacagcattattgtttttagatggaaattaacccccttgcaaatgtcaattacatgcccacatataaatcatagaatatgatcatacaccatacacattaaggaaaagaatagaatgcaagactgctgagagacaagcatcagccttgaacaaccaatataacacacacccccccacccagctccaagtttgttccacgcagttccacatagctgtgtcaaatctcaaatgattccaattaaagttgcactgtgtaaaaacccgattcccctggcctgagtagctgctgttctttggcgtgtgaagtgctaggaagagccgtgatatgcccgttgttaagcaacatgtcaagatttttcaattataatgcaggttttattgctactcaccattgtgcctttgctgtcctggagactcaagtgtcttaaaatctcgtctccccaacagatgctggaaggtaatgtgtcttgtttgaagtcatcatgtgagaagttcggctttgctcagtggatcgcccaccacttggtgtgacttatgaatctaataaccctttgcaatatccgcaagcttaaactctcaaccaccttggcgactacagaagacaaagcaactggcatcgatgtcgaaaaacctatagatttacgcaaacgccctcactccgagagacacgtttccttttgagttcttacgtgattctaatgaatgagcgaggttaccaatgattgcccaactgccctgctatgtagcaggtgtttcctagggctgccttctaaccgcccgttactgggtcctggcactgaaagttcccagagaaagtgaggagtttcagggtacccctgtaaaaaaaaaaactcagcctgcacaccgctcccttgcccactacgcaggtcacacctggggctccggcgaagctgaattcggctcgggagatttccctgtcgccaggtaagaaaaccttcgccttgtcaggctagggcgggaagaccgctggggaacttgttgcttatcagcgccggcagactaccgctttaataataataccagaaaagcgcagcagggagggggtggggggcggcaacggcgacgactaacctcgctgtttacgtgaccgactcactgtgactctctgggtaaaaaaaggaaacttcttagaaaagttcgtgcccctccccctcccccatcatgactaagggtctccagccgatgaggtcgtgagtgatgatcaaatggggactggggggaggggggcgagtaagtgacttgtccttgggaacatctgcatgcgtcgaagcgcgaaccagcccaacaactttcccttttcctcttaggtactgatgactaggcgagaggcaccaaggcgagccactagttgcccacaggaacctgtgtaagccgagctctcgagcggctgagttgaatgaagttatgactgcgtttgctctaatgggttatggcttcccaaatgtgagttaacagccccggtgcgcagctaggtcggaaggcgagccgcggagagcggagccgcgggccaaggcagggacgggaggggaggcggcaggttgggcgctccgctgctgctcggtgctgcttccccggagccgcttcctcatcctgcgggggctgccccgccgccggggtgccggggtgagcgcggcgggagccagggctggggtggcgaacctcggagggggctctcccaggaagccctgcggttagcgcccgcgcttccccaccagtggctgcgcaagctgggaagcgaagaggtcacgtgttggcggaaagtaacttggaggcgaaaggatgaactttgagaagaggaaaaaaagcacaatgaaacaaactacccccttggagtgtctaatagagggggaggcgggagggggggcggaggggcgccgctctccgcgggagatgtggggacgactccggaaatctcgggaaataggcaataactcgagctttggcaacgtcccccagcctagggaggcgctaacgcaaggtatctttccactgaagctgccctttgcctaccctcagccatcgctagcacagcagagcagaagaaccagggatgaatgtagaccagttgttatggagatgtccgtcgctctgaggagcgctagtgccctgggaagtccccagacgcatttcaggtttcgtcgttttggcactgacaccatgattttactcgctctgagttcccaccaaggggagcccaccaacggcgtcacaggccctggccgtggcgctattgactgcagggatgaggcacagcgatgctgcagaagatggtggatagctcttaagtttcagaccacccagccctttccaatttccagtttctttattccagtcaaaagtgctttgtttgaatatcattcttgcttgcttatgtagaaaaatcttacttacacgataggatgattagaagcaacagaacataagcattcagtggctgcttcaaggtcctccctctcccatcccagaaatgccttccttatggaaaataagttttacttcccaattatgtgcatggacctctgttcattgcagcccccattggtactgggttattattattagcagtaagtctagtgttgagttcatgcttctctagaaatgtttccaaagtcaaacaggcttatcttaggctccagataaaatatctgtatacaaaagcttcctggttctcattaggagtagttctagatttgccaggctcctggagacctgagatgggtccttatgaaaggatttcagaaaccctcacagtcatcaacacaacagttctcgccaaatgaaaggactgctcaaattgcccacaaactgccactttttgtccatccatgaattagccagcagatgctgccctaagactgggacagctggtacataccattctcagaggtcttggggtacaggctttgtggacaaaactggttttttgagaatggaatccataatgctgttaataactttccttgcctactgacaaattcaatgactagcacagatctgcaatcttgaaaagacataa

SEQ ID NO: 914370 - DNA, 4001 bp, Homo sapiens
tcagtctcaattcctggggagcaggtagccgtgtgcagctccggggaagggatgcgggctgaaggcgcaagcttccctcccactccccccgcaagtcggcgcggggaccacccaccccctggaaggattcctagcctagccccagcaccctcccctcagtcaggaccctcgacagctctggccccctaagtctctctcgactactcctgggctgggggagggctgcgagggatccccgggtcgccgtctttgctcccatcacgcagctctgggtctcctccaggccttccctcctctacttcgtgacttccccgggtccctttttccctggtggtgccggctgaccttctgggttgtgggatgggggagaaaactccccaagagtaactccaaatcgtcccttctaccggaggggaggaaagaaggagactggcctcgtcccacaactttggggtgggggatcccccagtcaactctctcccgcggacgggcagctcctgcaccaagccccattcccagcgcttgcctacctcggggtccacacaaacctcacgggtccccggcggcggagtcacatcgtggttccgattctggctccagcgcccagccccggtccccgtcgcggtgctgctccccgccggccccacagcagcggtgggtgtctcattaaagccccccgagcaggaggtggaggggcgcaccgggctggctcctctgtccggcccgggagcccgaggcgctacggggtgcgcgggacagcgagcgggcgggtgcgcccgggcgcggcggcggcagcgtcggggacccggagctccaggctgcgccttgcgcccgggtcagacattatttagctcttcggttgagcttcgattggtcaaacggcgccgcccccccccccccgccccccgccccccgctccccgctcgcccgcgctaccgatacccgttcgaggcggccgcttaaagggaacgccgcgtcttttcctcgcgcggggaaccgaggggcgcccggaactccccgctcccccggggcctgtcctcacctcctcccctagggccccgcgacatcgccctgcgagtcctgcgccctcctggggcgccttggacaggacgcccgcggcttcgaggggtgttccagccccagcctcagccccggggaaccccgcgtcccgcgccctctgcagaaaccccggctgtgggcgctggggcgggagggagcgagtgagaatcgcacgccccgaggtctcgctcccctagctttcaactctccccttcctccccatcccagcacccaagttctctgggagagggcgtgcgtttcccgggccacagacacaccttcccgcaccttcctgcactacggagcttgcgaacgcgagcacacaatgaaatcgcacagagcatgggggctattggtttactctgctgccttaaacacgccggcttaaacagagttcgcgcactgacctctctagagtttgcctaataggaattcaatcaagataataacagcattttttattgatgaacgcccccagataacgttacaccaagttacttgttccagccaggaagcccaggcaatgacagacctcgctaaagccacacgctttctagccgaccaaacagaaaaacggaaagagaaagaaagaaaacaaacccaccttttcagtcactacttgtcaaagtaaccatcaaggcagctgctccgggaaagacttcggccccaaaactcccacactctattattttttcacgttcccttcgcttaattaaaggggggagggggcgcgagtctttggtgcccggtatgtactccttctgttctgcagcaaagaagttaaattattgatagtggaaattgcatggcggaggtaatactcgcaccccatcagcgagaagctccatttgatctcggcagaggcagggagatttcatgctagttcgccggggggagcggcagcgagagcagccctctccgcggtgaatgggaaagtgggtgggagtccacgagagggctccacggtgccttgacgtgcgctgtcatatgatacctccgctgcctcgaaatagacactctagtgcacgaattaccagaatcaaaattcagcgcatttaaaatgatacatcttttattagaagagttccgttccagggcattgcatgcttttgcagatgttttcacttccagccccagcaaacacacgtataagctaacccttttaataacgaaccagggcagccaagataaataaaaagtcttctgctttaaccagagtgggggtaggtgattcgagggtgggggcagaactggctcagttaatcctcccccgccctccacccccaccactgcccgcagcaaaagagcaaatagcctttcgggttctcatttgcctgtagccaagacccttgaagagaacttatatggctagggtccagaggacattttcaattatccatttgatgaactctgtcaaccgtctacctgtgtttctgctttaaagctgaattttcttctcattagttcaaccaatttgtgcagaccttaaaatttagaataaagaataagacagcagtaccgtacttaacttggagtccctggacctcctcggagcataaaaatcacctgggtgagtgttaaaatgaaggtccctcctcctgaaattgtgatttagtaggggtggggcagggcccaggagttataattttaataaataccacaagcaattcgaatgcagacaatctgaagtcacactttgagaaacactctcttgggggtacaacactgggtatcagaggaatctcccaccaagcccacacccaaattctgcaggcagctttctgtgtgtgtgcgtttttctgtaatctcaaaggggtttgacctaataattgcgaagactattgctgtaagaatttccctaaagactccaacattaattttgctaaagggaaagatttataaacagtttcctttcctggaccctcttgtggttaccaagaatgtgctgttgaactgaatatataatattattacatactcagttcaatttacctaagggtttacagttagcaaaatgaattcactaacattagctattttagaacttctaaagactagtgacagaaattatttacccgttttataaaagaagaatccgatcctctgccaggaaataatttacccacgttcacacagtgaagtaccagggacaagacttcagtgaactcaagaattcctgctagaaataaccctgcttccatctcccccaccccctaagtgaagctatctgttccttggaagtgttatcagaatgtgtgatcattcagagcgcctttgcaaattgttggactaaatagtcaaattattcaaatatatgcatattcttcgagtgtcacacatttagctttgcacctctgtcaacttgacagagcacatgaccaatacaaactaccctacagcacagatggcagagtttattgtggaatatttaatgtatgtgaaatacgcaggctaaccagaaagcaataaaggacagagggcatgaagctggataccgctaccccacagaccctctgcgttggttcccaggttgtaagatgaatgcaggcacaatttcttttagtagcacaatacaatttaaaaggctagtgttatacatttaaaaaaaatacttgtactacattataaaggactggaggaaccctactccaaactttaactttgttaacttcaaactgatgcttcacatttgcttgaaaatgagttctaccctcaggtttttaagctcaattgtaatttatttccttcctgaaaaaatacctggcaagttaatgccaggaatctaagctagcattctgaaggctgctcacttagaagttatggcaaatcttttttctgctaaattcacattggcacgtcagcatttctgctgaaggaaaaagtgttctcatttcccagactctgattgggtgggtctatggccaatcttcttattcctactc

SEQ ID NO: 914371 - DNA, 4001 bp, Homo sapiens
aaaagacactgaaacagatttcctaaatgcttcattttctggatgcaccaatgttgacctactatacatgttaaatggttttaaaatatcaccttaaaataaaggaaacttccagctactaactcagctctgaatgggctatgaaaggctccaaaggtatgtgaaaaattactgttattttgctttaaaaaatgtgatgtctaagagtgtctgcaatgttctaatgcttcaaaacatgtacgtaagccttgtttatctggaaatcatttctttctgcttatatcatttataaatagaaaatgttctgtaataacttaaaatagttccacatacataatgcttttagtgtcataatacttactactggtctatatttaccaacatttatcacattttacaaaatgaagtagaagaaaaaaaagacaacgactttatggccctggaattccagtaatggtgaccaacatgttttaaattccagtaaaggttatggttacatttcaacaagtgtctctttccttttttttacctctcctgctaacccagaggtaaatttcccaaaaaaaaaaaaaaaaaaaaaaaaaaaaaagtcttaagcaaggcatttgcaaaatcagaaaacaggaacaggagtttagtgattgtttttaaaaggtgctgttcccagggtcaaaactttgtggtgtaatttcaacatgctatgttacctattatgtgtaatgccttgaaacgctacatgccataacatcagaaatctccaacctaaaaattatgttgcatgagataagcattgaaggcacacacgttcatacaaattaaatctgtaattatgcctcaataagttaaaatgtaaagacatatcaaattgtaagaccaaaatggcttttgaccttacaacaaactcatataaaaatagatttttccataataataaaggggagagagagattttgcaggatattgagtcagtagggaggggtctcatttaatatcatgtcgccttttatatgcagttagaaaatcaacgttcccaattacatattactttgctttaaaagattactaggaggattaataaacactcagaaatatgcctttctttgcttctggccaagaacattcctgcgtgcttgtcggaaaatgttctttggttgctactgacattaaggagtaagtgcaggataactagaggaccctaaaataagatccaagaagccctaacacaccgccaatcgaggcttatcaaagctcccccagcgcgaggaaaacttgcatagaagccaaacaagaacgaggagtcaaaatccaccgacgacgagtcgcacgccccaccgagctggagtcagcagcaccattcaacaagtccctcctaccagctctctaagggatcccgcaaaaccttcctttaccacttccccacccccagcctcccgcccccagtagctgctcttggcagcatggccggcagagggcaccctctaccttccctagcttcgttctctgggtcccctcctcctcctcgcctcccctccaccccggtccctcatccccgctctacccccaacacacaaacactgcatcctccagttcaccctcgcagccccgaggcttcttccttagggatgcccctagtctgtaatctccccttcttcttgcccgtcaggcacagagcccccaatcctcagctatttctttccaggagtaactcactcacccattcctcttcccggctctgcatccccagagactaacccgagtcaagaatcccccacgtacatcccaaccactccccgaaagtcaaaactcttaacttccctggagggcgcttcagaagaggggcgcaggatgggtagagatgtgggttcggcctgcccgagagtgtcgcagaccctttcagttcccagcggtaggaattccgcctcccaagttttccaagctacattggcttcggacttgtaagtccacttcagtctcaattcctggggagcaggtagccgtgtgcagctccggggaagggatgcgggctgaaggcgcaagcttccctcccactccccccgcaagtcggcgcggggaccacccaccccctggaaggattcctagcctagccccagcaccctcccctcagtcaggaccctcgacagctctggccccctaagtctctctcgactactcctgggctgggggagggctgcgagggatccccgggtcgccgtctttgctcccatcacgcagctctgggtctcctccaggccttccctcctctacttcgtgacttccccgggtccctttttccctggtggtgccggctgaccttctgggttgtgggatgggggagaaaactccccaagagtaactccaaatcgtcccttctaccggaggggaggaaagaaggagactggcctcgtcccacaactttggggtgggggatcccccagtcaactctctcccgcggacgggcagctcctgcaccaagccccattcccagcgcttgcctacctcggggtccacacaaacctcacgggtccccggcggcggagtcacatcgtggttccgattctggctccagcgcccagccccggtccccgtcgcggtgctgctccccgccggccccacagcagcggtgggtgtctcattaaagccccccgagcaggaggtggaggggcgcaccgggctggctcctctgtccggcccgggagcccgaggcgctacggggtgcgcgggacagcgagcgggcgggtgcgcccgggcgcggcggcggcagcgtcggggacccggagctccaggctgcgccttgcgcccgggtcagacattatttagctcttcggttgagcttcgattggtcaaacggcgccgcccccccccccccgccccccgccccccgctccccgctcgcccgcgctaccgatacccgttcgaggcggccgcttaaagggaacgccgcgtcttttcctcgcgcggggaaccgaggggcgcccggaactccccgctcccccggggcctgtcctcacctcctcccctagggccccgcgacatcgccctgcgagtcctgcgccctcctggggcgccttggacaggacgcccgcggcttcgaggggtgttccagccccagcctcagccccggggaaccccgcgtcccgcgccctctgcagaaaccccggctgtgggcgctggggcgggagggagcgagtgagaatcgcacgccccgaggtctcgctcccctagctttcaactctccccttcctccccatcccagcacccaagttctctgggagagggcgtgcgtttcccgggccacagacacaccttcccgcaccttcctgcactacggagcttgcgaacgcgagcacacaatgaaatcgcacagagcatgggggctattggtttactctgctgccttaaacacgccggcttaaacagagttcgcgcactgacctctctagagtttgcctaataggaattcaatcaagataataacagcattttttattgatgaacgcccccagataacgttacaccaagttacttgttccagccaggaagcccaggcaatgacagacctcgctaaagccacacgctttctagccgaccaaacagaaaaacggaaagagaaagaaagaaaacaaacccaccttttcagtcactacttgtcaaagtaaccatcaaggcagctgctccgggaaagacttcggccccaaaactcccacactctattattttttcacgttcccttcgcttaattaaaggggggagggggcgcgagtctttggtgcccggtatgtactccttctgttctgcagcaaagaagttaaattattgatagtggaaattgcatggcggaggtaatactcgcaccccatcagcgagaagctccatttgatctcggcagaggcagggagatttcatgctagttcgccggggggagcggcagcgagagcagccctctccgcggtgaatgggaaagtgggtgggagtccacgagagggctccacggtgccttgacg

SEQ ID NO: 914372 - DNA, 4001 bp, Homo sapiens
gccccgccagcacagcagcaggcgggagaaggagcctaagcgggcattagccacttggcttgtgtaagtgatggtcatggccaggcagtgggctgcagcaggtgggcttgggtcctggtagagagggacaccgattgggggtttgtagggatcagaggccctggtcagagcctgtcaggacccttccctgctctggacctcaactctcccatagggaccctaggaggtggatgaagtggtctccaaggccctgccagttctgactgccttttggaagtagaaacgcaagaaagtgagcccagaggctgccctttgctttggcagggaagacgtagataggcgtgtgcattgccatgtgcctttaactttctataatcactgggcgcagtggctcatgcctataatcccagcactttgggaagtcgaggcaggtggatcacctaaggtcaggagttcgagaccagcctggccaacatggtgaaaccctgtctctactaaaaatacaaaaaaattatccaggcgtggtgcgggtgcctgtaatcccagctactcaggaggctgaggcaggagaatcgcttgaacccaggaggtggaggttgcagtgagctgagatcacgccattgcactccagcctgggtaagaagagcaaaactctgtctaaaaataaataaataaataaataaataatacaatgacaaaggcagtaacagcagcaatgtctacacactaagctcaggtcctctgggctaggcagtgttctcagcccatcttgttcgttagctcccaagctctctcaaccaccctagtgtgagaagtatggaagggaccaggcagccctgtccaccaccatattcccattcccataatggaacctagctggtagagatgctcaaatgatgtttactgaatggtggctccagggcctttccacctgctgatcttcctgcctggaggaagctcttcctgagatacctgcatggttccttcccactccaggttccctttagaaaggatgttcccaaccatccaacctggaaatagagccccactgccaccggtgctctgtgtctcctcaccttgcttgatatttctagagagcacttatcactacttgaaattatacaggatatctgcctgtttcctgcctgtttcctcctcagaatggaagctcctcttgtgttctcgtagaaggcgctcaataaaaatttactgaagcagtgattgatgccccctccattctttccctgtgtgttttgctgcagccacactggctggctgtgcctgatgcacaccaagctcattcccacctcagggcatttgcacagacacacaggtgcccacacacctgcgcatgtgctgcctgtgtgtgcatatcccacacaaatacgcaagatggccatccaaccctgaaggcctcaaagccccagcccagtccacctggggcaccttgtactcacaggtggggttccaggtgggtccgatgatcccacagaaggtctggcgactaggctggtgggactccctgggactctgtggccagtgcccctgcccactcttagaggctggcactgcccacgtgagtgctgagccgccgtcacttgactccctaagccaggacctccacaaaggagtccttgtcttagtcccttcttgtaatctgctcagaagcaacggctagcacagcctggccatggcccctctaatttcttcttggagggtgttgggctgagaccagggctggaatttagggcaacaccccctctaccatggccctaaaatccagaggctaaaggatctgctccaccagtgttctgacccctgaggccttgcagagagagttgggggttagggggctgtgctgagcttcaacttctgtgccaggaactctccaggaaggaggagcctctgactaggccctggggtctttgacagccctgtgggctatggaaagaatgaataccgggctgcagtcaacagtcctggtttctggtcccagccttgccacctgtgtgtggtgaccccgggtaggtttcagctcctctctcagcctcagtgcccttatctgaaaaggatggtgttgcttgggaatttcatcaccctagtaaaatgacagaattctgcatatgctgacgaggagctctgattggctgctggtgacatcatacgttattctggctgtgattggctggcagggcccatcagtaagttgcttcagagagatggaaggagaagcctgccggggctggtggaggggggtgagtctggtgggggttgacagaacagccctggagtttatgctgctggcttccagccagccagtgcaatatgggaataaatgcccagatccccacgggcagctggtgaaaatctcagcatgtgattcaataaattttaatacatcaatccatactcaagggctctcctaagctgttggaagtggtgggtgtctacctacacactcctcttgtattgttcaatgaagagagcagagctctaggcagcagtggttcttggtctttagaggccgtaagaatcgcccaaatgtttattaaacgggcagttttctggatctttctccagagtctgagtctgtggccttagggatgttgcattttaatcaagcactgcaggggattatgagatgtgtggttttgggactaaacttccagaagccctgattttataatatgaccttgtgtcttaaacccactctcatcctccctttcctgtcaccctctctctctgaaatgtactaagcgttaactatgctgagattgcaggtgatttttctacacaccactttttttttcactttaagttctgggatacgtgtgcagaatgtacaggtttgttacataggtatacatgatgtgcaggtttgttacataggtatacgtgtgccatggtggtttgctgcacctgtcaacccatcatctaggttttaagccttgcgtgcattaggtatttgtcctaatgctctccctccccttgtcccccacccccacacaccatttttgcctttatataattatctgcctagaaaaaaaaacactatttcgcaatgaccttgaatacttttctaatcatggcaaacaataaagctgttgttattataagactctctttagaggcagccttgtaggagtatttactgcctccccgctgccccatcgctgtcctcaactgatatggggaaagaagcaggttcacttcagcctcagtctcctcatatgcaaaatgggacaacgatgcctaccttggcagccgaatgagaatgatggatgggacatgtgtccgtcaactctccaaaccactggtgcctgtgcctgacccctacgaattctgatttgattggtctggatggaccccaggtgttgggattgttcaagttctccaggtgattctgattttatggcctgtgctgagtcattgcttaatggattatttccctatcctgtattcccttcccaaccaacacatcctgaaactcaagagctttccatttagaagatgataaatatatattatatatatttatatattaacatatgtaaatatgtattaatatgtctataatattacaaatatatttgtatgtacacatatatttatacatataaatatataagtaaatatataactatatttttgagacaaggtcacccaggctggagtgcaatgggtgtgattttggctcattgcaacctccacttcccaggctcaagcaatcctcccatctcagcctcccaagtcgctgggactacagacgcacaccaccacacccagctattttttttttttttatagagatagggtctcactacattacccaggctggtattgagctctaagttcaagcagtcctcccacctaggcctcccaaagtggtgggattacaggagtgagccgccacactcggccaataagtatgttttaactaaagttaacacacatgcctggcaccatgcctggaacattgatgctcattctgtactctctga

SEQ ID NO: 914373 - DNA, 4001 bp, Homo sapiens
ttcacgctccctgtaagcaggctggtcatgcttgtgaaatccgagtcctaagggaggaatcccagcaagatcacacagaagtggtgatttgaccacccacccgcaccagtgctgaaggagacactgcaggctctgcagcaggtagtgctagggcagggcactgatacacgcacaccgtgggcccttaccatgccatccaggtaccggttctgatcctctgcatccctatcgatgtccagggcgagctgttcagcagacagagagggcagggttgggccagagcagacacataatacagcactcaccctccccagaccagataaaccctgccaacaactctgccagacacagtggggctgcagcagacagaaaggtccaggtgtcagctggggcctcatgcaggtgagcacagccacgaattggatgaggatggaaaactgcctgaaactcctctgggccctctgccttccctctgatccccattccccaaaggcaccaggtggaggtaagaggacagaccaccactgaccgatttgagcctggtgactttggaggccaggctgtcagccattcgcttgttctcccggtctagaatctcttccacagcgcccgggctctgagctgagaaaagagaggggctgaagggttgcatccatcggtgagcacggcccctgacccctctcactccaaccacatctgggtgagtcagaaatctagggggccctaaccaaggttccagcaggtgaatcttgcacatgagacaggctgcataaaggacgatgtgtgtaagggcctgtcatgtgaacacatgtcctgtgtacacatcaaggtggggatgggcaagcacccacaatgggttcggtccaaccagcaccttctgagactgtgtagcaaaaactggacccagccctggggtgctagtatgatgtgacacttgcatccagggaggtcaccatctgtgtatgtggagcccattcttatagaaaaagagtaaactctgctaagagcatagaaaagacttgggaaaagtacccagcaaggcagcagaaaggctcctgcagagacgacctttgagctaggtcctgaagaggtggcaaggaaccaggacagaacattgggaaggccctttaccgcacagaaaatggctgagcaaagttcccaatttccccgagacgggagctgaggtcgaccaggagcgggatccttggtctgcatcccgcatggggcttcctgcaacacccagggcagagtgctcgcagaggcctggcctgtgacaggctgggccaggggataaggaagttctgtcacatcaggtgcgtgagaaccacctcctccctagcttcagtgtcaggaagggatgccagcgtccttccagccacttcatatttataaattcctttaatcatcataacacctcacagagacaggcatcaatatcccactttgcagacaagaacacgggctccaggaggggaaatggggccaccgaggccaaagtaagagtcctgcttggacaccagcggagcacagcctctactcctagggcctggcctcgggacctgtcgaatgccgactcccgctcaccccgaacccatgcagaacgatctcacagggggcggcggggagtggggagaccccgctgctgcgcgacccctcgctggagctgctgggccgccacgcgcgccttcggtcctaacggcagtgccggccgaaacccggccctgctcggacccggaaggatccgaatccgcccccctgacagggtcctctcggccgaggtcaccccagctgggccagaggcaggcgcacgcggctctacaggcagcggcgtcggtttcggcccggccctgcccccaacggctccgctctcccgcgctcaccccgagcccagtccgccatcgtgccctgccccggctcctcgacgcggacaccgacgcggccacagccgcctcagacgtggcgcagtcgcggggaaagagcttccggccccgcccccagctagcgatggccccgcctccgcaccgaccacgcccctagatagcccagccccttccgcttcgggctcgctgacttccggcttagggccgagggtggggaactgccgggcgcggaagcgatgggcatatctgtggcttattttcagcactgtcgcgcagacagtggcgcgatctcagctcactgcagcccccgcctgccgggctcccaaggtgctgggattacagcagcaccgcggatgtgacgtttggtgttcctgtgaacgtggggcggggcggggccgtttgcttgctcagtgcctagacgatggtggtggaaagacgcttctgtgggttaggtcctaacggttaggaaggattcacaggcgggtcatgaggaaggagcagacccctcgggcagaagcccgcgaggagcactgggtgtggtgggggcaggggtgcctcctctgtcaagtggagatcggcgcctcgctcgtgcctgcgagtgcgcgccgcgtcgaatacagccgtacagaacgcactacaggaaagtgaagccgggagagagactgggaggcggcgcggggactgggggccgtagacgcctttgctcccgggcacttgttagaagagcgagtggatcgcgcttcctgtgcgtcactgaatcctcatgacggccactgaaacggacacgcaggatctttgcttttcaagagggaactgagtccaggccagactgggttgctcccctttctctcggcccctccacctttgcaagtgctgctccttctgcctggagtggctcctccagtcttttcccggctcacttcccaccgtccggtgtcagcaaaaacagcacttcctcacagcccgttgcagcccagcagtcgccttttgcttcttttgaagcacagccctgtgaccgcctcgtgtccttttgtttttccttgtcccccttcccctctggaacataagctccacaaaggcagggacctgggaatcccgttcgcctgcattccccagcaaacgcctaacgaacccaatggcccaggactgaaaattcctttccacttcggctttcccctctacatcccatcggttctgtggagctcgaggggcgtcactgtgtgtgtggcagggcacggtgggggctgagatcgtttcctgttggaacttctggcccaagaagcgcgggtcacaaggagaggggtcagttcggttcagagcgactcagcccctcgactcgggtcttaaaacctccgagccgccagttctgcctcaggccgcgcccccttaaagcgccaccagacgctgcgccccgttaaagcgccaccagacgccgcgccccgtcccggcctcccccgcgcgctggcgcggggctttctgggccagggcggggccggcgaactgcggcccggaacggctgaggaagggcccgtcccgccttccccggcgcgccatggagccccgggcggttgcagaagccgtggagacgggtgaggaggatgtgattatggaagctctgcggtcatacaaccaggaggtaagcggccgcctgaggccggggggcgggcacggagggggtggggcagggtcgtgcgcgggtagcagggagggcgtgggtgaggcagaggctgtgtcagcaagcgtaggggacgcggcggggtgcggggggcaggtctgggatgcagtgttgcggggagagtgggggtgcacccgttgggtggcaggcgtgtagggatgggggcgagtgccgaccctgccatccgttctgagcagtggctgctgcctgagttagaggccaataggccgcccgcatcagcggacgcggatcctacccctctgtggatttgaattcactagttctctctgcagcactcccagagcttcacgtttgatgatgcccaacaggaggaccggaaggtgggtgctggcccaaggggtaaaggggcagggacgggtggccccaggaagaagggcctggtggagccgctcttctccctgcccacagagactggcggagctgct

SEQ ID NO: 914374 - DNA, 4001 bp, Homo sapiens
cctgtgcctgctatagtgcttgatgtcaaatgaatttggcttaaagttcaaaaactgtaaactctatctttgttaaatatcatttgtatttgtttccatttcctgcagcatcatgttgactttcttcctaactttgtataccactattattcttgatcaactgaaggtattttctccataaacttagttagccataaaatttccacagcacactttttacactgcatttaaaaactaaataacctgttcatcatttaaggactattcagctataattatcagtcatgttgtaaacattaatcaatttatcacaagataaaacttgtcctttctagtgttatcagaaacgcctaacaaaatattgtactaccaaaaaagtactgcttagcataaagtatcagtaatcaactctactagccttctttctgaaaactcttcaatgttttaaaaatataattcatacacaaaattacactccatagaattcaaactatatccctttataaagtttcgagatctccataatgggatttattactgcagggggacaaaatagggatagggagattcttcagggttgtaaatctgaaaagaaaaaacaaaaagtattttagaaaactgtatgtgcatgccaaatagaacttacatactcttcaatttattcagtaaagtctaagaataattcacactttagataatacatcttaattccagcaatttgtcacaactttctaaatgaaaaagctattaattaaaataagtaaatgcaacatactccccatagcactaactatacgtgtctttaaaacgcacaacttcagagacagatggaaattttcacacaggaaacattttgtccttgctctcctccccttttctggcctaaaggtaactctggcactctgctggaggcaaaggcacattggttaaaaagacagacagacactccactacaccctgtcagcagcagtacagcaggaattaagacagcaacgttagtttgtaatatcaagtctctccacgactaggaaaactgcagtaaaatgcaccacgagttcattaatataaactcttaaactctgccattcccttacaatttcaaagcaacgaccacagaaagcaactcgaaaacaaaacctaacacagtggcctgtgaaacagtggctccggcactacgaccactggcatgattgctttaattacacccggtcttatatcctatctttaaatgaaagatttttatctacgtgcaccgcactgctgcattctctttacgcaaattgcagctgggcaggggataggatggaagggaaaagaatagaaactatgggatttacccaataatttcccagagttgcttctcacaatacacaacagacgactactggaatgacagagcgcagtggcaactatgaaatatgaaatatcgccgccaccgaaatatcttcgtttcaatgtattacattaaaagaacgccgagggctaagtttaaaaccttgcaaaaactgcgagaaaacatcttggtcaaagtccaagggccagaagagtgggcggcggccagaggcttgaaaacaagtcattttaaaaatcgctttgactgcaagtctcgaagttggggcttccgaatccaataaaaccttggcgagagtagaaagcagagagcccccggcgaccctcgacccttggccgaagggcctcaggccccgtccttcctcgttcgccgccacatcagggaagtgggcccccgcgggccctcgcgtccccacccgccccacgccgcccgagcccggaaggagcagcactcaccgcagtgcgggcgcagcaaacacggaagctgcgcggctgcctagaggcctccgcagagccgggaatcagcggcgccgacaaggagatacggcccgctcggctcggatcagcccgggcgctcccgaagcccgccgccccatccgggctcactctgacgcacgatgacgtcagcgcgcccggccgaggaccagcgttagccgccgcgcgagggcgcccgggaggctggggccggaaagcggaaccgagagcgctttccgccgtgcggcgatgaacctccgggaaagacgctgggaggccaggatgcccggcgcaactggacgctcatcgggagtcacggggtcggccctcaggggaacggggactatccgtatcaactcggtgtttgttcgttttcttcaccttgcggtttgtgccctctccacatttcctctctgtgtctaccattctcctgggggacgtggcaaaccgtgagccgctgcgtttgagttttgggaaaccctgcggaaacgccctggcgccggtggttttgcgcgtcctaccctgtgtcacctcagggttatgatctggcccctggcaaggctccccaagtgtgatgcctccccccgtccagatgactgcattttgaggatggagtcagtctggtggcattttttgcttaagtaaacaattgtaaccgtttgtgtagcatcagcgttcaacagctgcctgtgcaaatcgaaaaaagcgaaactttggaaactaggaagcatcagatgaataattctgaagacttgatgtcaacgggagtatcttgtttttaaacttttggttttctgttctggagacaaacagttcatatgcactaaagaaaaaagtgtcattatttcagatgctcattgccagcaaagagaactgtattgcaagtcaggcttcactcccagtattttctgaatgtttcaataaaatgaaatatatacgtctgcctgtgtattggtgtacatgcacatataattgtacataaaccagagaggagcccaattttttttaatgcttaggtaatagaaaatttgtaaataaaaacccttggcttttgctagtcatggaccttttgtatccccccgccatactcccccaatagtgccatagacacagtgtcgtgcagtaaatgtttgtggtatgacaaccaacgaacgacttttgaagttgacgctctttgcccgttgaatccgatgcttgcttctctctggggaactccaaggggcaaatatttaaaaaacttccaaatagcaagccacttaattagggagccgggggaattccaagaccctgaaccatttcccatttcctgtctgtgtcatttctgcctgccagtcagtcacagaacaggaggtctactgttccaatgttaatagtcaaagaaagtgagtgtaacagtttgtaatacagagaaaagaaatgccatggctcccaatgactaaaaacttccaaaaatgcacctggggcttggtagtagtttagtatttagttcaagtcactatttctcggaaggtttacagaacattcctaacacatgtgggaaaatatatatagcaagaattgttcattctgaactcaagattatttctctttttcagttcttgtcctgaccaaagcagtaagataatgaatatacttaagtataggggaaagcttgcatttcaaaaactcaaaagccttagatatttttaacaaaaaatatttgtaatatttacatataataaatagtacctcataacttttaatcttgtataactttgtagtctagtgttacagctagttaattcagttacctgtttattcagttaattttttttcattttgctagtataaagttgctgttaatcttaaaaaaataagctatgtatgtctgctgcagttgcccttctaacgtttttcacatttatgtagaaaaaaaatttacagtatttaaaacaattttgaagaagaaaagtaagattggaaggtcttgtcctaccaggtaatgagttacaataaagccatagtaattgagacagtcttgtattattaaacgccctaagatggacaattaaaggaaggagatacagagccccaagaagagacccatatctatgtatttgggaatttgatatactggcattatgtattaatgagaaaatgattaattactcaataagtaatgctgaatgaatggttat

SEQ ID NO: 914375 - DNA, 4001 bp, Homo sapiens
taagcactttaacatgacaacccaaaaaatctcattttattccaataaacaaaagtaattaaaaccttcatatggtcacactatttaaaagctaagttcacacagcttatcatcatagtatttacttaagtgggctaaattacttcagctgacaacttttgggggaagtcaatacccacaagctttgttgaacctgtgcctgctatagtgcttgatgtcaaatgaatttggcttaaagttcaaaaactgtaaactctatctttgttaaatatcatttgtatttgtttccatttcctgcagcatcatgttgactttcttcctaactttgtataccactattattcttgatcaactgaaggtattttctccataaacttagttagccataaaatttccacagcacactttttacactgcatttaaaaactaaataacctgttcatcatttaaggactattcagctataattatcagtcatgttgtaaacattaatcaatttatcacaagataaaacttgtcctttctagtgttatcagaaacgcctaacaaaatattgtactaccaaaaaagtactgcttagcataaagtatcagtaatcaactctactagccttctttctgaaaactcttcaatgttttaaaaatataattcatacacaaaattacactccatagaattcaaactatatccctttataaagtttcgagatctccataatgggatttattactgcagggggacaaaatagggatagggagattcttcagggttgtaaatctgaaaagaaaaaacaaaaagtattttagaaaactgtatgtgcatgccaaatagaacttacatactcttcaatttattcagtaaagtctaagaataattcacactttagataatacatcttaattccagcaatttgtcacaactttctaaatgaaaaagctattaattaaaataagtaaatgcaacatactccccatagcactaactatacgtgtctttaaaacgcacaacttcagagacagatggaaattttcacacaggaaacattttgtccttgctctcctccccttttctggcctaaaggtaactctggcactctgctggaggcaaaggcacattggttaaaaagacagacagacactccactacaccctgtcagcagcagtacagcaggaattaagacagcaacgttagtttgtaatatcaagtctctccacgactaggaaaactgcagtaaaatgcaccacgagttcattaatataaactcttaaactctgccattcccttacaatttcaaagcaacgaccacagaaagcaactcgaaaacaaaacctaacacagtggcctgtgaaacagtggctccggcactacgaccactggcatgattgctttaattacacccggtcttatatcctatctttaaatgaaagatttttatctacgtgcaccgcactgctgcattctctttacgcaaattgcagctgggcaggggataggatggaagggaaaagaatagaaactatgggatttacccaataatttcccagagttgcttctcacaatacacaacagacgactactggaatgacagagcgcagtggcaactatgaaatatgaaatatcgccgccaccgaaatatcttcgtttcaatgtattacattaaaagaacgccgagggctaagtttaaaaccttgcaaaaactgcgagaaaacatcttggtcaaagtccaagggccagaagagtgggcggcggccagaggcttgaaaacaagtcattttaaaaatcgctttgactgcaagtctcgaagttggggcttccgaatccaataaaaccttggcgagagtagaaagcagagagcccccggcgaccctcgacccttggccgaagggcctcaggccccgtccttcctcgttcgccgccacatcagggaagtgggcccccgcgggccctcgcgtccccacccgccccacgccgcccgagcccggaaggagcagcactcaccgcagtgcgggcgcagcaaacacggaagctgcgcggctgcctagaggcctccgcagagccgggaatcagcggcgccgacaaggagatacggcccgctcggctcggatcagcccgggcgctcccgaagcccgccgccccatccgggctcactctgacgcacgatgacgtcagcgcgcccggccgaggaccagcgttagccgccgcgcgagggcgcccgggaggctggggccggaaagcggaaccgagagcgctttccgccgtgcggcgatgaacctccgggaaagacgctgggaggccaggatgcccggcgcaactggacgctcatcgggagtcacggggtcggccctcaggggaacggggactatccgtatcaactcggtgtttgttcgttttcttcaccttgcggtttgtgccctctccacatttcctctctgtgtctaccattctcctgggggacgtggcaaaccgtgagccgctgcgtttgagttttgggaaaccctgcggaaacgccctggcgccggtggttttgcgcgtcctaccctgtgtcacctcagggttatgatctggcccctggcaaggctccccaagtgtgatgcctccccccgtccagatgactgcattttgaggatggagtcagtctggtggcattttttgcttaagtaaacaattgtaaccgtttgtgtagcatcagcgttcaacagctgcctgtgcaaatcgaaaaaagcgaaactttggaaactaggaagcatcagatgaataattctgaagacttgatgtcaacgggagtatcttgtttttaaacttttggttttctgttctggagacaaacagttcatatgcactaaagaaaaaagtgtcattatttcagatgctcattgccagcaaagagaactgtattgcaagtcaggcttcactcccagtattttctgaatgtttcaataaaatgaaatatatacgtctgcctgtgtattggtgtacatgcacatataattgtacataaaccagagaggagcccaattttttttaatgcttaggtaatagaaaatttgtaaataaaaacccttggcttttgctagtcatggaccttttgtatccccccgccatactcccccaatagtgccatagacacagtgtcgtgcagtaaatgtttgtggtatgacaaccaacgaacgacttttgaagttgacgctctttgcccgttgaatccgatgcttgcttctctctggggaactccaaggggcaaatatttaaaaaacttccaaatagcaagccacttaattagggagccgggggaattccaagaccctgaaccatttcccatttcctgtctgtgtcatttctgcctgccagtcagtcacagaacaggaggtctactgttccaatgttaatagtcaaagaaagtgagtgtaacagtttgtaatacagagaaaagaaatgccatggctcccaatgactaaaaacttccaaaaatgcacctggggcttggtagtagtttagtatttagttcaagtcactatttctcggaaggtttacagaacattcctaacacatgtgggaaaatatatatagcaagaattgttcattctgaactcaagattatttctctttttcagttcttgtcctgaccaaagcagtaagataatgaatatacttaagtataggggaaagcttgcatttcaaaaactcaaaagccttagatatttttaacaaaaaatatttgtaatatttacatataataaatagtacctcataacttttaatcttgtataactttgtagtctagtgttacagctagttaattcagttacctgtttattcagttaattttttttcattttgctagtataaagttgctgttaatcttaaaaaaataagctatgtatgtctgctgcagttgcccttctaacgtttttcacatttatgtagaaaaaaaatttacagtatttaaaacaattttgaagaagaaaagtaagattggaaggtcttgtcctaccaggtaatga

SEQ ID NO: 914376 - DNA, 4001 bp, Homo sapiens
tcaactctcattcctgtcactctcgactggcctttttcctttcacataaccatgcttaaatctatctcaactttcaaatgaaagaaatttttaaaattctctttcggccgggtgtggtggctcatgcctgtaatcccagcacttcaggaggctgaggcgagtggatcacgaggtcaggagactgagaccatcctggctaacacggtgaaaccccgtctctactaaaaaaaatacaaaaaattagccgggtgtggtggcatgcacctgtagtcccagctgctcaggaggctgaggcaggagaatcgcttgaacccgggaggtggaggttgcagtaagccgagactgcaccactgcactccagcctgggtgacagagtgagactctgtctcaaaaaaaaaaaaaaaaaatcctctttcaaccacactttccactctagcaactaccctgtatcaccccttctcttcacagccaagcaaactggacatgtgtgtatggttaatgtctccattttccctctcccatttactcattaagtcagcatcacttaaaactgctttcggtgttaataacaccaatggcttttttgctaaaaccaatggaaatgtttgcatctgacactgggacacacttcctcttagaaatgtcccattccctgggcttctctgataccaagctcttgggattcttctttcatttctagtggttccttctcagattggctcagtccccagcctctcctcttctgactcattcatttaacctaccaagaaggcaacctccccagtcccagggctgttgggcatccctaccctttgggcatgcagcacatccatttttctgacactggagggcaagtgtgccttttctttctgcctcccgctagacagtaagctcttttagaatggcaactattaatatgtttcatctctgtacctgccctcccactcatagcatctgcagagcttggtatatggggtagacacgaagacttcccgttgaagaagtaaatgactgagacctgagtgaccacagtacttctatcaattttatattaatgaccacagagtcagctcagtgattgattagtatcaggctttggagtcagacatcgggggtgcccaataccaagcagtccggtaaccagaagcatgaccttgcacaagtaaatctccaagagcctcagtttcctcattgtcaaatggagataattatggtacctgcttcttaagattatgataattaaacgtgaaaaatacatgtaaagtcttcagagacaaacctagcacatagcaggtagcagtacttaatgttagcaataaataatagcaaataaagtcaatatttaatattattgttacgttagcatcaggtacatgccttcgacaatgtattgatcagagtaagagcactactaggtttccatgctgatcaccaggaagacaaccaaaaactgctgtcttcctaccaccgcttggaaacatgcgtccatttgctcattaaacgttttacttccttcctgtgccagagctctgccttaggctctgtcctgaaatttatttggcacctgcaaaggcccagtgataactcttggcaaccgaatcaaaatgccacaacttcacaattccactggctcactccaaacgtgaaatagaaattgagcacctggaacctatctagagcctgcttttgggccctggtgtttgataactgcgccccacccactgactctcaacctctgcagcgccccgggctctagccctaagcgcccctcggccagccgctggcacatctcttacaccaggggaggcgcgcgcgcgcgcacacatacacacacacacacgcacacacacacacacacacaccagccttccttgcccacctgctgcccagaggccgacgacgcatgcaccagcaaggacaagcccagtcttttcaagcgacacctgtcgcctggccttttccgtgccggagggcgcgagtctcacgctgtcttttaaatgcgtcacccaaatccccacccctatctgtaccaggcgttccgcactcctcccagtggtttgcatgtgcactggtgctttccttttaggacttaggggaactccagcggtaataaccacacacacttcctcttaatcagtggcctggcaaacccactcggggatttccatgacccaaaagcatgactcttaaccgtggcatatcttcgcggcatttactgaaagacatttgcttcattgctcgtgggtcagaggaaatcttgataacaacccatatagagaggacgatcattgcttagcctgcctggaaaaggtcaatatgccctgttctccaccctccatccgccatacactttacacgtaaaaaggttaggtttttcaatcttctactatagctgcagaagtccagcatttaaaaaaaaaaaaatcgaaactttgtgaaatatttctatttatttttactttttgttctgatcaagaaagtaagaggtgaaaggaaatgtaggggtatgtgaaaaaaatcatgcagttctcctttgcagtttattttaccattttaaagattgaaatggcttggtaaattttctgtatggaaatacttttgtttggtttggtgagttgttttttttttttttttaataagtagggtggagttggctacttaaaaaaatccctcctttatagcctttgatctcacagggcaggtttctgagttgcagtgccattctcagggaaacctgacatctttgagtctaattgcactgccatatttccctcaacgttctctaagcagtaaatttaagcaactttatctgagagccatccgtaccagggtaacagatggatttggagagctcatctgattttctatcttccagtagatcaaagacaattaccaaccagagacagagcccataaagattattggagacttcatcgttctgtggaaacagcatccagtgcattctgcacgcaattggactgagctgaggcatcctcttgtttaggtggacttggctgtccatagcagctgaagttccagttggaattatttcagaaagactaagtgtatttatcatatggagattttaatccacatttgagtctgcttcaatcaagactttctaagccattttcaactcactcctgagattattgaaaataatttgcaggccttacacatttttgattatgtactcaccagaagaattttgaaaagctctgcattcccttgcccatttttaacttaacattaaaacataaagctcttgtacatgtcaagaatctacaaaatgtaaacatagatattttcagaaaaaattgatagagcactcttttaaatgtatttgatggatcctaataccatagtaatttgacatacatgatcatccatgaagcaattatcaggtcatctttaataactgaaaatattttatcattgccttttgtcattgaacattccaattcccctacagaatgttaatacatgtttgtactgaacatcttttatcatctctctgtcacatatctctgaaacaaatacatattagaacttgaaatctatttttttctctgggatcataaggatctaagtgttaaaaaaaaaaaaaattcctctttgaccaggcatggtggctcacgcctataataccagcactttgggaggcgaaggtgggtggatcatctgaggtcaggagttcaagaccagtctggccaacatggtgaaaccggtctctcccaaaaatacaaaaatgagccaagtgtggtggtgcacgcctgtagtcccagctacttgggaggctgaggcacaagaatcacttgaacctgggaggcagaggttgcaatgagtcaagacagtgccactgcactccagccctggaacagagtgagactgcatctcaaaaaaaaaaaaaaaaaatcctctttgattacattatcattgatattgttttcattacttttaaagcataattggtcaatacaatataaaaatatcgtaaatgt

SEQ ID NO: 914377 - DNA, 4001 bp, Homo sapiens
atatttttcttacttcctaaacaaaattttcttcaaacaacagcatatccatgaaggatctctatatggtaaagaaaagagaggatgacatacttcccatggtttctagacagcagatttctttacgctgaaacctgtgcttcacccacaatgctggactcagaactacacgaacctaagcgtattctcttatgatttggccagccatctttgagaaccgctaagacaatttggcaaacagtccttccactgttttccaacacactagaatataaggaaagtttgtttcttgtcagttttttctacctcaaaagatcccaggcatgattaagtttttgccttttctttctctttctcttttctttcttctacagaaaattctttactttaacagcttcaggatcactgatgcaatttaggagtttctccgatgcaattgagaaatgcaaaagggaggttctataggcagggtcttttctgcctggagcttttaagatcactgaggaaaaataactcagattctcactctttctctcctcccagcttctgagctgccctgcgggctcagttctcactgtgggtaggtatgggtcagggtagtggaaagaaagcagagaaggggacactagaatagcttaaagtaaaagctctgaaacaccttttccatttccttttccttttttccccacagatttagttctactcactctaataacagagttcataaaagattactggaatttctatttctttcagttccacaggtttttttttttgtaaagggaaagaaaggttagacttatttacaacacaatgacaatctctgattcttcactttaagcaaataaagacgcctagtgaaataaatggattgtgttatttaaaattgaaagcttatgtgaaccaccactcagaaacatgcttaaaaaatacagaaagaaaatgaaaaccctgtgactacacaagattattctgatgccaaatgctgagtgtacaactaagtagagtaattgttaataatatgacaagtacctacttccaatgtacaaatgaaatacactcaaaactgcaaaggacagtggcactgtacgctgccctaaggtttaccatcacatagctttttgttttttcatgaatttgcaagatttgttttaattaaatgccatttacttttaactagccagtttatcctttttaaaaattttattgtttctctgcacaatttgaaccaaatttggaaaagttatgggtaaaagtgggtagaaaagactgttaagaattgggtcttattgaaatcaagtttccttctgtgttgtgcagcctgaataatgggcgaaatctgtcctaatatcttgctgcatctgtcctaactcactccttttacagggcctcagcagaggaattgcataacaatgtaacttgtatcctggttaaataggaaggtctctgaagcacatgtccaggaacattccgcttcatggcagaggagccaagattgtaccttttaagagaaagcactgtttccttaggcaacataggttctttgttggaacccaagagcgcctccagtggcaggcgtgcttttgcctctggataaatggaactgccagaggctcgctctatccatcctgtgtagagcacacactcagattctaggatctcaaagaaatgtatttcctggccctctataggcaacaaagtcaccataatttgaagctattatggaagaaagtccaaaatttaacttccattcgctttattcagcaagtttttataaggcagatctcatatggactatgctttgcataagcacggtgttagatgggaagaaaaaagtggtgggatccttcctcctcttcctttcttcccagctcctgctattcatggaatttcccttgatttcaagtggctactcaccaaaatcctcaactgaaaacagcttccaaggggtcatgtacttattcaattctcttctctcttttctccaaacacaacatcatctgaccaaggtttgcatgcataagcattgctaattaacgataagtctccacgatgtcctcctctcagtaagtttgacacacagacctcagcgaagctgtatgtactgcctaaaagtaggaaagatctccacgttgatttctgaattgtaaaaggcagggatatgttttggacttcttgtcccttactgtgaacagacctaagagtacttactttattttttagaaagaacccggagctgctgatgtctgagggagtcgtttcaacagagactagaatatcgagagagaaaattgatccagctctcttgtctggtgcttataaaacatgaaagtatcaccctcgccatggcagaccacagggaatgatcagtgtgaattgttaagtcctcttctcagtgatgcttgcaagcaatttccctggggaagcaacaagttcctgaccacagtgttgtacacaaataaataaacaaaatgctattactttttgttcttcacattgggaaaagttcagaaacatcttgtttcaattgatgggctggaattacagaaacattttaattttgtctttccttgctagttctgtgcctgagatgtattggtaaaatggaacatgagtcatatttctaattgggaaaagcctggtaatcatgggcaacccagatctgggtgacttacagagtatttttgtgttgagagagaaaagacactaaaagtagaagtttcttacttagcagcagcagagaggctataagattgaatctggtgtttcacatggcctgtatcatggtataatgagaaggaatgtgtcttgcacaaattagcctatagacctttctaatcaggaccaatatgtgacatatacaaaggcaagatcagctgtaaggaaggattcactcctttaccaccaagccatggagactgcttgagtcatcatggccttggtctcttgatttcccttatgttatttgagtagaaactcaggcaccaatgatgcccccagttaaccataaccataatggtagcatccaataccatttttaaaaaagtcagggttgtagacaaaagactgatgtagaccagtggagaagacaagagggagttatgcagcctactctgagagcaaagtctggtttggatcttctctgctacttttgtacatttcatgctagaggcagaacaagtatccagggaacactttggaactttcctaaatttacagaggggcctgtaacattcaattagggggaacacagaatgttctactctagcaaaatttataggtagtataagaaattccatcaagtgtcttgtggaaaactgaatgcataaaagtaaggatgtggataatgggatcattcaatatagatttcaaaccaaagtccgctgcttaataactctgaacttgggcagagtacttaaccttactgaacatcagattctttatttgtaaaatggggaccataatatcttctttgctcaattatttgggggattaatgagggaaggaatataaattatcacaagatctggtatatagtaagaactttgcaatgtttttttcctctctttattgatgaatgctttccagatttctatttggcctcttctctttgagtttatagaatactaattttctgtactttgtggcaaatctattcaatttaacagtttttaaaatttattataatgtgagacatggaatatgaagaataaataatgcataccatttttataaaagagactcataatctactgagaaagctagaaacatgctgggtcactatacattagacaaggttaagtggaataatttggttatttaaacatttgggagaaggggtgatctaattatataccaggcaccatacaaggtggcaaagacccaaagatgtataagatgcaattattgaactccagggcccttaattttttttctttttcttttttttttcttcttctggttttttttgtttgttttgttttgttttgttttgtttttta

SEQ ID NO: 914378 - DNA, 4001 bp, Homo sapiens
ctaactgctccatttgccacttcacagttacacttttcaaggtctcatgaacactggctgttcctactttcacctcccacttgttcgatgtcctcaatctcagctgaaactgatcccgtagcattaaccaatgacttccttgtggctaatgccaatatttttcagtgcttattttaattgtctgctcggcaacatccaacactggtaagcattccttcttttactgactcatctaacatgtattgaacatctaacatatgctaggtaccgtcagacgctatggtatgcaggcgcccaagtgtgaatgtctttgacctcacggagtttacaagttcctgggagacaggggcaaaggagcacactataaccatgataggaggagagttaagaccaggggcataagggaggggtatataaccaggacctggagcccgatgcagcagggaggcttccagacaaagatggaccagctgggtgagctgcacttattgagggaacattccaggtagagtcagtagcaaagacccagaaataagagaaggaaagcagctgggggaacatgggtctaagtctcagtgagaaatctgagctgcagggatttggtcgtcagcatacagcaagttcttcatgccacaggagaaggtgcaaccagcaaggcacaatgtgtgcgatcagaagacgcccagggtcaccaaaggggcagatgaggagacccctacaaaggaggaggcaaaacccgaagtggtggagaaagagttttagaagaaagccaagtactgccaaggagtaattgcactgatagtgccaagtactgccaagagatcacctaagaagaagaaaacagtcctctcagcagataatctctcaacctcctgcaggcttctattttattgtgttcttccaacttctctggacactgctttgtagtcctttagaacagtgcagacaccactccctccaggaagctttgtttatatctatttgcctgttctcatatctgtccccgcaatcagtctatgagcctcactagggcaggggctgcacatgtaacttatttacctagcacagtgctggttcacttgatgactggaggatttgcaaatacaaatttaacaaaaaaattttttgtgagacagacattagtttttacttttcggtagtcccaggtccctgtaatggtagcaagctttccttgacaccagttcaagttgtgtatagtaagcctggcctaggtgagtgtttagtcatattcctcaacaatttcactaatgacctgcacctgacttgaaaggctcggttctctaaaccagcttcatcttcccgttatcaagcctcagttcccaacatttgcaatgcctcttcactgttagtatattcactttgtaagatgcagcttaagtctatctcttccagaagcctttctttcctccccctggttctgattatgagtgagttaagtcacaaccttcccaccttaccccgggtgcaaaaagcggataaccattcctgctctgagtgttgaggagctcacaggtggtaagggatggaaaagcacactgtaaagcgctgtacacaggcaatttatcttttcagaatggcagctcctccggggcaggcccctagggaaggcagaccctccccactctcgcagaggtcaatccagcttctccgcagcgcccagggggcctcccgctcccttctagatgcgccggagcgggccggaatatcactggctcgcccgcagcccagcacgcgtcaggccggttaaatctctgcttcggcctcggaggaggaggttgtgccggccctgctcgactaaccggagagggcgaaccaaaagccatgcatgacgatacgcaccgcggggactggagcctctggcctcacgacggagattccctgagagctgcccgtggttgccggtaccggctgctgccgccggactcccgtaggcgctgcgcggctcccttttcttcgggaggcagagcctatcggtgcttccgtgtgcgtcatcaggaggcgaccgtcggggatgctcacagttggacagtttggtcccgaggcatgctgggataccgcgggccggtctccatagtaactggccgacattcgcgcaggccttcggcctgcagggaaggccctgatggttcagtgctttgcagacggtgcccttcgtccgcggccatctccccacggcgtgcaaggggagaagccggccccgatccccccacccccagctcaggagagtaacggagccagctgtgggtgtgaacacgcatttatttacacattgtcatcggtaggcacatacccagcccagcccgttgaagggacagatctcaggctgtcacccatggaacctgcagacccttccctcctccagaacccttgaaggcgaagccctgagagaaccaggaattttaggcttctgttcaagagctaagaactaaattttatgccttcatctgatttctttccaaaaagtccatttcattaagtattcagacttcttagctccatcccattcatactttttgctctcctactacccacccaagattgttaataataacaataataataacaacaataatactgcgataatattaatacttcacatttgtacgaagcttacagaatgttttcacatatagcatctcatctgagcctcccaacagttccgtgaggtaggtattctcacctccctttttacagacagggtaaccgaggctcagagaggtaacgggatttactcaaggccacacagctagttagtggtaaagctaggaatcgatcccagcaccccatatccaagtccagtgtttcaacaccacagctacctctgtaaagtggagcgacatttcttaccccagtcaggcctaaatggtggcctgaggagccaagaggctgacttctcagattaggggagggaagggctcagcagcgtcggggagagttggggtacttggccttcaactcctgtttgaactggcgatataggatcttattgtgctgattttcagcctccttttggggatggaacttcaacgcttctttgaagcccttatgaaccaagaaaccttcgttcaggacctcaaaatcaaaccccgccacatgcagctcgcaggcctgcaggaggaaagacaggttagcaaagtttgatgacattgacaggcctgagactgacttccctaaagccacagtccagcgtcctcacccctctggaagtatcctggatcttccacaccatccacccacctcctgaactatgatccctcctgcttcattgcctcctttccatccagggccactcctcataactccctgatcccaccacccctcctgccccattacccctgccctctcccttatgagcacctggctgattcggttgaagccgtactgccgaaagcgctcgtcgaaggtgggcaccttgcctcctgccacgtagaatggctcccaggggtcctgccaaggtaccacgtaggcgggccgcagcaagctctcttccggcaggttgacccagcgggaatagttggtgggtgcctggcagggggtgcacaacccataatagaagggccgcacctcgccaacctggtagagctgcaccagctcgtttttgttcatgggcatgcggcgggctcttcggatttcgaaggcaggcaccaccagcgcggtgcctccccactggttgctctgatccagcatttcccgcaggcctctccacagcccctcgctgggcaccatgtccacatcgatcaccagggcatagttggccccctcacgagccagattcctcagcaggttattggggtaggagacattggtgcccagcgcataattaatcccgggctgggccaccctggctagcttgtcaaagacctcctggcaggaccgcagcagggcaaactcccccggctcccgggggtcgggcacggctgcctcgtaacgcgaggggcacacgaggtgcatggcgaccctggcgcgcatgtcggggcagt

SEQ ID NO: 914379 - DNA, 4001 bp, Homo sapiens
gaagagtggagaccagcccctacccaccgaggccgcgcacagcacataactcatcgtgtcttcatttacacgcagatgtttccttataataacattttattgggaccgtaattggattatctcactgactcctgcatcctgctgccctgggcccctccttcaccacggatttcacacactagtttttctttccgggaaagacgagaattttgaactcaggtgacatgggctgaatgccacctccttctccaacccaggctgcaccaccccacctgcccaggtcctgccctgtggccaggggcccttccgtgccgtggcgggtggcggaaggctgtgcacccaaggtgaggcagctcccctgaacccctcagtctaaaccccttcctgcagctctgccgtagttacatcacagccacggccctcccccaagagcctgggcctggcccactttctttccccaacgccacctcccagctcctcctctgtgcagccgtgaggggctgagcctccaccctgcaccagcgctctcctcctccttccctccacccctgcccgcccgggtctaaggaacttctcggattggaagggagaggcagtgccgtgggacctcggggacaccaagagacaggccggtcctgagagaagaaagaaaatggctgagccccagcctccacaaaggcgactctgtgaatgtgcctgaccagatgaagggctagccaaacccagcgggccggggagagttggccacatgcgagggtagctgggttgcctctggcctgggttcggccccgcagggacccggcctgttccctagaatgacagccaggccccaccgggaagccccctccaccggcaggccgcggggctgctccacgggtcaggtcccacgcacttctggtcccagcaccaatggcctctccctgccccgtgggaatgcaggtcacagacgctccgcccgcccgagcccgagccggagcagcgcaaggcgctgtccagccctctgcaggtccccgcactctcccgcccccaccgcggagggagatcgggcctgcccggaggccccggtggccggcgcgcggaggtgggagtcccgccgggggcgcagctgctcgggcagcacgcctattagcgcggccgcggcagacggcagatgggcgcccgcgcggccccctcctcccgcggcacaatgggcccggtcgctggggcgcacaatgcggcccgggccgcgcacctgcagcggggcccgaggggcgccgtcccgtgcgcccctgtccgcctgcgcgccccgcgccgcgccgcgtgtccttgggccgcgcccggccgaccgcagccaagcggcctgcgggatccgcggcggaaccggggcgcacgagcggacgggggcgcacgggccgcccattgttcgcggccggggcccgggccgggcctgcggcttcgcggccggggcctccctcgggcgccccccacccagcgcgctgccagcgcggcctccccggccccggtccccgccccggccgcacgcacctgtctgccccttgcccagcgtcttctccagccggtagggcccaacatactgcgcgtgctgcgcgccgccgtccttccccgtcgatgtcatcgctctggggcccggcgccggccaggggcgcccgggcgcgcgggcagggaggggccgcccagcgtccgcccgcgtccgccgagtgccgtccgcgccgacccggccggggcgcccccgcgggccccgctgcttcgcgccgcccgcgtccgcccgcgccgccgccccccgcgtccactccgacgcggcagtccgaggcctggcccgcggcgacgcctccgcctcgtcgagaggacagggcgggcgggggcacctggcttccgccgccgccgccgccgccgccgccgaggcccgcgccccgcgccccgcgcccccagcgcacgcccgtcagcggccgcgcagccgagccgagccgagccgagccgagccgtgcagctgagccgaacagccgagcccagcagccgagccgagccgaacagagccgagacgagccgagccgcgcagctgagccgaacagccgagcccagcagccgagccgagccgaacagagccgagccgcgcagccgagccatgtagccaagccgaacagccgagccctgtagccaagccgaacagccgagccgaacagcggagtcgagcgcagctgaggggagccgagccgggccgcgcaacggagccgagtcgacacgagcctgtacgaacgcagcgggatgccgtggcggcggcaagcggtgcccgcgccggccaatcagcgcctccccaccccgccccgccgctacgagcgctcggggagactctagggggcgaggcgaggccagggcgaggccgggacctgggagcctccagcccgccggctgccacgtccggtcccaccaggcagcagagctcccgctgccgcccgacccgccattaaggcgcatcccgggacggagcaggcagtgggcccatggcgagggggtgcagatggctgccctggacgggggttttaccctgcagggcgtgaccccgggtgtcccaaagagtttcccgcccctcgagggggtgctgcacgcgcgggggatggggatgctgccctggaggggggcgagtgttgcatgcggggcgggagtgctgtactggggagaggtgctgtattcggggcaggggtgctgcacacatggggggtgctgcacgccagcgaggggcatgctgcgctggagggggcgggtgttgcatgcagggcgcggatgcggcacacgtggcgggggggctgcatgggagtctgtggggctactgcacgcgggcgttgtccaagcagagattgtgcacccccagggaggacgtggccctccgcctccgctcccgagggagaagcggcggttttcccagttatgccacagtgacctgcgcggcgcggagtcaaggaactcacctgggatccggccgcagcgccctggcgcctcccggcccttgctaccgacccctctttcaggttgagcagctgggcaggggttgccgggagcagcctttggaggtctaaacacaggcagccgaagaggcagccagacctggacggaccctctgtttctttgcagaaaaacactggtatttccttaagcccgtgctgcagaaggtggtgggaggggagaggtgagggagacccggaacgctgcagaagtgggggtcccagatcttgcccgtgtatggtctgcgggcaacgtttcccctgcgggctctgccacacactgctgctgaccgtggtccgctccccacgctggtaagcccgtatgagctcaggaaactgcggggtcttcccagtgcgccctcctgctctttgggctgtctgtatttccagctggggaggggagtgggccccaaagcacctgtccactctcggcctgcacccgcccgccctgcttcccttcaaatgctgtggactaagggtcctccctacccaattctggggcctctgagcatgagcaatcagggccccaccagtgggggcaggggaggggggctgagagcatgggacagaggcagagggcactcccctttcccccgctgctgctgctgtgagtggggacagcagacatttttagctgaatgtagactgggacctccagctggagaaactgtcaagcagtgaggtctggctggaggctgactgggagtggtctggtccaggtgccaacagaggccgagggtgtgcaggagaccaggagagggcgtcaggccacagccagagggcaggggcacttgacctgagatgccctctctctgctgccatggtcacctggcctcccaggctgcagcagagtcagacgcacctttgtgacatcctcagcagcattttgccctattgaccgtttgcatccggctactccagtggccaaaattcttgctttcttccttcccacctccttgccagcctgcatccctctcccaaccctcactgcagccctgaggcctt

SEQ ID NO: 914380 - DNA, 4001 bp, Homo sapiens
agagatcctggcttaggtctgagctggtgccatgagatggggagagacccaccccagtccctgcccagccccatcctccccaggaatgcgggttctgaacgcaggctcctaacatgggaagaaggaggccagggcctggggtgccgggggcagcgcctgcagtgagccccgcccatccacccctcaggcctacagcagtcagaaagggcgtgcacggtgggaggccatgggcggtcccgtcccatgcgagtgactgccactactgtgccctgggccagagacccgacgggcctgggacgcagggttgcctgggacgcggggttgctgtgtgcggccagggctagtgatccaacgggcctgggttgatctgtgcagccagggcaccgttgcccactcccagcaggcaggaggatcccctctgggctggggctgccttatctgaccccccagccactgtccctggctcagtaaaggttttcccacagacacctcagctctgctgggcccctcccaccactggacgccctccccgcaacccgaccctgtctcgcattttctgagggcgcctgctccctcggccccgcctaccaaacagctcagacttcacagaccagagaggacagagcagcacagctcagagttcaccaatcacaggacggggcagcacagctgagactccacccaccacaggacggggcggcgcagctgagactccacccaccgcaggacggggcagcgcagctcagactccacccaccgcaggacggggcggcgcagctgagactccacccaccgcaggacggggcggcgcagctgagactccacccaccgcaggacggggcggcgcagctgagactccacccaccgcaggacggggcggcgcagctgagactccacccaccgcaggacggggcggcgcagctgagactccacccaccgcaggacggggcggcgcagctcagactccacccaccgcaggacggggcggcgcagctgagactccacccaccgcaggacggggcggcgcagctgagactccacccaccgcaggacggggcggcgcagctgagactccacccaccgcaggacggggcggcgcagctgagactccacccaccgcaggacggggcggcgcagctgagactccacccaccgcaggacggggcggcgcagctgagactccacccaccgcaggactgctgttaaggctggtgaccaaggccacgttccccacaggatggggcagcacagggggcagagctctttttgggagggcaagatgagggcccggatgccaggccgggccagtgggcaggagcctctccacataggggcaggcgcctctccacataggggcaggcagcgccagcgtaggaacccgcacagctggccctcccagcaggtgcagcccaccagtgctggcgaggtcccccgtccctgccgtgggggctgcatccctcacacatgaacacactcctccctcgaggggccctggccagccagggagcgtggcacgcacctgctgggctgggctgcaggcagagccaggtctggccttgaggaaggtggaggtgcggctggagcagctgtgggccgggagtgtggccagctggcactctgtgatgtgcggcccctcccctgcccaccgctgggccagacctgggctctcttggggagcagagggaggaaggacagatgcagggccggcggggacgtgcccatcggctggggtggccctcagggctcatggggtgaggctggtgccctaccaggctccctccccaaactagggccagatggggcagaactgtgccccctgctccggccccagcttcaggaccccacccgggcaggccatggcggggcactggctgctttcctgctgatctggcccaggagcaaggctgtgaggaaggaagctcagagcacgtccagaacccgctctcccctcagcaaggctggctcagtgaccaggaaggaggaactagccagcctgagactggagcccccaccctaggcccctgaggatccccagctggtctccaaacctgggctgcctcctccaaagcccgccccctcctccttcctgccaaatctccatctgttgccatggtgatgggagcagaaaaggcagacgcacggctgttctctccgcccctgctcctgcccccctcagcggggccctgggctggagcccccaccccagccagcaagggccctggcctctgagactggggaacacccaccttctgcacaaaagggccgtcgaaggccctcctaccaagtggctgctgaagctcctcctcaggccacagtggtctcggtggtgccctgctgtgcctgccgggtggcgggggggccacctgtggccttctcaaccagaaggggtgtcccccagcccctgagaatggaggaccagcctcccccatggtcccaccctaggcaggcgggggctcctgagggtgggcgtcaggcagtgctgactcagggccacaggtgtgcctgggtgggtgaccagccctcaaagacacagtgtgagccctgcactcggagcccccgagtccactcccggggaccagagagcctgacgacatcaaaagcggcgtctcgtgctcagcagtgaggcctttgaagcaccgaagtctgcgggcccagcacccatcgcacacagcagcatgactacgctgggtgctttcacggcgcccccaaacacggactctgcaactgtcaccgctctgcgaggccgacgtcacaaacccccccaaacacggactctgcgaccgtcaccgctctgcgaggccgacgtcacaaacccccccaaacacggactctgcaactgtcaccgctctgcgaggccgacgtcacaaacccccccaaacacggactctgcaactgtcaccgctctgcgaggccgacgtcacaaacccccccaaacacggactctgtgtccgtcaccactctgcgaggccgacgtcacaaacccccccaaacacgaactcgtcacaaaccccccaaaacacagactctgcgaccgtcaccgctctgcgaggccgacgtcacaaacccccccaaacacagactcgtcacaaaccccccaaaacacagactctgcgaccgtcaccgctctgcgaggccgacgtcacaaacccccccaaacacggactcgtcacaaaccccccaaaacacagactctgcgaccgtcaccgctctgcgaggccgacgtcccaaacccccccaaacacggactctgtgtccgtcaccgctctgcgaggccgacgccatgagcgccccacctgcacgcagggctcttccctctgcttttggagccgctggtgcgctcagaaaacctgtgtctccggcaggctccccatctcggtggttcctgaagctctgtggaggcacgactgacacgtgacagccagcacgcatttaaagcacacgcgtgtgaaaccatgacctgagggccatcatacctgacacccccaaagcgtccttgtgcccttcatacaccccccacccacctcagcagtggctctgtctctggacggcgccttctctacaacacccataaacagaaccacaccgcacagacaccaacttccgcggacgccacacagcctccaaggagacacagaagtgactcaaagcccccggcacaccctgagcaggggagccccggtgaactgggggaaaaggcccttctcacggaaggtgctctgaccagttcgttacaaaaccaccaacactccaactgttttaaatgagccaaggacaggtaaatcgctaaggaaacacagatgactaacacctgtgcgaaggagctccactcccacggcccaagcagcacgactgagcacagggagaagaggcgggcacgggagcatgaggatgccagctgccccgtctgcagccccagcctctccctgactcccccagctccaggctgcaaggggtgaaggggatggctggggcggggcagagaaacagagagggaaatgcag

SEQ ID NO: 914381 - DNA, 4001 bp, Homo sapiens
gactccacccaccgcaggacggggcagcgcagctcagactccacccaccgcaggacggggcggcgcagctgagactccacccaccgcaggacggggcggcgcagctgagactccacccaccgcaggacggggcggcgcagctgagactccacccaccgcaggacggggcggcgcagctgagactccacccaccgcaggacggggcggcgcagctgagactccacccaccgcaggacggggcggcgcagctcagactccacccaccgcaggacggggcggcgcagctgagactccacccaccgcaggacggggcggcgcagctgagactccacccaccgcaggacggggcggcgcagctgagactccacccaccgcaggacggggcggcgcagctgagactccacccaccgcaggacggggcggcgcagctgagactccacccaccgcaggacggggcggcgcagctgagactccacccaccgcaggactgctgttaaggctggtgaccaaggccacgttccccacaggatggggcagcacagggggcagagctctttttgggagggcaagatgagggcccggatgccaggccgggccagtgggcaggagcctctccacataggggcaggcgcctctccacataggggcaggcagcgccagcgtaggaacccgcacagctggccctcccagcaggtgcagcccaccagtgctggcgaggtcccccgtccctgccgtgggggctgcatccctcacacatgaacacactcctccctcgaggggccctggccagccagggagcgtggcacgcacctgctgggctgggctgcaggcagagccaggtctggccttgaggaaggtggaggtgcggctggagcagctgtgggccgggagtgtggccagctggcactctgtgatgtgcggcccctcccctgcccaccgctgggccagacctgggctctcttggggagcagagggaggaaggacagatgcagggccggcggggacgtgcccatcggctggggtggccctcagggctcatggggtgaggctggtgccctaccaggctccctccccaaactagggccagatggggcagaactgtgccccctgctccggccccagcttcaggaccccacccgggcaggccatggcggggcactggctgctttcctgctgatctggcccaggagcaaggctgtgaggaaggaagctcagagcacgtccagaacccgctctcccctcagcaaggctggctcagtgaccaggaaggaggaactagccagcctgagactggagcccccaccctaggcccctgaggatccccagctggtctccaaacctgggctgcctcctccaaagcccgccccctcctccttcctgccaaatctccatctgttgccatggtgatgggagcagaaaaggcagacgcacggctgttctctccgcccctgctcctgcccccctcagcggggccctgggctggagcccccaccccagccagcaagggccctggcctctgagactggggaacacccaccttctgcacaaaagggccgtcgaaggccctcctaccaagtggctgctgaagctcctcctcaggccacagtggtctcggtggtgccctgctgtgcctgccgggtggcgggggggccacctgtggccttctcaaccagaaggggtgtcccccagcccctgagaatggaggaccagcctcccccatggtcccaccctaggcaggcgggggctcctgagggtgggcgtcaggcagtgctgactcagggccacaggtgtgcctgggtgggtgaccagccctcaaagacacagtgtgagccctgcactcggagcccccgagtccactcccggggaccagagagcctgacgacatcaaaagcggcgtctcgtgctcagcagtgaggcctttgaagcaccgaagtctgcgggcccagcacccatcgcacacagcagcatgactacgctgggtgctttcacggcgcccccaaacacggactctgcaactgtcaccgctctgcgaggccgacgtcacaaacccccccaaacacggactctgcgaccgtcaccgctctgcgaggccgacgtcacaaacccccccaaacacggactctgcaactgtcaccgctctgcgaggccgacgtcacaaacccccccaaacacggactctgcaactgtcaccgctctgcgaggccgacgtcacaaacccccccaaacacggactctgtgtccgtcaccactctgcgaggccgacgtcacaaacccccccaaacacgaactcgtcacaaaccccccaaaacacagactctgcgaccgtcaccgctctgcgaggccgacgtcacaaacccccccaaacacagactcgtcacaaaccccccaaaacacagactctgcgaccgtcaccgctctgcgaggccgacgtcacaaacccccccaaacacggactcgtcacaaaccccccaaaacacagactctgcgaccgtcaccgctctgcgaggccgacgtcccaaacccccccaaacacggactctgtgtccgtcaccgctctgcgaggccgacgccatgagcgccccacctgcacgcagggctcttccctctgcttttggagccgctggtgcgctcagaaaacctgtgtctccggcaggctccccatctcggtggttcctgaagctctgtggaggcacgactgacacgtgacagccagcacgcatttaaagcacacgcgtgtgaaaccatgacctgagggccatcatacctgacacccccaaagcgtccttgtgcccttcatacaccccccacccacctcagcagtggctctgtctctggacggcgccttctctacaacacccataaacagaaccacaccgcacagacaccaacttccgcggacgccacacagcctccaaggagacacagaagtgactcaaagcccccggcacaccctgagcaggggagccccggtgaactgggggaaaaggcccttctcacggaaggtgctctgaccagttcgttacaaaaccaccaacactccaactgttttaaatgagccaaggacaggtaaatcgctaaggaaacacagatgactaacacctgtgcgaaggagctccactcccacggcccaagcagcacgactgagcacagggagaagaggcgggcacgggagcatgaggatgccagctgccccgtctgcagccccagcctctccctgactcccccagctccaggctgcaaggggtgaaggggatggctggggcggggcagagaaacagagagggaaatgcaggccctgaggaaagccaggcccatgcctccagggtcagacggcacacacagatgtgtgtacacacacccttacacaggcacacacatacacacacatccctgtacaggcagacacacatacatccctgcataggcagacacatatgcacacccctgcacagacatacacacacacacacacacacctgcacaggcaaacacctgtatacagatacatacacacacacacccttgcacaggcagacacacataaacctccataaggcagacatacacacccctgtacaggcagatatgcacacacaccccagcacagccacacacacacacacacacacaccagcacaggcaaacacacacccttgcacagccaaacacacacacacacccctgcacaggcagacgtgcacacacatacccctgcacaggcagatgtgcacacacacacaccccacctgactcactctcagatctagtaaggaccagcggggagggttccgacgtgaaccctgacctgtgccatcaggttgagggtctgcgatgaattccgcctgtcaggatggcagccacaggggtgtccttgagggtccaggccctggacctgacaaggagtggccatagcactcaggtgtctcctgggaagatggggggacgtggcacaggctttgacctcaggatacccccagcctggtggccgctgtgtgaagacc

SEQ ID NO: 914382 - DNA, 4001 bp, Homo sapiens
gatagcaggatagcaaagtcattgtttcatatatatggcctttctccaaatgattgtgccactctgccaattaccccttccctttcctccactgtgttccctcccgcccagtgctaaatctcctcagtggaattccttctccagtcatttgatgctgggacaaaccaccttgattctcattcacagctatataacaaagaataagcaccttacgattcttagaaagagctttacacacacggtgatactgaatccacactgctaggcagctgcacggagagaatgtgcgacttgcctaaggtcgcacggcctgactcgaaaccagtagccttagagtagccacaattgcttcccgagtttctcctctccgcctcgagcagagctcgctcaccgacacggctacaccccacgcccggcggagcgccctgcagccaaccgccgcttcccgccagtcccctccagctcgggggtgggcaaagcgcccggagcccctacctaatcgtgcaaccatggaaaccagcccgccggctgccacagggctgccgactcaccagcctcgcgcgctgccagggcaaccgtgagacgggacttccggctcccggggaagtcccgcccctctccgccggccgcttttgtagccgtgggaggcggggcttcagcccagggcggggtccagcacggcggggcggggcgggacggggcggagccttcccgagctgcgaggtcgctgtctccttgcgctcgccactggctctctctgcggcaggtttccctccggttaccgtgaccaaaggggaaagacgcctgcctccctgcaggccccaagatgtgccccaggggatgcgctgactgcagcctccgctcggctctcccttgagactgcaatcacagccctccgtgcacaccttcaccacaggccatttcacccgcgaagcggccgagtgaggcggtcatccagctggcgctgatttttatcgcccacagctcctaggacctgtaggcatctaaggcgggggcattcgcctagagcatgttgcagtttgcggcaacctgggcctcttgcgttgttgcgcaggcagattagtgccctgttcccagcgtggtagcattgtggacctcctctgaccctaactggatacactctccctcagagtccccacagcacattatctagactagcttttggcagtcttctattttgtagacgtctaatcaccccagataaagtccttcagaggcaaggccagtgttgtgtacatctttgcacactgctgcgggcgtgggaagtaatctattcaaaatgaatgaaattcttaaaaccaatccatccccccgcccccttcacgccagcccacctatttccagtatatttctgctgactgtccccacaagggcccctacctcctctttgtccggtcctttgatctggtctccgcacacctctttttccccagcttcctccttttggtctaccttttctgtagacatcttcctgacgagcctctgttgactctggatcttccactgagtcacttgtggctaaaacgtgaagtggcgatccagacgctgatacctgtggcgcatcacattttcctggatatggaaaatggagggtccctgggagagaaacgaagattcaggtgctaagtgctgtgtcagagtagagggaggaaaggaggaggggggcgactgcccagctgatgtcagattttcaaatgagcagggtcccccgcagccagtacagactccactgcaggggccgtcataggcccagaccacgccatttgagagggggagtcggccttggcctcagctctgttggggaggtctctagcccagagtcaggatgcctgcaatgggggaggggcaggcagtgaactagcgacagtgggggtgtgcgcagggatgcaggcagctaggctcccccactggccaggcagttggtatgctccaggatctgagcagctccttctagcatccttcatccttcaggtaccagccatccagacagtgcttgagctgcagaaactgagaccagacctctggcctggccctccccaggggcctcctttcgtatagtcactgcttctgcatcagatactttcagctgcaactccctactgggtggggcacccatttcaggcagaaggttttggtaccctccactgaccctacacccagggctgctactgccgcttgtggcttcaggtaagtaatggcctgtttttctcctgttggggctcactggagcagacaggggtgatgtgccctcctcatcagggttggttgaggtcttcagagctgggaacacacatggtttgaagggctgaaaagccttaaatcatttgtgtaaggtttaatgatctgtggcccaggccatgagggagtttggggagcacctcatcccaccctatttttttccatgaggaatacagggatgagacagtccactggaggaggaggaggaggataggaggggaacaaaatattggggtatgaccacagccttgtaaaggttggtgtggagtgagcatggaggggggcctccagctgagactgtgctctgagaggtccctcttttttccaggatgaaaggtgagaccccggtgaacagcactatgagtattgggcaagcacgcaagatggtggaacagcttaagattgaagccagcttgtgtcggataaaggtaggtgggaccctggctggctcccattagttggccaggctgtgctgtgctgcaggttcccaaagctcaagataagagatgcgttctttccttcactccctgaggtcaggggaggagtctggggctctgtagagagagctgtccccaggcctctgggggggatgagggagaagacaagtcgtaaggagccctggagatggcaaaagagaacccatttggggagggaggctgcagtccccttcagaggtcctggctaacaatacccttcctggctgtgtcccaggtgtccaaggcagcagcagacctgatgacttactgtgatgcccacgcctgtgaggatcccctcatcacccctgtgcccacttcggagaaccccttccgggagaagaagttcttctgtgctctcctctgagctcccctgtcccttctcacaactcctcccttttccctctcctgggcccttccttaggtcagtaattgttgtgagccccttaggctccttgcatcccatccctaacccttgcctgaccatgtgaggttatctgaagcacaaggcccaccctcacctatctgtcgaccccatttcctaccacctttgtggccgaccccaagcaccccagagatatgaggcaccctttgctccacccacagcagggccccgtcagactctgccagcgcgtcctgcccgcttccctcggtgacctgctcagacaatggagagggatgggccaggttcttgctctcagtctcacctggagctactgggagggtaaagccatttgaagaataaagtcatccagagcctcaggacagctcctgtgttagaattcttggggggagaggatcatcaagcaatagatctgccatacccagggaaaagggccaatcaatgcaggctagacatcgtcaaggatcggagatcagaggggtcgggggatggcgggcgcgagagagcgtccacagtgtaagaattaagtacaaaagacgctcaagaggctgcgaagagcaaacacacacacacaaacgtgcaacgaagccaagttaaaaggtaaacaggccgaagaggggggatttaggggagggtgcgggagtgcagtcgtacagcagaggaactcttaggagggtaggggcggagcttggcttcagttaccgcgactggagccgattttatacctaagatggctgcgcccacagccactcccattccaagatggccgtaccaacatggcagcccccacgtcacggagtttaccgtacagggcttctcttaaaatggcggcccccaggcaaccggcgttctcaatatggtccctt

SEQ ID NO: 914383 - DNA, 4001 bp, Homo sapiens
aaggtcaggagattgagaccatcctggctaacaaggtgaaaccccatctctactaaaaaaaaaaaaaaaaaaaaaaaaaaattagctgggtatggtggcaggtgcctgtagtaccagctactcaggaggctgaggcaggagaatggcgtgagcccaggaggcggagcttgcagtgagccgacatggcaccactgcactccagcctgggcgacagagcaagactccatctcaaaaacaaaaacaataacaaaacaaaaaaaaacccatctctactaaaaatacaaaaattagccagatgtggtggcacacacctgtaatcccagctacttgggaggctgaggcacgagaattgcttgaacctgggaggttgcagtgagcagacactgcaccactgcactccagcctgggcaacagagagagactccacctcaaaaaagagagaatttggcacttggcagggtttgtaaaatgagaaggaacctaaggggccagtcaagacgcaagactctctgggaagcaagtttatgcgcctactcatcttatgtttccataatctctattgtgtagccgactttcagggactgagaggcagtaatgtaaaaagcaaactgctgctttcctaatagctcctctactgaaagccaggttggttctgcactaaagggttgagttggctcaaaattctacattggccctgagagaggggtgatccaaccaaaatagaattgatcctcataatgatagaagtggatatttttcctttttttttttttttttttaaccagaattcagtaatcagaggtagaactagaaccctagccctggcaacccaaatctagccttgggctgtgaaagttgagaggccctggaagcacacctggctccagttttccttatctgtaaatgaggggattgaactgaatgaactccaagggccttacaattcccataggagtcctctattttgatagaaggcccctctcacctgtagtagaaatgcacagggctgaggtggctgactgtcggcatataggaatagtagaaggagccatagaggaagacagacacccagagcaaaaggaggatggtgcagaagagcaccccaaactgcagcagcagcctgcgggcacggcctgccaagacttggcccacctcctgggcccacagtaaggcaggtactggagggtcgttgaccatggccgggagagcagggtgtctggccccaggttcaggccttgcgttcctagctgctctgccacctggacgccacccctggccatgggatgcagcagctggtggttcctggaaagagagggtgagggaaaagagtgactcctttccccagggaggtggggacaaaacagcttactggactggctttgaggaacgagagatagcaggatagcaaagtcattgtttcatatatatggcctttctccaaatgattgtgccactctgccaattaccccttccctttcctccactgtgttccctcccgcccagtgctaaatctcctcagtggaattccttctccagtcatttgatgctgggacaaaccaccttgattctcattcacagctatataacaaagaataagcaccttacgattcttagaaagagctttacacacacggtgatactgaatccacactgctaggcagctgcacggagagaatgtgcgacttgcctaaggtcgcacggcctgactcgaaaccagtagccttagagtagccacaattgcttcccgagtttctcctctccgcctcgagcagagctcgctcaccgacacggctacaccccacgcccggcggagcgccctgcagccaaccgccgcttcccgccagtcccctccagctcgggggtgggcaaagcgcccggagcccctacctaatcgtgcaaccatggaaaccagcccgccggctgccacagggctgccgactcaccagcctcgcgcgctgccagggcaaccgtgagacgggacttccggctcccggggaagtcccgcccctctccgccggccgcttttgtagccgtgggaggcggggcttcagcccagggcggggtccagcacggcggggcggggcgggacggggcggagccttcccgagctgcgaggtcgctgtctccttgcgctcgccactggctctctctgcggcaggtttccctccggttaccgtgaccaaaggggaaagacgcctgcctccctgcaggccccaagatgtgccccaggggatgcgctgactgcagcctccgctcggctctcccttgagactgcaatcacagccctccgtgcacaccttcaccacaggccatttcacccgcgaagcggccgagtgaggcggtcatccagctggcgctgatttttatcgcccacagctcctaggacctgtaggcatctaaggcgggggcattcgcctagagcatgttgcagtttgcggcaacctgggcctcttgcgttgttgcgcaggcagattagtgccctgttcccagcgtggtagcattgtggacctcctctgaccctaactggatacactctccctcagagtccccacagcacattatctagactagcttttggcagtcttctattttgtagacgtctaatcaccccagataaagtccttcagaggcaaggccagtgttgtgtacatctttgcacactgctgcgggcgtgggaagtaatctattcaaaatgaatgaaattcttaaaaccaatccatccccccgcccccttcacgccagcccacctatttccagtatatttctgctgactgtccccacaagggcccctacctcctctttgtccggtcctttgatctggtctccgcacacctctttttccccagcttcctccttttggtctaccttttctgtagacatcttcctgacgagcctctgttgactctggatcttccactgagtcacttgtggctaaaacgtgaagtggcgatccagacgctgatacctgtggcgcatcacattttcctggatatggaaaatggagggtccctgggagagaaacgaagattcaggtgctaagtgctgtgtcagagtagagggaggaaaggaggaggggggcgactgcccagctgatgtcagattttcaaatgagcagggtcccccgcagccagtacagactccactgcaggggccgtcataggcccagaccacgccatttgagagggggagtcggccttggcctcagctctgttggggaggtctctagcccagagtcaggatgcctgcaatgggggaggggcaggcagtgaactagcgacagtgggggtgtgcgcagggatgcaggcagctaggctcccccactggccaggcagttggtatgctccaggatctgagcagctccttctagcatccttcatccttcaggtaccagccatccagacagtgcttgagctgcagaaactgagaccagacctctggcctggccctccccaggggcctcctttcgtatagtcactgcttctgcatcagatactttcagctgcaactccctactgggtggggcacccatttcaggcagaaggttttggtaccctccactgaccctacacccagggctgctactgccgcttgtggcttcaggtaagtaatggcctgtttttctcctgttggggctcactggagcagacaggggtgatgtgccctcctcatcagggttggttgaggtcttcagagctgggaacacacatggtttgaagggctgaaaagccttaaatcatttgtgtaaggtttaatgatctgtggcccaggccatgagggagtttggggagcacctcatcccaccctatttttttccatgaggaatacagggatgagacagtccactggaggaggaggaggaggataggaggggaacaaaatattggggtatgaccacagccttgtaaaggttggtgtggagtgagcatggaggggggcctccagctgagactgtgctctgagaggtccctcttttttccaggatgaaaggtgagaccccggtg

SEQ ID NO: 914384 - DNA, 4001 bp, Homo sapiens
tatctggaaagtcatctagaaatacaaacaacaaacagtaaataaaacagaaaagaaaatcggaaaatagatccggaggctgtttaaaaatgtcttcttggagagacttccgtagggtcggccagcgcggagtcttcagttgcgcctggccaagttttttgcaaacgtcaaatggcccaggagcagtcctgtccccagcccccacctatcctcctagacccctgatgacactcattgctgttctggggctggtagatgcatggatataatcttgcctccaaaccttactgaaaaatacctttctgtttcccaagccacccctatccccctgcagccaaagggagagcaaaactgccttatccggagaagccccggagccgaaacagaggagcatttctcgcctctcacgtctcctcgtccgtttcggggtcgcgctagggacccagctacctaatatagtcctcattctttttctcattctttccctctcactccaagcccagcgaagcagaagggtttgaggggtttttccatggccgggtccggggagacttgtctttcctgaccctcgcaggcttgactctgtctgagacgcaccaagcagagagaagctgccacaagcaacatcggccaatcccagagaaaataaacaaacataacaacaaccagtgcgggtacttagggctttggccactgctgtatgggaggaccaccggagcagctgagaatagattgtcaccggcgggtggtgaagccagtgcagagatgcggacctggatttacaaacacttttagctttgttctggattccagcgcgcacaaactgcctcctgtcttgcccccagcccctccaccgaccatggttgttgccgcctctgagctatgagtctggactcaacgaattattctattctggctagattgaaaacgccagagaaaaaaccatggatgtggcctttcagagggagacagaaaaaaatcggagtatttccccacatcctcctgtcccaaacagactttgctagcccttgctttttgtcagaccagagaaatcaaaatactttagcacccggctccagcaatgctggcagctggggcagaggagggtagcccagactaagattgtgagttaaatgttagatgttgaggatgcggagggttaaagagctgcatctccccctaccccccttttttctcaccctttctgtcttattcaggctagcccaaaccttcattcacttctatgcccccagcggtatctgcaaatgctcagtgcctggaaaaaagagatctggcctggacagagtgttttgagtttctgtgcagaaaaagttgtgtccatggggtgggatggtcaagggtctccctctgagtgggcagaggcggagaatcaggattgagagatggaccaaagtggccaggaagatcacgagcagggacactgagcactgcctaccaagagtatcgtcaaaccctatacgctgcctcttgaccaggcacctatcctccgctatgaagagtgcggaggaatcacgaattatccccgtgggttggcatgcctctagggagctctgcatggcctcagcaatatcctcagccttccactgtcacttagggaaagaggccaccaagccaggccgagccagtctggcctttccttgactccatcacaggcttagggtctgtgctagaagccctgctctctcactgcccataccttgaggttcctgttacttacccgaggtggtgaggaaataaggatgatggtggtctcccttatgcagagggtgatgggcgtgaggagccaagagggtgggtgtgggcatgagggggtagccatagtctagcagaggcacccgagaggccagagagctggcgaaatggtctggggccacctctctcagcggcttgggcttgtgcagcaggatgtcctcgatgaagaaggatgtgggcctctgagaagacgccgggtgtagaggagaggtgaagttgagattcatcttgagcggagcacctgccacaggacaagggccgggacgaagtggaggacgcaggcagagtctccaagcctgctcgaaagccggcaaccaccctccgaggctcgaatctccgctgctctctcccgggcctgggctaccccgggcgctggagaggcaagaagacaagctcctgggtaggttgggtctctgtgttggagaattggcagcttggagaggggggccgggagagccaatgacgaggctgccagaggcagaggggagggtgcgggaggctcggggcggggcggggagctgtccgcggtgctgaacaccaccggccgagcctgggaacaacagagcccgcagggttcttgttcctaccaggtttctcgacctcaatttctgccccgtcactgcaggggctgctttgttcccagtcgtttttaaaagaaagccaaaaggaaaaagtctctgttgtccggcaaactcctctttacagaggagaaggcactaaaagggccccaaagcaataatggataaagcacttattcaggcatttaggcctgggttttaagagtttccataattttggtggcaaaaaaagaagggaggaagtgaggagaaagggcatctgatacttcagattgctagattctacttaagtttatggctgagggaagactggattattaaggtaaagaaagaaaatgatgatggtcatcacaacagtctttacctcagttataggcagtgggcaggaggagggttatgtctacattagtcaagttatttggtctgtgtaaatatgtccagagtcacctcttagtgccatcctccatgtcgcctcaaatctttgctttctcctcatttcactcacgcggcttgctatttctgctgttactctttcaaccctagccccccgaattaattgtactaggtttttgtttcccactccttttcccagcctgtttcctttcatttccgtccctcccaatcttttgtttttttctgtttgtctttttctaatctgtcacatttatttccctggagtcaatttgctaaaattagggtgatcatctacaacacagcaggggtaatttcagctcacatctctgaaaattgctctaattattgatgttaaactcagggaaattagaagaagccacttctctcccatctccccatttttaagctctaatttgttgaaatctagtcgtcatcacaattccaatcactactgctaatagtaaaagtgttttaatagagactgagtcctcacaacccatgctattagataattagaggaggtgttagaaagccaagtgctaatcctggggcgcatgggtaggatttccatctgatctagcaggtagaacaaattaattaccagaatcaattaggccccaaactacagtgcaccaggaagtgggagcattctattccatgaggatgaactggtaaatggtaagtagatgaagagcttgagaggaaggaggaagggatgtgggggagactttaaaataagatcttggcaagtaggcatctaaatgaaatcagaatgctttgatctgaagtccaaaacgtgatttttaaaaaattctaatagtagtaagaactgaagaggcccagcgtggtggttcgcgtctgtaatcctagcactttgggaggccgaggcgggaggattgcttgagcccagaagttcaaaaccaccctgggcaatatagtgaggccccatctcagaaagaaagaaagaaaaagaaaaagaaagaaagaaaggagaagggaagggaagaaggaacgaagggagagagagaggaaggaaggaaggaaataaaatatgtgtataaaagaaaaagaaagaaaggaaagaaagaaagaaaagaaaagaaaagaaaagaaaagaaaagaaaagaaaagaagacctgaaagcaggtggccgtggagagcaagacaatagactttccaaaagtcctttcctagcgctaagccctggcccatcgtcctcagtcaccagacggagga

SEQ ID NO: 914385 - DNA, 4001 bp, Homo sapiens
gacactgaatgcaaaaatctagatttccgagttctcttgagaatgctgaagatggggtccatattcttatatagcactgattagggggacctgagacttggatgtctctctgataaggcatagtgcatttccctcattttcattatctaactagtacccgaaggcatgtgagtttgttgctcatgctatggctttgaaaggtgcacaatattttccatatcacttccatacttccctaagtcacctattataaaaagccaaaagcagaccacagtggtttgcaactccatagttaataatttaaaaaattcacatggcttagagggagtgagaaagaagaaaattcagactggtggaagggtaacataattacatagggttagaagtctatctgaaagcttttctgggagtgagaaaaaaggtgaacgaacacaaaaacattgttgaaacactaaaagctttcctgattgaacactgttactctctggtggttccttaccacattccatgcttcagaaacttccttcctactttgtatgtattaatataatagctgttaggtcatacacgctgagaaatattgggaaaatttataaaacacatttacatcatcagaaataattcttctcacactttttttttttttttttttaccagtcttggtccactttcaaatcccttcccaagtattttctactgctttccgctttatattcaaatgacaactgcagtcctgggtttcaggactgaacttcaatcctggacaggctctctaatacagaaactcttttggccgttatggctgcattctttattatatctcttattccgatttccacagtctctttcattgaaaatttatccctaaccccctctctaaaagattttgatcaaatttgtgtagttggggggttgggaggataggggcgggaaggaactcagttgtccaaatacaattaatatcctgtgctgtttcatttagattgctaatttaaataaaaagcatgaaaactctgcaagataataaatcttcgtaaaataatcttgtttactaagtgcacaaagccacaagcaagtgaagctctatctttcagcatgtctggactagtgacttttcatcatggactcagaatactgagaaaggagaagcaggaaatctgtgaggcccagggacagtcacactggcccacactaacaaattactaaccgatgtctcaccttcccccgccccattcccaaagataagggtgtcagggcacctgcatctgaagaagaaagacatcagaaccttttccgtgcaagttttaagaaaacaaagctttaccacacgtaaaatggttacaacataaaaccacgcagcacgttagtggggtctcactcctcttcacccagagggaggctgcccaccaccttatcccctattgtgatgcgccttcctcaggatgtcgctgcgttcgtctgagatgacaggaaaggggcggggcacggggttcctctgccctggaaagggatgagggtatcgccttcatccccggagaaaggcccccggactcccaacccaaaagcagcagccgcaaaactcaagtcttatcccggcctctcctaattgggtgctcgtggccggagcccaaaacgccacccacggtacccgagcagggtccggccgcccagaccaccgccgcagcagcctggctctcacgcccagattcgccctccgcccctttcctctttcgccccggccaagcccagcctcccgcgccgcccccgccgagttccccagctgagtccactcactctcgaacctgtagtcccccttcagtgcccacacaagattggggcaaaggccggggccagtgacacctccacttcctcctcagccagatccctccggaggtggctgtggaggaagccactgaggcggctgcgcgtagcggagccgccccggcaggttgcaggccggctcctcagcctcttaccgcgagagctcacaatgcgaagaggcgaggccagcagcgttctcgcgagaacggtgctctccgcccaggggtgggcggggcaccgaaggagaaggcagttgagggcgcggcggccacgggtgggatctcaggcgcgtggagaggaaggcgccgcgcgacctctcctcacagacatcagctcgggtcaaccgcgggcctcgagcccgagtggctgagggctgttaccttcaaacctttgaatcccacgttttccccttgacttcctgtcaccgttagagaaaagtggacagcgtctcggtcacagagttggagaaatagtgcagggactcttcagggagagcgttttcctcatcaaagcaaactgcaaaatcgcttctgccggcgtggacctgatgagagtcggtcgtcgtgagggacaccctctgttccctaacgtcccccgctgcttatttttaaacgctcggttggcgggaacccctgtgccagctgaaactccttcagtttggccgcctaggaaacaccgagagtcacctacatgggctggctgggcaataaaaacgggaaaaaatgtaaaagacacagtctccgccttcgaagcttacacccccggggcaagacctacaggaaaatagataatcccattattctctgataaaagccgagctgcttgccatgagctctgggagcagacggggaggccttgttgagaaagccttcacctgggagtgacaattgcgctgaatcttaagcataagtaagttctccagtttagggaagagagggaagggcattgcaaggagaggaagcaaagaggaagaggacctggtttgagtaattgggtatgaaaacagatattgcagcaagaactttgttgaaaaacctttaaccactgtttagttcggatgagaacattcccaggctcctacgtgtgatacgcaaagtattttccaaatcagtgtttatgctaagaagatgagcagttgagctggacaattataagataacttcatctttctcctgtaaggacacttaaatatcagaaacctaagagaaacgggttattgtcgtaattcactaagttattatagccaacattttgctaaattggaaattgccaataatttcaagttgtctacataagagcaatctaataggaattttgtgatacagtttctcagagaaactctgagaaaattctcaggcaaaaaacaaaaacgtcatcagtcctgatttattatcaaaattttctcctataagctctgctcagaagaagtcattctgtagtccaagttagggctaatgaggagccatactcttacatcaaaatagaagctgtccttttctaaagaaagactctggtattttgctgtagtttccactcaccttcctttggacacattattttcatattacatataaaaatatgtatactatatgaaaaatactatgtatactatagttttatttggcttaccatactctccctacgaataagcccaacacttaggaggaaaacaaaaaagttattctaaccctgctgatacggtttggatctatgtccccacctgacctctcatgtggaattgtaatccccagtgttggaggtcgttggatcatgggggcagatttccctgtttttgccattctggtgatagtgagttctggtgaaatctgttctttaaaagtgtgtggcgcccccccacccccgccccactcctcccaccatataagacgtgcctgctgtaccttggctttctgccatgattgtaagcttcctgaggcctccccagaagcccagcagaagccgtcggacttcctgtacagcctgcggagccgtgagccagttaaacctctttgttttatagcagtgcaagaatggactaatgcacctgccataggccaattgggtgttctgttaagcataatttcacatcaagttcttggaattttccaggaagcattagaagaatcatatgaatgaaagacttcaggcaaaatatggaaactttgttccatgctggaatc

SEQ ID NO: 914386 - DNA, 4001 bp, Homo sapiens
ctttaaaagtaatgtgtatgtctttaaagggttcactgtgtaatcacactgaagatctttctctgtcagaaaaataatcaatattacatttttacttaactccttaagacattctttctttttggagatatttatgctgtgaaatcatgctgatcttttctctgatcagttatcagaaaaatgcggattggtgaaataaattacaaaatatgtatgtacaaaacactatgtaatcctttaaaattatgcaatagaagatcacttcatgactaaaggatgttcataattaaatttcttttttttcaaggataggttacataacagcactacagtaatgcctttttaagtgcatatgtgttattttagatttttatatatacacagaaaaaacaggttatatgccaaaatatttatttttctttttataatagaaaaacttattttcattttcttctatatgtttttctgggcttaccaaatttacctaatgagtatgtaccattttcacaataagacagacattattatcttaaaagaatcagcacaacctggggaaagtatcctataaagtataagattaaaaggtctagcttgagattctgcttttataactctatttaataagctgacaaaaacatttctggaccctaaaccacaaaaaaagtcaatacaagataccacgaacagaactatataaataagtcatgacaaccataagatgaccattcaaacttttagaaattaaatgggggaaattaaaagaacttcctgacacttcaaggaaagaatgttataaaccatataaatacattaaaaacaaagtaaatgtaaaatgctgtatatcccaaatgtccaaaaaaattaaggatcagcaggataagggtaataaagagagaaggaaaaaaaccattagtcaaaatgttttaaattgttgtaaaatttcctaataaagtgagcaatatcacctgttaagatttaaaatctcacaggaaaaaccattatccttatttagaaattttgtctggttgaaaatttatactcactaatccaaaacctcagtggcagtagttagatcatctattcagtttctgggttctttgacttgaaagaaagtcactttaaccaattagagctttatcatttaagtacattcagttctgtaaagtactatatataaatggttcagttaatccttagttcattcaaatgtaaaaatatattcaattccttctttagaaaatttcaattatttcatttatcttgaattttattttcaaataaatcaaaaatattattgcaaaattactctctccttaaataaatttttaatgatattcataaaaaacagtaccaaacacaatgcattctcaagttacttgaaataaaacacaaagcatcaaacccacgaaaacaataaaaacatatttcatttattttaagtaacttgccattaaactgaaaatcagacatatgatctttatctttagtcatgtaaatgatcataatgaaacaaaggtcacacatatccctctcaatctttctttcaaattcatatatgtaaataattataacccagagatatcatgtaataaatgaatacacaccttcctttagtatatgccaaggtagacacacaaaaacaagaaaaaaattttgaaatcagagtataaagggactctgctctttcaaacaatgaagcactgaaagccaggtcagcatccttgggcattactaggaaactttagcacatctgatatttccatcatcttcaagattcctctgaacaatcagaaaattccccagtctccccctacctcacctgtccatagacttcctttagcttcctccctctactgtgtaataatgctgttgcaatatttaggctttaaatattcagagatacaaccccctctacatattaattcagtttattttctcacagacactgactcagccgtgggttgtgcagcactgacgtttctaacaaaacagcatcgtgtgagctgtgatcgtcccatttctccatctctgagcagtgattggatattgtaattgatagacaggcataacaaaacgcaggagttgagggcttagagatatgtagatatgttgccaaatgccatctgtaaagctaattctagctctgccagcttgccagggtttagaaaactgggatacagctaactttctttttcctttcaaaattttattgtgtatccattctgggcagtaaagctctttaaaatcaaagagaaaatattattgtacttaattaagaatccactcaagaactattctttaaagcaaccaaacttttgcatttctaaactgctgctagggctatgaagtgacttaaaagggaaactggaatgttcagactttatgcagtctcaggagaaacgagcatgcgtacttccatgtgggaatgaaaccttgcggcatagtctatactgaatgtatgatgcatttatctttagtaacctgagtggactgcagacctgagttttatatggtcatattccacccaattcaaatatttaagagcttttagtgtatcatctatctagacattttaaccttcttatacagaaaaagtgcttttctttttcttttttaaatagcaaaagctcctctaattcataatttaaaaagaagttgtcacaaattcaggccaaatacatttcaactgaaatgatctttaacatcttcagcaggctaccaaactgttctatatggatatcatacaagtatataactatgcaactctatatataactatacaactactcacccagaaacaagttgagcaacttataaacaaattcagtaatttttaaactaattttaaaccaattcagtaaattttaaacaaattcaatcatatagacctgctgagagatcataggcaccctaaaagtccatccatgttcagactagtttctttaactgtaaacaaatttttaaaagagatatacatctacattcaaaagaaagtttaaaaaagaaagcaccttttactgaatattcccaacacaaaaaaagataaatatttgagatgatggacatgctacttactctgatacgatcactatatgatacacatatcactaggtaccccataaatatacacaattatgtgccaatttttaaaattttttaatcttttgaaaaaagaaggaaaatgatcagaaataaaatataataattaaatgattttttaaagtacctaaagttgtttagatagaacagaaaccataaggcaatgctctcaaactctcaaaccttaatggtaaatacacattagatagtaactgttgctgttacttttataaatcaaataatttatttttatcctagccagcaaggaaaagtggggaaaaaaatcaaaagtacaagacgagaaaaagtcaggctattccaaaacataaatagaacaaaacaaaacacaaaatttcaacaagacaaaatttagattagctataaaaactaaacaataaagtatgcttatttccttacgtttatagatttaaatccccaactgttcaaggtgacaatgtgcccaatttaaaaaccatatttctcagtctccctgatccagagatggccatatgacatgattctagccaatgactggtttataagcagatatctgctggaaatttctgagaaatttaatttcctgatataaatgaagcccttttccattttttccttcttgtctagaaagtgaaaatgatatctggaactacaatatccaccttgtgataatgagaggaaagccaagaaaataagagatttctgaccctaacatccttaagccactaaacatgcacccgccattgcctatctctggatttcttatttaaaagaataataaacccctaacatcagccagtgtttagtcttgttttcttttactcaaacatacctaaataaaatacacaatattcaaaaaaggaatgagagtaggagaggcatgatgaaacaaaatcagccatgag

SEQ ID NO: 914387 - DNA, 4001 bp, Homo sapiens
gacactatactgtatgtaatccacaaactgtagagtggtatacaatattggttatcataattattttttataaatgaagacattgagccccagagagatgaagttacctgcccatttcttgggcctttatatatcaggatctacttagtaactctgactcctaatcttgggccttgtacattatatatcagggtctactttatgctgaattaacatttccagtgtgaagtgaaggggtggaaataacctatacatttttagttctagcaacaaacaacaaaagtcatcaatttgaagattaaataaattaagcaggccgggcaacgtggctcacgcctgtaatcccagcactttgggaggctgaggcaggtgaatcatgaggtcaggagttcgagaccagtctggccaacatagtgaaaccccatctctactaaaaatacaaaaaattttccgggtgtggtggcacgcacctgtagtcccagctactcgggaggctgaggcggcagaatcgcttgaacgcgggaggtggaggttgcagtgagctgagaccgtgccattgcactccagcctgggagacagagagagactctgtctcaaaaacaaaacaacaacaaaaaagaaaatgggaaaagggtcggacgtggtggctcacgcctataatcccagcactttggcaagcccaggcgggtggatcacttgaggccaggagtttgagaccagcctggccatcatggcaaaacctcatctctactaaaaatacaaaagttagctgggcgtagtggcgcatgcctgtaatctcagctacttgagaaagctaaggcatgagaatcacttgaacccaggaggtggaggttgcaggtagctgtgattgtgccaccacactcctgcctgggcaagagagtgagactctcaaaaagaaaacataatagtatcatctaacacatattgtggttagtatattaaaagcactattctaagtgcttacccacattaactcttaatcttcacaaccatcccattggaatattatccatgttatatagaatgtatctgcttataaaactttacaattagattcattatttaagagaaagaagcaaagtcacaatttcactcttgaaaacagtagtaattgtcctagaaacaaacagccctttaccaaatagtttacagtggtcataggcagtaatattttgctgattttgtcctttaccctctggctctgaactcattttatcttattctatggtgagttttcagttgaattccgaccactctcttaccttctgcctgcagaaggacatcacagaacacatcactctgctgctggtgatgaagctgcagaaaagctaacctgaggaaccgggggttcctgtataggattttgggactggcaggagagcacatgttggcaagagtcttaacaaaccttctaggttttcacagatcagactcctgtaggtgagataatacatttcagaggcatggttacatctaatttgttttttgtctttgaaatggcaggggaattttgaaagtgagagataatagtatgagttgaggaaacatcagcccagaaattgtgccaaggatatctcaagaaagaaaattatcatagtggttacatgtgggagctcagagataagcctaggtttgggtcttggctctatttattagcctggctgtataatctcacacaggtgacctaacttctctgagtctcactttcctatccatgaaatagaataatagtacttaccttgtagggttgttttaaagattaaatgagtcagtgaaggtaaagttgcttagcacagtgagtgcctggcacaaaataactaccaagccccaaatggtaactattattatccttcaaccttcctcatttccattaccactgagactcaactgctacaatgctgactacttatattcttcctgagcaccacatcccagctccacaggtataatcttcaagttaacacttttaaggaaacattactgggtataaaattatctctagtaagtcgtatgcgccttttctctgagctcactgtatcacactaaccagcagagggtgcacaataaagaagagaagcctctgactctgcgggaaggtctctcacagaaccaaggacgttgccacccttggctgggtgtacttgaccaaagcgagcctgactgaccctggtagtaggcaaagaatttggcctttacgtttgtatagttaattaccaggctaacaatgcagcaaggatagtaaagcattttacccctcccaaaacaaactgagtattctgacttcaggcttatgtccagctttttagctccgaaacccccccactcactgcacagctgtgttcctttcctggaatgcagttttctatcaggtagcactgagggtccgaacagttcacgtcaaaactatcaggaaagaagaatgaaaaggtaaattaagagaaggcgggcttggctgggcggggtggctcacgcctgtaatcccagcactttgggaggccgaggcgggtggatcacctgaggttaggagtttgagaccagcctggccaacatggtgactccccgtctctacaaaaatacgaaaattagccgggcatggtggcaggcgcctgtaatctcagctactcaggaggctgaggtgggagaatcgcttgaacctgggaggcagaggttgtagatagagccactgcactccagcctgggcgacagagcgagactccgtctcaaaaaaaaaaaaaaaattcccatcccagtgagagagatgtggatggaggatggcagctgttgcaagggccctggggaagcttctcaatccacgatcgcctggccttgcctccagacccaacttgaaatagcttttcggtagactttgctcctgttgccttctctgtgcttgtcctctgtccagcctgccttgcttcctctcaatgttcagcgttgagtcaggaggctgagcaaagatgcgcaggtgggccaacggctgagtgcttcacctccccatccagaagcaagggaatcggtgttggcggagaaagcagggcttcagggagagccctgcaaagcggggtggcccgcacgcttgggcgccctggcccaactcctttgaagaaagactcctaggcgcgagggtttctgggaatggaccgtggggatccgggaggcccaaagtcaggacttcccgtcacggccacctccgccagcatagactttgcaggcagcccctggcgcccttgtatccctgcgggcttcagcacccacatgcactgggtggtagtgatagcgagggttgtaaggccacgcggccagcgccacacacctcgtgccaccgtcctagcgcgctgcgcgtcgcagagccctacgcccctcctcctcccgagtcctcgggcctacgtcgtccggcatacgtcatccccattggccgaaggctcccgggagaaccaatcagaacaggaggagcgctttgggcgggaggctaagtctcgagggacttgagggctgagggaagatggctgggctgcaagaggcagggggatgggcccgtcagggaggaattcttgtgaaagccgtcgtctgcctcagcacttgatgaaaacacaccgaaaaagagggtagggatgctgtagtagagcaggcgccaaggcggttaagggtcatgtccgtcttccctttgaagaggcagtagatgcccttggctctgcctggagcgctccatgtttcgtgatggaagtctctggatggctctggtaacaccgggtcccccatatggctaatttagaaatctcctaagaccagagatgttatggaataaggtccttgggcagtttctgaattcagtttcttcactgattccactccaaccccaaatcttggagaactaatgacccaggggttttgcagaaaatccccccccccgcccccgcgaacggtctccattatcgttacagagatgattttttaaaaaaatgttaattaggcctggcgcg

SEQ ID NO: 914388 - DNA, 4001 bp, Homo sapiens
ttgtctctcctgatagctccttttccatctccctaatcaccaaaagcccagaaattaaaacagtaaacaattcccctgaaaggtgccttccttgtactgtctaaaacaaatgcaatcctctgtgtgggcatttaaaacaccacaagcattcttacttagattaaatcatgggtctccctggtctccaggcatgcctagacatgaaccataaagggaatgagatccttggagtttctctagtaactgcaggccaaatcaacagcaaccctaagaacaagcattcttttttttttttcaacagaactaggccacacatattttttgtcgttatttaaatttttagttgtactacatagaaaataaactcattttaaaaagttatttcagtaggcaatgcatcttcatgacttttacatatgagttttattttttattacttttgaagaaaagtctgtagaaacctacttttcaaggcatctgacccaaccattgccttggatggcagcaatccagctcaggtaagatatttaagatgcaactaataatcataaaacatcagttgggaagaagtgttcgatatagtattgggtaaaagtgactaacaatttggtagaagagaatcatttttataactatctcctaaccaagatttctctaagtctgcatattgttaatggaatgaagactattttgctcctagtttcatgtatgtatatttaggtgaatgtgagtcatttatgtaatgtgtgctaaaacaccgtgcccctcacaaagataagatgaatacaaaatacagttattgtagatggcttgtctttcacaatttaattctacgagttaatttttacaattaacattttctgtgctacatattttgtattttggtttctttcccttcactatggggtgtacagaacaaagtatgcatttggaaaaaaagtgctgtctttcatatgcaaagaaaatgctataacttattcaaacatccttgggcagttctttagttgttttaatagtgtgagtttgtagtttgtattgaatgatccagatgacctgcccctgttcatgttacttgtggcatctatgagaccatttgctggttttagggaatcaatctataggtgggaagttttcttttgcagaaactaatttagaactaagcctttggtgtcagcaatgggtgctctatactggatgcatgaagaccatatttctaggggaggctgcttccagctgaatttcacaaggtgaggataaagagaacattccttatcctctcctgattaattcattaaaggcaaaggaggggaaggaaagttattagcagagatctcccagaagtcctctgtaactgtcccttttgcccaactgtcacaagatactgtttttctggcatccacagccctaaccctgaatatccaaatgtactcgtgcatcaaggatctactcaagtctcacctcctctgggaaccttctttgacctattacagctctcattgaggacctcccttctatttctgatacaaatagtttctactattctaaatagtccctagtttagtaatttattatatatatactgtcttgaatggtatggccttgatctcaagaggaccacgatttgatgtaactaacaagctgcctggctcactatttgactagaaggcccaggcttcacatcactgcatggccctctaagagtataaggccaagtccccaacagagcacagaggtgcagatgagactctccaagccatcctcccatatgtcagaggctacccaagcccacctccatttggaaaattcaaacctataatttgaggtacctgggaagccgctttcccagggcggaatggtcacggaaactgggtaggctgggggccttcttggggaatgagggagtggaggagctctttgtccctcctgctagatcagaaagagaaacgtctcaagaatctgggcctccatcttctaggcgtctcccttggaggcccttcagggaccgcccacagcgctttctctcagcctcctccccccccccatcccctcccccacccgccccgtctcgcgcccgccccgcccctcggcccgcggggttccaaggacggttggtcgcccccgccacagtcactcggccgctcagagcggcggggcgcacggggtcgagagagccagctctagggtttggggctgggaactgaagcctggcgtgaaggaagtgggagcccgggccgaggaggcgaaggggaaaggaaaagcgaggggaacctgagcgggagggccctgagaggagcgggaggctgcgggaaggggaggcctggcactcctgggggtcatgggggtcggggcgcggctcccggcctgggagggcgcgggtcctccccggcagcgccgcccgctggcccagctacgcgtgttgtgcgctgcgaggccggcgggggtcccgctgggcccgggggtgtcctcgggggccgcttgcgcccagccatggtagggcgtcccccggtgaaatggggtccgaggcgggccccgaccccgcgtcggcgctgcggaccgtccgggagctgcagccgcgggtgcccggtgctcggtttgtaggcagtgtcattagctgattgtactgtggtggttacaatcactaactccactgccatcaaaacaaggcacagcatcaccgccgcccggccgggaagaagacgccggctcgggcagcccgcagccttcgagagaagatgcctgagaagcgcggcgtcggcgtgggtcctgcgcagcctgccccgcgagcgcccgctgcaagtgcgaggaaacccgcggtttctccagatacagttaaactgttagctctctctaggagtcacagaagatgaaacagtctcatgccaggaaagcaaaatccctggaggtgaagcccctccatccatgtaacggttaatactgtatgctgtgattcactgtgtctatttgccatcgtctagtagagtattcaccaagctagcaactcagttgagctccaactcaaccaatgaattgcctgcctgtcacaacgtgttggggtaccaacttgagactgcaattttttctatgagtctagttactaggcagtgtagttagctgattgctaatagtaccaatcactaaccacacggccaggtaaaaagatttgggaattcgtccaaatgagctgcctgtgcatcatcaatgtgcgtggggaagaggggtgttggaaaatgctgatttcatccattgcctattaattgctcagccaaaagaaaaaaatcaacatttcagctactaagtttacaatgtatgtaatgtgtatgtatgtggggttttgttttgtttttttttcaatattccttcaggctcttaaccaaaattttagatataagggggaatatgatttttttcttagctgactgatgtatgttattatatgaacatgtgattattaacttcttgagactatattgttagtaatattttgaaagtaatattgttagtaatatttcgaaagaataaagtgccataaagacataaattgtggttattgctatgtgtccatttcctttgctaaattgactttatgatgtccatctcagttcctgccacagtaatcttaacttttctatcaatgaagtggttaagttgttcctgccatgacaaaaatctcccgggaaagctactcatacacacagacttgttaatacttttataagaaatacattaacaaaatttttcatacttcttttttccatgaagagactctgttcactcattaagatgtatcccttcttttaagtaatcatttacaactgttggagtctatgcaacttttagtgggagtgattagtaaatgcacttacactttaaatccagcttgtttcctaagatttaaaggattcagaattttaaaatcacagaaactgtacacatgggcacgtatccgcccagttcaggcctctagctcccaagggctaggctttcaggcgtgaattctccag

SEQ ID NO: 914389 - DNA, 4001 bp, Homo sapiens
tgcccagactggtctcaaactcctagatgcaagcaatccacccgccttggcctcccaaagtgctaggaaactctttctcattccaggaaactcttcctcattcttcaggtcctaacacaaatttaacttcctttggcaaacttttcttgactgcttcacccaattccctcaccatcccacactcactcaagactaagaacccttgttaaaaactcttggaatactttcattgcatttatcataaagaaaatatatcgattagttgtgtaattagttgcttaaagcctgtattcccattaatctataagctccacaagaacagggactatgttttttttgttcacagaggcatcctcaacaccctacagtaactggaatacgaaatattcaataaatgtttgttacgtggataaactatatagctgagcccaaataataacaatgactgccatgatgtgaagttattcaaaaagccagggtcacttaatgcaatccctctaatcacaaccaccacttaataaaaccattattattattattctcattttaaagataaggaaactgcagctcagtgagatgaaacaccttgcccaagggtacacagcctataaagtggcacagctaggattcgaactctgaccagtgctgctccaacactcaagctactttcatcacatggcactgcctccaaaggatccacacaagtcagcgaggcagaaagacgaagacaataataaggcaagcaccaaaccagaaaagaacttggactagttctttagaacaatgtgacttcactgggtatctcagtgccttagggttactgtaacaaagtaccacaaattgcgtggcataaaacaacagaaactctctcgcagttctggaagctagcaatctgaaatccaggtgtctgcaaggccatcctccctggaaagtctctagcagagaatctttccttgcctctcccagcttctggtagccccaagcataccttggcttttggcaacataaatccaatccaatctcagccttcatctagacatggtcgtttttcctttgttgctgtgtctgtatccatacttccctctttttaaaaggcaaacagtcatcttggatttggcacccaccttaatcaagtatgacctcatcttaactgattacatctccaaagaccctatttctaaatgtcacattctgtggttctgggtggaaaacgatttggtagggcccactacactgggccacaaagttgtcccatatgaaaataatacccacttcatggtagtgtggtgaggcttaaataaacttatatatgtttaaatttcttataatggtgcctggcaagaaaagtataactatataaatgttagcttctcacgttaggactattactaagagtaacaggaggtgatcaaaggtctctgattcagaaccaagtccttgggatctgggaatccccacaggcaggtaccgggccctaaagatccaagcacagaggctttgaatccgctccattattctcgaggcacaatattcattctctatgggagaggacggaagtctaccaaggcgggaaaagagtaatcaaagttacaccccggctttaacgcactgacgctactgctcagaggctcgagatgtaagcggggcggcagaggcaaggcggggggcctcaagcgatgtgagtggggccctgagcatgagcaggggtcggcggagaagccgagagacccgccaagagggaaggaactgccgggcggccgagggcggagttgggaaggggtggctagacgtcgcaggccccgccccggccggtaccaactcaccccttgccgccggccccgccaggcttcggccgctttttgcgacgcttgcgaccggactcagatccccggtcgacgccggcatctgccccggacaagtaacgcttcagatactcggccttggaaagcggcggagctgccgccatggcagcggcgggggcagagagacgggtcggcgctggggacaaaatgcctcaacgcgtaacggacgccagccacccgacagggcggggccacggccggaagtggcggagagtgctaagaatcgcgcggctggcaggtgcggccaccgggacgcgctcgcaggctagccagggacgtgcgcaccttcggggcgctccacagccctgggacgacgccaccaggtttcttctcttcattcactcacccacccacccacccatccatccaaccgcagcaagcgctgttctatgaggccacaacctgacccaaaggaccccgcccccatcggccgcctaaactccagagcacgagcaagaaagtggagggccacgggctgcagcgtagccgagtttgaatactggttccatagctggctagctgtacgacctcgggcaagttatcacaaaacagggagaatcccggcacctaactcggaacggtcacaggctgagatgatattactgtgtgaagtgcgcagagcggtgttgggcacatggtcatcggaactatgttcgttatttttataagtatctttaagtggggggaatctgctccactaggcttccaggtacctaccgtccaagaaaggaagccaggaagtgcaaaccaacataattactatgaaaaacgtagtttctaagacctgtgtaactcttctagtgttctattacaagtagcccccagttatctcttgaaggaaactgtaaaacaatcttgccaatgagaaggacggacctggatcattttttagcatagtaaaagagagaaaccagagagaatgaattctaacactcaagttttggggggaaagaaaagactttattctttgcagggggtttagagctttacctgaattatctcatttaaccctcacaattctcaaatcgtttcattatcatattttacagataagaactgaagcgtggcaagattaaggaagttgctcaacttcacatagtcagaacatgactctagggagtagaggctagcgaagtggggtgcaagaggtcatccaaatttcttgaaataccagatctttttacctcatcatatatgttagattgtcagttttatcgttttcttcccagctttattatttgacaaaaaattatatatattcaaggtgtacaatgtgatgactggatataattatacattgtgtaatgattaccaaaatcaaattaagtaaaacatccttcactaatttatgtagtagttcggtgggggggcacttaagcaaatttgtcttagcaaacttcaagtaaacaatacagaattattagctatagtcaacatgttgtacattagattcccagaacttgtcttaaaactgaaaacttgtaccatttgagagagaagttttagtgttactgaaatcacagacttctgacagaatttgcaggatgctatacacaactacacaaaagtgcaaacaatagtttcttggaccaagagtcaaaaaggtcacttttttaatatattagtcaagcagacagggctatactttataaataaatacacattatctggggataagtgtttaaaaaattctttactcatataatacaaaacaggcttggggatcagtcttgaagcatgaatttttacccagtgggccatgttgagggggttgcagcacaggcccagaaaggaaagcaggctggggctctgagggcttgtgagacgaggacgctgggctgagaagatagggcttcactaggcggagggccccagggtaccccatacacaagcctgccttggcttctcgtccaatttggtgcatctcacactacacagccctgccccaccctggtgtcagcaggcattcagaaagcctcacacttctgctccagtgaacactgccaggatagccctctgaacttccacccacccatcttctgcccatttgttttctttgtcttcaattccactgctacccatcctaccccagtcccttagcctgacaaggcccaagtgtctccaccctgtgctgcaggg

SEQ ID NO: 914390 - DNA, 4001 bp, Homo sapiens
aactgtctctagggctggaatgacagacatcaccatccactcagttgtccaagccagaagcctggggcttatctttgactctgacttgtctttaattttcatccagtcactaagtcttgttgatttttgaatcagactgccaccctccattcccattgccaaatttcaattcaaatcactgtcagctttgtctccattattgcagttgcctcttgttttatcctgccatgccatcagccttgttcctctccaaacctttctccacaggaaaggagaatttttcaaagtgaaagtataattgtatcatcttcttatttaaaatctttcagtggctttccaccgttttcagagtaagattcagtctgttaaaatggcttacaacagaacagagaaccaaatacagcatgttcttgttaccggaaggggtcctgatccagaccccaagagacacaagaaataattcaaggtgagtctataaagcataaggaagtttattaagaaagtaaaggaataaagaatggctactccatatgcagagcaaccctgagggcagctggttgcccatttttatggttgttgattatatactaaacaaggggtggattaattcatacctccactttttagaccatatacggtaacttcctgactttgccatggcatttgtaaactgtcatggcgctggtgggagtgtagcaatgaggatgaccagagatcactctcatcaccatctcggttttggtggattttagctggcttctttactgcaacccgttttatcagcaaggtctttatgacctgtatcttgtgctgagctatctcatcctgtgactaagaatgccttaacttactgggaatgcagcccaggtcttagccttatttacctagcccctattcaagacggagttgctctggtataaatacctctgacattctcacttataagtgggagctaaacattgagcaaacatggacctaaacatggaaacaacacacactccaggctactaactagagtggggagggcgggtggtgtgggttgaaaaactattaggtgcaatatacccatgtagcaaacctgcaacctacctgggtgcaatatatccacgtaacaaacctgtacctgtacccccatttgtaaaataaaagttgattttttttaaaggcttacaacgctccctatgacctggcccctgcctaactcttcagtctcatctgttactctccctccaattgtgtttcagccaaactcaactattctgtttctccatcaagcttttgcatatattgttccttctgcctcttcacgcctcttgactcagttaagatgcacttttaccctgttagctttcaactcgggtttacttcatccaaggactctctgaccctcttcgcccccaaacttggtaacgttcttctgtgtgctcccagagcacacaccctgccatatcagagttgcctgttttgctctgtgcattccccaccagactgcaggctcattgaaatcataggccacattttgttcatccacatatcgtaaccaccctcacagtggcctggcacgcaatagacactcaatactctttcttgaacgaatagaagataggagatttaagcacctggaagagaaattttgagcagcagagacactgggaggcagccatttcagacgaggtgaaaaaaggttcaaaaccttctgcgtcaggagcatgcgagacacagtccaacctcttccttggcctcagccccgccccgtttctttcacccagaactcgcctcacccccctgcgctagtgactgcttgtgacctcatgcaggtgtgatgaagtcgctcaaggccatgcttgggctaaagacactttgatcttcccgagggggtgaaagggcgaggtgacaggaaagtgcgcgtcttgcttttgcactcatagttatcatccaccggggagtcggtacaccggctcgtctagacaaccaggcgccatgggtgcgtcatcaactagtgacgggagaagacggggcggagagagatccgtgaaggaagtgacgtaaaacgagcgccacagagaacgcgagccgggagtccgtggaggccatggcccctcggcgcctcctgttggttggggaggggaatttctccttcgccgccgctctgagcgaaaccctggatcagagcactcaacttaccgccacctgcctccagcgcccggccgagttggctcgggatccactggcctgggagaatctgcagtgcctgcgcgagcgaggtagcgagcccgcccctctgcgaaaccccgcccagcggccggcgcgtcccaaagtggaaagggtgggggcgtggggatgtaacccacgtggagattgttcttgatcgtcccacggatattcacataaagccggctttgtgcccagacttgggctggtctgcacggtttaagttaggaagagtttttctgttccatgtcttgaggcatcctcctgtctatattttgcgcccccaaactatctttgccaggtatcgatgtacgtttcggtgtggactgcacccagctggcagatgtctttgaactgcacgagagagaatttgatcaaatttatttcatcttcccgcattgtggacgcaaagctggcgtagctaagaacagggaactgcttgccaaatttttccaaaggtgaggaaaggagcgccctcacaaggaaaatgtttaagatgtccataacatagttactgtacccaaacataaggcacacgtgcaagctactatgatatgtttagaagagactataaagccccaaaggaaccccaagtttagttggaaagacagatatataaaccctaaatgctaaatgaaagtacaaataatgtactcttgggtgtgtaaaagaggatcatttatttttgacagtgcaaaataatgagagccatatagtctaatggctaagaacgtgcacttagaagccagactgcctggattcaaatcccagcccaccacttaacagttgttatttttttatttttatttatttttattttttgagacagagtctcgccctgtcgcccaggctggagtgcagtggtgtggtgcaatctcggctcactgcaagctccgcctactgggttcacgccattctcctgcctcagcctcccaagtagctgggagtacaggcgcccgccaccacgcccagctaattttttgtatttttagtagagatggggtttcaccgtgttagccaggatggtgtcgatctcctgaccttgtgatccgcctgccttggcctcctaaagtgctgggattacaggcatgagccaccacgcccggccaacagttgttattttaagcaagcttacttaatctttacatgcttccgtttcctcaactgtaaactagggatattaatagtaactaactgggccaggcgtggtggctcatgcctgtaatcccagcagtttgggaggccgaggtgagcagatcacctgaggtcaggagtttgagaccagcctggccaaagtggcaaaaccccgcctctactaaaaatataaaaattagctggccgtgctggcacgtgcctgtagtcccaggtacttgggaggctgaggcaggagaatcgcttgaacttgggaggtggaggttgcagtgagctgagatcgtgccactgcactccagcctgggcgacagagcaagactccatctcaaaaaaaaaaaaaaaaaaaaaagtaactaacagcctcataaaattattgtgaactgaaaacagtgctttacatgattataccacaagacatgatactattggaggtgtccgatggggcatagctgtcaataaagttttgacagaggtggtattttaaactagtatttgaatttcaggagggcagtgaaaagaactttctaaatgggaagaaacagcctaagcaatgaatcatatataggaactgtgcagatattgatctttctgtgacatatgcatgaatgacacaaatgcaaagcagaccctggtcagcc

SEQ ID NO: 914391 - DNA, 4001 bp, Homo sapiens
aatgcgagtccctggagatgacacgctccacatgtgtatatagggctgtggtgcctttggcctcttgtatccacgctttagaaagcagactgaggatcctattcaggaaaatcctggacaaaggaggggtaccgagggaacctgaagagggacctggagaccccacattagctgatttctcatatggtggctgagcaagtctctttttttttttttttggttttgttttgtttttgagacagagtctcactctgttccctaggctcgagcgcagtggcgctgtctcggctcactgcaacctctgcctcccgagttcaagcaattttcctgcctcagcctcctgagtagctgggaatacaggcatgtgccaccacgcccagctaattattgttttttctttgagacagagtctcactctgtcacccaggctggagtgcaatggtgcgatctcggctcactgcaacctttccaccttccgagttcaagcaattctctgcctcatcctcctgagtagctgggattacagtcacccgccaccatgcctggctaatttttatatttttagtagagacggggtttcaccatcttggccacgctggtctcgaactcctgaccttgggtgaaccacctgccttggcctcccaaagtgctgggattacaggcatgagccaccatgcccagccaattttttgtgtgtttttagtagatggggttttgccatgttggtcagactggactcgaactcctgacctcaagtgatctgcttgcctcggccttccaaagtgctgggattgtatacaggtgtgagccactgcgcccagccaagtctcagcattgatggtaaaatgagctataaacttggtaactggctatccctaactgccttctcttactcatgccaactgcagcatctgcaactctgctaaagccagatcaaccctggagggctctgggagcacaatgtaggctggagtgacagaccccacacagatatgccaatcataggccaaacaatgacgacccctttccaccttctcaggaagcaagtctgtccaccaaggtctaccaccaacagccaagaacaaaggaaaaagaaaagggcatccacttcccccagaggggcagagacaggtaccttgcaaggggcttgtgcccggtgagccagggtgcttggagggcaaaggggtaggtgaaggagaggtcccaaggtggagcagcaccgtcccagccaggggccttcaggcttgtggccacgctgcagtatttgagcaaaggcatcctgggccccgtggaggattccatggccttcagaggatccacctgagaataggcaccaccattacctgagctgcagcttgaagcaagcagtggccaccggggcgaggcagggctcagctctgcagttagctgcctctggggacagttgagtccatgcacggccctacctgctcccacaaactctcacagtttcctctttgagtcacctgccttgggaacctccactcaggaaacagggaagggattggaagagcaagtgctgtgagtttagagcagcccagctttaaatcctcccctacagcctgctggctgtgtgctcacttaacctctgctctccagttacactcaggatagaatacatggaaagcacctggcgtattcagcagctcaacttatgttagtatttttcctccttcctcctccccggccacctacaaggctagttctggcctcaggcaagctgagatctcagggccgtccatcccctttccagccctgttcagaggagacagctgccaccagggcccaagatcaagccgcactgctgcagcccaccagagccccgtgagggtctgcccctgcccaagtccacaggtctgaccccacaaggacttacccacagccccaaactcccagcctccacctcagcctcaggctccttctgacagttggggctcagggtctcagcccaaccgactcctggttgccacgccggttaccatgggtgcagcctggggacgctgtcgtctgtggccagtgagtgcaccgagcatgcggagagggggacaggaggccttgggaggtaggggtggggcaggaagtgatgggggagggggtgttctccaggtttccctttggagagaagaggaggaggaagaagggaaaaaggccagtgtagcctcagttctccaaagctcaggctgctccactgctggaagagtcagtggtggtgggaagccctcacggatcccaggagactcctgtgagggaggagccacctccgcagaaactgagggcgtcctccctgtacacactagaggcaggaatgggggagccactggcggcctggggactctaggatagaatttgtccctagtctaaaccaaaataaccaaaggtgtgggcctgtttgtctataacaggcaggactctgttgaggagcagaggtgttgtgaccatttggagtgagaggtgtggacactggcaacaaaggaacagaagtccagattctgcttgtgggaggggctcgtatttggaggcctctgccagtcactgtgcactggttatatgcctggtatgcaggcacgtttggatgtgtctcccccacattcataccccgcttctaccaggtcctgtttcagttggcagatccatgtggatagggaggccaaagtacccacctccaggggtagagtgggtgtcagtcaccccttccatccccgtctggccccaggggttggtcaggcagtggcgtgttcctgaacctctccaatcagcaggaatctggagactttggttgggaatcctgggatataggctttctctttcttcctatgcctgaataagaaagctgatagttctgagagcctctgacagccttttgggaacactgaagctattcccagagaaagagaggatagacctcaggaaatagagggttggttggtttgtttgttttgagacagggttgcccaggctggcctcaaactcctgggctcaagggatgcttttgcctcagtcttccaaggagctcggactacagccatgcaccccaacgcccagctgaaaataggttctcggtgacagtactgagtcctgcctgcaggcagtgctgctactctaggcctcagctctgtgagccaataattccccttattgattatgccactctggattgggctgtttcttacttgcaaccaaaagcctcttaactgatgactgccctcccgaagcatcacttcatagtcaggagaatgactgctgcccaggaccgtataccaaggcggagttatttggcacacagagagtctaagaaagacccatggccgggcgcggtggctcatgcctgtaatcccagcacttgggaggccaaggcaggtggatcacgaggtcaggagatcgagaccatcctggctaacacagtgaaaccccgtctctactaaaaatacaaaaaattagctgggcatggtggcacacgcctgtaatcccagctactcgggaggctgaggcaggagaatcgcttgaaccagggagtcagaggttgcagtgagccgaggtcgcgccactgcactccagcctgggtgacaaagaaagactctgtctcaaaaaataaaaaataaattaaaaaatacccgtgaagtctctggcagtgaaagaatgattcttgaatgagacagtgggatttcagtggaggaggggaaaaggagaatattctagtttaggtaggaagtaagagagaagagagaaggatacatttgcgagactgtgattttctgtttgggggaaatgggttcagcacatgcaaaatcacattgaacttgcttaggagtcacattaaagcagactcacatcagagtgtgggtgtgagagtaatcctgcttatagattacagaggcatcatcgctaatcccatcagatgttatcttacatataggaaaaggccaaaactcgggtcatttatcttttaaggaatgtagtgactcaggcaggagatgacggggtgg

SEQ ID NO: 914392 - DNA, 4001 bp, Homo sapiens
gcccttaggccagcttgcagtggggcccagcccttaggacaggctccttggtggggtaggggtgggggcagctgtcctcctgggccagctccttggggctgaacccgctgctcgaggggtcttccaggctcccagcggccggcaccacctctagagcaggtgggcaggggtgtgtggggtgggcaggggtttgtgagggtgggcaggggtgtgtggggtgggcaggggtgtgtggggtgggcaggggcatgtggggtgggcaggggtgtgtgaggttgggcaggggcgtgtggggtgggcaggggtgtgtgagggtgggcaggggtgtgtggggtgggcaggggtgtgtaaggttgggtaggggtgtgtggggtgggcagggatgtgtggggtgggcagcggtgtgcggggtgggcaggggtgtgcggggtgggcaggagggtgtggggtgggcagcagcctgcacagtggcttcccctcaacaagccacttcctcttgcagagggaatgttggggtgggagggtgtggctcagcaaagggcgtgggggttccaccggctccctgcccccgctggtggggcacagtgaggggggctgtggtcagacctggtctctggagggccagccgggggttcccgtccacctgtcagggggttcgacgccactttgagatgacaagtgaggccacctgggcacagcgctggtgtgagaaggaggccatcaggacaggtcaagaacccaggcccgccctgctccgaaattcttcagacctgatgaagaggtgtcccagaagcgggtggtgctccaggcccgcctcaccagctccagggaggtcaaggttggagagagacaattctaggggcgaaccagacatagccaagagcagctcatcttccctggagaggacgggctgcccacttgcacagcccgggggcctcctgcccctagacctggtaccttcactcttgttgccacccctacattcatacctgcgccccagtctgagccacacctaggcccccagctgaagtgacactgtgggtgccaggcatctgaggtctccacaagcccccacagactcagggtgggaattcctgggggccagagctgcagagggtgctgcctgggggtgctgggctggacgggggtcctggttgtccctcctggttctcctggttctccctccgcagagggagggaggcggtggcctcagcagttcctccagcagcgttcctgagcgggcggcagctgggccctcttcccacagccacgctggggttgccatgcctgcaggtcttggggccccctcccccttgatgaggtcctgaccaaatgcaggaggagcaattccagcaccgaggggcgagcagagccgcctgttagcactcctgggagggcccggagtggtccctgaatgatggattcacctggaacattttcaccctcttcaggcccaccctgccccagaggcccacggaaaccctgcctgtactggggccgcagcgctgcccccacccatacgtaattacacggctcggtgtaattgcaaattcgaggtttacaaagcctccccctggaggccccacgtgagtgtgagcgaggccccagcccacccctgtggccccaagaaggctctgcgacaaaatatccatgagtgccgcccacgaaggcattaaaaccaacgaccttctcaaaacttaagctgtcacaggacatttcaaagggtgtttcctaagaacacctcaataatgatgttccaaggagaccccatccaaattcctccaaggattacgcccccaaggcccagtccacacttgctcactcccaggacggggagctcacctcctcctccccgggcgccgtctcctccacatcccacaccaggtcctgcccatgactttccccctctcagcgccgtcctcagtggccacaccaagaacgaggccatgtcttcctgggaagggcctcagatgtcagcaaatgccctggtgtcttgggctgggctgggggcaccagggtgaggtggtggggggagccaacctcactgcccctccccttcctgcctgcccttcttccggggcacccagcagctcggtcctagggcgatgttgacagacagacagaggggcggatgcagcctacctcctgggcagtgagctgcggtctgaggcccctgcccagctggaaaccacagggaggggaagggaggggaggagaggagaggagaggaaccgtcatggggccttggagtcgagtcagggttgccaaatgccagatgctggtcacctgcttctttatcttggtaacaggcaggtcgggcaggagtgggtggtgggtgggggtgagcaggggtgaggggtggcagggcctcagcacagggattatccctcccctgacacacacaccagccctactgtccctgtcctgcccttgcagacatgtgtcctgcccttgcagacagccgcaggcaggcagggaccaccatgagcaaccccgtctctcctcctgaggggcagcacagagcctggaggaggcctgagtggggctgaggcctggggcgagctggggtggaggggcactggctgccgggctccagggatcttctccccttcctgccccggagggtgctggcacaggggtggggctcactcccactccgtagacacaatgatcagaggtcctgggtgtctggggaagctgggctgtgcgtgtatgcgtctaccatgtgggggtgcctgtgagtgtgctggggcgtctgcagtgaaggcctcctgagaccactccacggaaacaccgggaatccctgcagctgagcctgtctctcacgggaccgggaagctggagagagccccaaccctgcccgctggggccgagctccctgctcctgcagcagtcccatgccccacactctgagtctgccctatccacagctgctgggcctctctgtggccaccatggtgactcttacctacttcggggcccactttgctgtcatccgccgagcgtccctggagaagaacccgtaccaggctgtgcaccaatggggtaagtgaggtccaggcctggctgcatcgggaggggcctcgggtgcaagggtggctggcacgagcccagctggacgcctcacagccagaatggtgccaggccctaggcaggagccagaggtggtcaggggcagggaggggctgccctggagtcctagctcccctgggcagggcctcgggtctgggtgacagccagtgttcctgcctggttctcgtgccccacaggagcgtgggcacagtgtgggtatatgtcgggcagggtcaggaagtggctctgtgcggtcaggacctggctctgtgcagtcagggctcagtcccaggcaggcctgggactggcctggggctgggcacagcaggtccatgagggctccacatggctgatgttccactcaggacctgggatgtgggtggggagggggtgggggctgctctagccagacgcctccctgcagggactcagcagcgacttatccaacatccagagagcgggagcgagggccagagcctgctggggccactcaggggtaaggctgaggaaggcccctttaatgaggggatgtcagagccagatctgcaggggactctcaggcaggagctcagggggcccaggaaggctgcagcccggtgggcagatgtagggaaactgaggcccaggaggtcagggatactgccttagaacccaatgcttttccccaagtcctaggaccagggcctccctggaggaggacgcctggggcccaggtccaggtccggactgataagattacagctccagtccggccacttgtcactaggacatggcaggaggatgcctggggcccaggtccaggtccagactgataagattacagctccagtccggccacttgtcactagggcatggcagggagcatgtggcttccaagatagccccacaggcatggagggcagggaggaaaagagggaaggaggggcagt

SEQ ID NO: 914393 - DNA, 4001 bp, Homo sapiens
tgcaaaggcttcaagccaaaattaggatgtgggtctcgggaccccaccagttattctcattattatgtggtacagggagactgggtagatcagggtctcagaccataatagatgggaaaaaagagaccccaggggcaggaggggaatgagcgagagagaattaagtttgtattaagttggagaccagggcagatggaaagacggaaggttaggctggcactgggagctcccttcttcaggggtcagctccccataggatctgcaaggaaggtgcaacaggatactcccttgagccatgtgacactccatgacaaaggcacccccaactatgcccctgggtgtcaacctccctatccttttctggttcatgacctcgagatgcctcccaaggcatcttgtctgaattcttgtgttccgaaccttggcttgttatatgtggcgcactttatgcaagttacacaaaactggactccaggcgtggtgctgcatgcctgtaatcccagacactcaggaggctgaggtgggaggattacaagcccagaagtttgagttcagcctgggcaacatagtgagaccccatctcttaaaaaaaaaaaaaaagggaaagaaataacttaattctttttttctggcatagagaggttccaaagaccaatcctgaagcttggtaaaggactacagctgttacccccacattctatcaggctattaagactcactcagccgcaacatggccaggcccccacaccaagttaggcaagctacagataccaaggagtaggaactgcaaacacaaatacagggcaaactgcaggtacctaatcctgacacgtcacctggctgaactttggtagcagaagcccaaggaacacagacttatggctttgtgtatatagacattgtcctgtagtccaaaggatgtgactctgtggcagacgggaacctagaacattggacatttattatattacattaactaccttgcttgcttccaggtttctggaagttttggtaacacagctaaatactagggcctagtttttgctaagaacgtgggtagctctgacattcctttgtccattaggcagatccactgtataaatggaaacatctgtattttaaagattttcctagctgattttatcgaaatgttagagattttcctggggcgagggatagctgcaagttattacagtcagatttctaagcacgatgattatttctggtggcaaaccatgcgtgtggaggccgattcctcctatcagcctaacgattaagtcaacatgctaagcagccacacgggggctactaagtgactcgcacgggggaagcaggcagggagacagatgggcaggggagggaatctggggcaatgcacaacctccacccaggtagagagagggtctgggggataggtctgtgtcactcaagtaagagcgacacttcttggggtccagtcccgtcctgggcttgcccgggaaagaccccaggacaaattcggcccccttccagagtgtccccattctgctcccacaatgggacaagccggcctcttctccagtctgggcccccttcggccctcctccctcctcctgtctcttgggcccccagccatgctcggcccccagttgacttcttcagtacctgcattgctcagcgtcttgcactctgtgcgtgccccatccgccgctcctcctgtcccgttcctcctgcctctctcagccccactcactctcccactgcccctcgtgcccccatccaaccctcctcctgccccccaacctctgtctctcagtcccaagccagtcagggagccctgacagcagctacccggacggcagtgcgagccccttacccgggcgcagcaggcccccggcggcctggtggccctcggacagtaggaaggagcctgaggcccggcgcggggacgtggccggcagcgcaacccaggcagctccgggcagcgcgccctgcccgggccccgcccaaacgccggaaatgacgtcacggagggcggggcgggcctgctggccggggcgaagagcggctgcggcggggcctgtggcgaacggaggcgagccggaagtgggggggttgtctgctctcaggccccgcctccccggggccggctcgggccacttcttgcgcgctgccagaaggagctattttgagcaggtctgtggcggaagtgggtgttcccgggtctctgctgcccagctgtgcccgctgccgtcttggggtcccggggtgcgcgggttgggctgggtgagctcagaggcaccttgtcggcagccgagcctgaagaggcgacctcgaaacgcctcgtgagacctttcgcgggcacacgcccttcgcgttcctccgcttcctcccacgtttcttcagcccctggcggggcgctggggtgcccggtagttaagggtggggtggcagcgagcgtttctgtgcacccgcagcgtgccacgcccgtgctaagcactttgcctatagagccagtggcttaattctgcaatagcacagtgaagaacttcgcctcattttacagacgtggaaacaggctcatcaagtgctctgtaattgtaaaacctgggataacaaaggagcaaaacgcaatttagaggcaagtgtgtgggacttgactttggttagaaataggctttgcaggccaggcgcggtggctcttgcctgtaatcctagcactttgggaggccgagacgggcggattatctgagctcaggagttcgagaccagcctgggcaacatggtgaaaccctgtgtctactaaaatacaaaaaattagccgggcgtggtggcgtgcgcctgtagtcccagctactcgggaggctgaggcaggagaattgcttgaacctgggaggtggaggttgaagtgagcagagatcgtgccactgcactccagcctgggcgacagagcgagactctgtctccaaaaaaaaaaaagaaagaaagaaataggctttgcaagttagtagttctgtgactgaatcccagtctgtataagaccctcaggcatcccccggtccaaaccaaaacctgtctgcgaaggatgatttcacaggagcaaaccaagactttatttccagttttataacctgccttggggtcttcggctaggaagctaagagacacagaaagctgagattgggcaaagacaggatctaccatccactccgagctctgggagcacctgaaatgcgatttgatgtcaccaccaccatccccagttcaaccacagttcatgtgtggaatttaacctgcaaagttgggtttgctgagacccaacgccggttggatcatgtgaagatcagatcctttcactatgtatttgctttaatttttccaactagttcggatctaacatgaagtacagtattgaggctcactccagaagtgaaaatatacaatcggcaggcagattttagttctttgcctgcccttttcaaaaatcaatgactgggctgggcgcggtggctcacgcctgtaatcccaacattttgggaggccaaggcgggcggatcacctgaggtcaggagtttgagaccagcctgaccgatatggtgaaacccgtctctactaaaaatataaaaattagccaggcgtggtggcgtgtgcctgtattcccagctactcgggagtctgagacaggaaaattgcttgaacttgggagggggaggcttcagtgagccgagatctcaccactgcactccagcctgggcgacagagcgagactccttctaaaaaaaaaaaaaaaaaaaaaaaaaaaaatcaatgactgtgactctgttttcatttcctctttggcaacatagggacaatttttactgctggggctgaaattacaaacataagacacagcctctcctctagagcagctgggcagctagacctccatctgcttgctttttttttttttttttagacacggagtcttgctctgtcgcccaggctggagtgcagtggcgccatctcggctcactgtaagc

SEQ ID NO: 914394 - DNA, 4001 bp, Homo sapiens
aacaatgaacgtcatacccaattttcgaagaattcttttgcattcatccctgctgagatccagaagggttggccacacaacaggcattgctgcttctgtttggtagccccaaagagcttgtcctccctaccagaacaaaaaaaaaaagtcaaattaccaaagtaccaaagtacattcaaggggccactcacctggagatccagtcacaggctaagaagtaaaccaaaaagatattactattttacaatcctttctcaccaccacactttccaacttttgagaaatcaagaattaagtcatttgaactatcacagtggaaagaacacaggctttagagccagacacctctaggtttctagtcccaacttttcaacttactggttaagcctaagctttacacatctataaaacagaggtaataccacccagtttgttacgcgtattaaagaacactatatataaagttctttcatagtggctggcatttcatttaataaacaggtggtactaccaacctggggcaagttgactcctgtcagcttcctcatttatgaattacatgagataaaatttgtaaagctcctagcaagttaaagaaacttaataaataactcctcgtgctcgcttcagcaacacatatactaaaattggaacgatacatacatatatatatatacacatatatatatacatatatatatacacacacacacatatatatatactctctcaagtcttaatggaatatgaattttgatcctgtagttattaaacagccatttaccaacagttgagctgccaggaacttacttagaactgggaatttcctagtgtaaaagacaaaaagacacggctctgggggcacgcgcaatacctgcttagcacagagtagagccgctctaagtatttgttaaatgggtaagtgaatggttgacgcgactgagcaaaacgaatggatgaatgaatgaatgaacgagctcactgtctagcctagaagtcagacaccgaaccgaaataactgctatatcccgttccaggcgctggggctgctaactccaactctgtgtcccgaggtgagcccccctccccctacttcccatagtcctctcagctcagaacaaacccaaggcaagaagaactggactgcgcgccccagccggcagtatgacataaagaaaaggggtggggaggaggaagaaggggcagagccaaaggaatcctctccctccacaagccagtccccgcctcccgacaggatcttggaggcggccggcgactgctcgaaccgagcaccacgtcacggcatcccggcgcgtcctagccaggggaccccagagcggggccgcaacgcatcggaaacccgggcagtagtttccggagcccgctcggggaaccaggatcttgtaggatccttccccactcaagtgtcaaggagacaagcccgccccgccccctctccaaacacgcactccctagcagcaccacaacaagagcagccagcccaggctcctcacccggacctctcggcgccggtcccaatgtcaagtccacgacccaagcccctctgggccagtagctgttgtcaggggtcccggccggcacccgcgcctcactccctccccagcggagaggacaaccgagagagagtaagccagcggatacccagccagacgacctggactcaccgggagtctcccagagctaaacccccagagtcccagcaccaggccagccagagtccccctgagtccaccccggggagccccacgatcccgttaggaaacaacggaggatggggctgggagccccaagccgggctccgaatgcttggcccggcgctcctctagcctggctggcctgccagctcttcccaggaccctgcctgagagtcacccacctgcccggcctttcggggctcatctaaaaggctcctccgccaagactaggggacaccaggaattgggtttgtttgcggtgcctctgaaggggcaagatggcgacaggtaacagggcgcaggcgcagccgcgcgcggccagtcgggaggtgtagttcgcttttcccgcctttcggagaacaaacaccaaaaggcctccattcatcttgtccttcttttcctccgcgttatgaaagaaaaggacagacatcgcggagggtgctgggagttgtggtccgaatccaaactccaacctctttcgctccaggtttgctgtcgtacgcgcaaggaaggccgggattgtagttcccttggtttctcctgcataccctcctgtctctggcttcgcgcgcctctcctgggctgccgtctcccagccaatcggctgcgctctctgctacgtgtggcgtcacacgtagcggccaagatggcgctagcggttggagcaggggctctgctgcgacctttacggtagtgaggttagggacgatgggagagcagctttgttcctgaagtgccgtcgaggattaggatcgagtttcttcgatcgtgagggcaattattagtggcctctagccccccagatggcatcttgaggagagagaatccacgctacgagaactaacatagtggacatcgcagttgtccgtagccgatttgcgggttacggagttgttgcaagtaaagaaggggaaatccgagcgttctcgcgttggatttcctccacgtgtgaagtgggaatggtagtgatatctcgtgctatctctgtcaagggcaagaaggagaaggaatttatttgaggccctacgacgtggtaggttcaccctcagcctttgttcttatttcatcttatttgtggagaaggtcttttcgttcctattttacaggtgagaaaaggggcccaatatatagttatttgcggccataaaatagaagccagttgcctgatactgaagattcaatgaaatcttgtgattgacttccctctttaaattttgtactttgggtaacatcggatccggtagaaacgctcgtcagaaagagtttttaatgtgcattctacaatttccagacatagtttccttcttgaaaaattgggttaatactaccctatagggatcttgtgatgcaccacgtaaacgttgtaagttgtgaaccactatacaaacgtatgagactcttcatgttcttgagtggaactgtaggttaggaagagaaggtaaataacagcatttaagtttcctactactatttgcccattagctaaaaataccctccgaggtctaggaaagtcactgttgttgaaacccaacctacaccttcagaaaatcgtaaagtggaacatattaatcaccaggccctccctccgctgtctccctgaccttcctatgcatccagttgcttaagaactcttggaaagatagtaagtgaaatcttcatagaggatttttgtactttaacatatattatttgatttgagcctcgcaacatttcagtgtgacaggtacgattaaggtctttcatactatgaatgagaaaaacatagatgtaccaaggactcaccaaatttcacggagctaggaattggaagagagctaggctttgtaatcccaggtcttctgacctccaaatgtcctttcctctacagtgaatgtcaaaatgacaatgaatgtctactcctctacaatggagtacaaatcgaaagacaaggggcttataaaactgactctgaccttaagaagtagcatatgagtgatgaattattatagtcaatccttgtgcttactaagtgccacatactggtctaagcattttacatagtaattcagtccttagaacaactttatgaggtggaaacttttattatctctaattacaaaggaggcaactaaagtctaggaaagaagcaaaatagcttgcctaaagtcacacataagtaaatggtggctcacgcctgtaaacccagcactttgggaggctgaggcaagtggatcatttgaggtcaggagttcaagaccagcctggccaacatggtgaaagcccacctctactaaaaatacaaaaatt

SEQ ID NO: 914395 - DNA, 4001 bp, Homo sapiens
aacctgggagacaatggttgcagtgagccgagatagcaccactatactccagcatgggtgacaaagtgagactctggctcttaaaaaaaaatttttttttaaaagttccaggtcacatggctatcttgggctatgaaaaacacaaggactaccaactccacaaggctggctttgtccatcccttaagattaagttttactctattactcaaatactttatttcaacttttattaaaccaaatccagtaacttttacaatgccttactagagggttgcctcataactgaaccttcatttctggcagggaagaaaccatggcttcaggatcatgactgaagtttggccatgttccatcattaatgttccaacatcaccagggacacaaagctgcaaaaatgagaagggaaataaggttagagaaaggatctgggcaatcttaaggactgaggaagacatgttccccaacccttgaactcacaaaccctgaagctcaaggattgcatccttcctccaaatctcactcaacataataagtgcagaacaacatgccaaagcactgtatgaagcactagggacaaagacaaggtcaaaatccttgtaaccaaatttaatggtattgtaatgcagtgttaacacaggacagtaacagaacacccaagaaccaaacagaagagggtagggataagcataaatgaagtaacatgaaataaacttccaaatggaaaacttgtccatacccccagggcaagtcaactacagtctcccaaaggacataaattccacttagggcacactagacagaaaacaatattgtgtcttttttttgttttttgttttcaaatagggtctccctgtgttggccatccactcctgcctcgacctcccagagtgctgggattgcaggcgtgagctacccacgccaggtgggtacttgtagccacaccaagatcaatgccttctcttcctcaacagcggtcgcgccccccacttcccatttcaaacctcagcatgagggcttctacccaaatctccctacgacaggtacttcttcaactcttccaccacctcttgaggctcagggaatttgagtttgcgtgggggccccttcttaatcccagtccagagctccgcacctgaaaggccagaatgaagcgaagttacaatacttcggaacccacgagcacgtctctgaagtcatgagactgccgtggtttctaagaatagcgcttcctgtcttcggaacccacgtccctttcacccacgtccctctcccccacatccaggtccccacttactgctgccgtccgggcgcagcagcgtcacctcgaagctgcccctccggggcttcgtcgggttcacctttactggaagctctggggcctccaggcgcagcgcctggctcagggccgcggcgttgcgcccatagacgcgtcagctagtgctagggagagacggagaggttagaaaccggggcccctggccccccccggcgccactgttccctctctcccgttactctccaggcccctcaccaatgctcgataacaacggtcgcctcctccattccctccccgccgttcgccagcttctctcgcttctcggctacggcgaccaccgcggcctcagccttacgcttcctcccgcggggagccatggcgcctagagcccggccgagaatgcagcgggactggtgggtggggggcggagacgcgaccactgagcggaaactgggcaacgaagagcgcagcccggaagctctgctcctacagcggaaacctctctcaaaggaagggaaagcttggcccgcagcacccacgtggcctggaggcggaccttggggcacaaccactttgcaagcagggagcgggaaggtgcgggaagcgcctgacggaaccacccatcgcttcgggtggaggggacaggggacgctgggatggtgaacacagcaggaaggggcggagactaggtccgactgctagcctcgcttcgcgcaatcttttctgtacctttgcatggcgctaaatgttgtgtgccaccatctgccgccaaactctcctccctggcaaccgcaggccaatcccagagtaaacccaccacctaacaacatgtggccgctattctagatttatggaaactagacttctccaactcttgccagtcctggggatcaatgcccggcatttggtgaaaccaaataggatggcctttgcccttaagatgggcaattcctctgcagttgtcaggcttttctaatacagaaacacacaaacgcgcaatcaaaaggaaatcccaatctttttattacggaaagccatcaactgggtgtggggagtatgtcagagggttagtgaaagtccaggggatttctcctccaagtcctaccacacaaaggaaagtctcaagcctctattcaccccttctcaatccccacaaaatagggggttgttcaatattgtcttcaatgataaaaactttgtggttaaaggtttctccttaggactagcgacaaagttaggcttatacttttaatgaagaccataaacgaagccagaagggcttaaggaagcaagagtccttgggggaaaattcttagcgttctataccccagcatcttaccttagggttaaatctaggtctaaccaagctgtgcaggtcaactaagaaggaatgatgaaaccacagagtttcatggagaaaccatggagatgtctgaatagctgataagcagttaacacactgacccaagcttggagggaaaccatttccccctccgtcctatgagatctctttcttgctccagtgaaacagttggccacagcatggcaggccttcctgtagggtgcctgacaattccctagatgcctctttaaaatcagaagctgcatgctgccccacccagtcacagccaaagggaaaacataaataaaaggctgcagcctcaggcttgtggttatggaaagagcctggaattgacaggagaggaagcactgccaaagtgaggatcttatttatccttcttgttttccccatctgacactgtggtgggggttgaagccacaggctgctcctcagggatattgtctccagcctttgatagtttcttggcccgctggtatagctcatttaagttaaattctcggatcacattctcctgcacaaaagagatgcacacgtcaggatctgggttggaagggagagtaaagagcctgggaagtaagaggtattttacacaaagtctgggaaaggaaggagtaagcaaaggacaaaaatcttccctaaccttcctcttttttaggtacccagaaaagtcaactaatagttaaatacccattatgtgccaatcaccgtgccaagaattatacctaaattatttaatgtaatctgcaaaacaaccctgtaagccaggggttattacctccaattaactgacagggaacctaacacctacagacaataggtgcagtggccttcgagacagaatctttttttttttttcctgatggagtctcttgttgcccaggctggaccgcaatggtgcaatctcagctcactgcaacctccacctcccgggttcaagcgattctcctgcctcagcctcccaaatagctggcattataggcatgcgccaccacactcggctatttttgtatttttagtagacacggggtttctccatgttggtcaggctggtctcaaactcctgacctcaggtgatctgccagcctcggcctcccaaagtgctgggattacaggcgtgagccaccgtgcctggcctgagaccaaatcttaactaatgattgttacccagtactagcaggtctgcacataatatatatttgctaaatgaattaaaacatgaggtctagtaactagtccacaccctcaaagctaatgggcaagtggcagagctgtgaatcaaacccgggtagggcttgaaagcccacctactgttctgcacccttcatgcacctgcccttcctttcaggtacctcagagaagg

SEQ ID NO: 914396 - DNA, 4001 bp, Homo sapiens
tcttctaagccttctgctataagggacgttaagcccacgaattagaaacagccttcctagggaaagcagggttaatgctcccatcccagcctcttagtgaggcccttctttaggaactatgcctagtctggggttattccaatggccccacaataaccacagaaaggaagtggtgagagaaaagatgaggtttaccggaactgagaagtattttctagtattccactagcccaaagcatctcagttcagtgctgattttcactatttcattagagaaagcgaggaatgttgagcttgttgttcgagtcttcacttcccgggcaagtcgtgagattatgagaaagatggaaggaaacagaactaaacctaggtgccttattcgttttgttttttctcacagcaaatcagcaaagaatttcttatctcttaaagtaagcagaaacagaaaaagctgaaagaaagacacagagagaaaggagaaactaacttagaagtctcccagtttccacccaaactacccagaccccacccacctcatttcagtcaggggcttataaagcctaagaggagttgaagtttaacttaaatagaaggtgagggaacgccattggtcagaattcttgaagcctggattggctggagccacggaggctcctgaacccactaaaccagaagcaaagtggcagctgagagctggtgctgattttttaaattgggagactcctgagtgtgttcacctgtaactacagtatcataattcaccttccaaaatttaacatcaggattcacaagaaaaaaaagttgccattgccagacatgggctagaatcttaaacttgacagtaaagaaaatgaactctacattgtgaaatatacatcactccctagattctatgatcagatctagaaccaactcagaataaagtcacagaaccaatattagttaactttcagtgaatttttcctatcaaaaagtatcttttaaactagcaaaagaagaagaaaagggaagcatatggtttagcatggtaaggattctcttgtcctaattgtgttcaggacaacttagaaaacagttttctgggtcctcatttccagcctgccagcttataatcacacttgagagtctactttctggggccattcctgctatcaactgtcttaagttgggttccttagaaactgactttgagacctttccatgctgaaagtttatcagaaagtaagctcacaaacaatgtctcaacaggtgcaaaggaagcagaattttgcagagggagaaggtgaattacaacggagtttcatcagacttcccagctgatttacgagaaactctggagtagagatggtcctacacacttgtcctgagttaggcaagggagtcaggcctttaaactcaccatcaactagtcattaaatacaatcattgcaaacggagggtggctaatttagggtaatagagttccctttggctgaaggtaattcctgaaagaaatgtaggtgtgaactatcagcagctgatagctcccagcttatgaggtaatgagtgcttcaagggggggatctgtgtggagctacacagtttacagctggggaaagtttatatctgattagtcttctgagaggacttgagatgggtgtcagatcctagggttcaggtccagcccatgctgaagtccgaggggagtgggtggatgaacagaaagaacactcgggggtccatatgcaggtgaaagatgacttcattcagcagcagttcttattaacaactttctcacactgtccacctttatctcaactgtgtgctctggctctgtggctcctgccgcccccatgcctgcagctgcatagccggctcacccttggcttcagggtcagcagcttaactttttctctctctgggcaccagtgtgagctgtgttgtgggtcccctctgtccatctgcaaaatggacagctttggctctctttctctgggcaccagcgcctgcactagagccatgttgagttgagccaagccccaaaagtccctgtatagtgttagcaaggcaattataccttttacagacaatagtggctcagagccaagtatgaacttacacaaacaatctatataacaagtagaagtgtgcacctgtgcaacaaacttgctgaatcatgcaggcctggatatctgccttggcttattccttgaccaaaacacatccatatacgttacaatgggtgaagggaataaatggtcagacttttcctgatgatagaatggactctcccattgttgctcccatgcttcttatcatagttcctgtttgttaagacattatgaaacaggtagaataaaattaaacataatttaaaaatgaggaccaaaaataaataaaagtctgtaagaagcaatataaacagacaaaaaatatattcaccttctcaattttggtttttaaaagattcaggcataaaataacagaaacaaaactattagaacgaaaatatcagacaaatttggaaaatacatttaaagctcacttaaaatgtgcttgtatttattggttaactttttagcaatggaaattgtagagaaggacacacgtagagagctggaagtgataaattctcctggcaggaggccaaagaccttaagtaattgatgtgtcttgacctgaacctcaatctcaagagactcattaagctgatccatctctaaggatattctgctgtttgaacaattctgttgcattctctgtaataaaaaaagagatacttttgtgaagaaataactagaatcttgtagattttttcattaggtggtattatggctggctcttgatggcccaaaatgaatttattcccttggaaaatatggcagggttcttcctagtgaaaattagcttaagcaaaaaggactgtgtgattgacatgggacttgtgtatcaatacttgcacgcatgcgtgtatgcacacacaaacacacatacacacacaagccggacatttgcctttatgctgaggtggcaaataggaacaaagctttggcctaatgaatttcagacttaatccctagttcccctcaacgtaacttctgaggttataacgtctgcaggcaaagatttccactataccctaaaatctagccacttgtcgactatatcatctcttccttttatgctatactttcttcagctgcctaatgtgtgtcctagtccattttaagtgcaaatttccattacaaaaaagactacaaaatggatccaaataggttggagtcattagagataccgaatatagacctatatgtcactttatcagctagaaattcagcatctaaattctctttcttggcttcagtctggagcttaacatacccctgatgcctacaacactgatgtaaaaagtatacatattaacatttgagaagtccctattctaagccactccaatatttgctaatattttatttagtatttttgggtcagttcttataagaagattagtcttttttcttttttgcacactctttgccaagttcagccatcgacattaatcatcaatactgtgttaccttttaaagggtgagaaagacagtaagacagggtaagatggaaagcactgtgtgtttataactaatttggacagtgaaatctcaccgcttttgcagaattctattcagtagaagtgaaccattaggtccagcaccactcaggaagaggggcttacactggggcacgaatgccagaaatggaacacggggtttcatttgtgataactactacaggtacctcctggggaatcttagtaatatttggggcgggggactttcaggacctcaagattctgcatcaactaatgtaaatagccaagtcaatagactgagatgacatgtgtgttcctgaggatagatctttatgtatttctaaatgcctcttttgtgttggagtacagtgtggagatttgaaaagggagagatgaaggaattgaactgttttctgaagtttgaagaccttgt

SEQ ID NO: 914397 - DNA, 4001 bp, Homo sapiens
gacatttttggatgcaatgctttgccccatgaccatgaaatcagaggcaccaagcatgacatcagaatctcacactaactgctcctttggtgtcaaggatcctacacaaataagacaaatgggagtgtctctagaagaggcccctctgataggagtgtgacatttaatatatctggtgcttattatccaagtttctgctaaaagggtgaatctctggtttagctggaggctctttattccccatacgctcttcctatatgctgacaggcattaagttgtctaattctaaccctccttaaccttgacagccacagtggttatcctaaaataggaaaaataaggagctcggttctttgttagggagactgtgttcttggtagaatcactatttaagactactatgtgctcctactgaacttctgcttcttcatagaaattatatggaccttaggcccacaaatttaggttttccaggggcatcccaggaaagtgatggtggaatattgttttcctagatgtctcttggttgcttcaaattctgaatgtggagctcttgagccacattctgtttagccaaatgtttttaccatatgttcagtaaactgtccgtggttttggacacaggaaaccaggtcacttaaaggtgacctaatccttgaatttgccccgtaatgccagtgatttatcctgcatatctctaccccgattttcctgacaattttcaatttaaataggatagtgagtttttctgatactcagagatggcatagctttctaatagtgggagactgtttattttcaatctaattctgcttgatctagtccaggaccaaccttctacactgctgaaaccagttgctctaatacttgggaagaccttgagctctccagtttttgcttccctgggaagctggcctttgtggtaagcagctaccctatttggaatggaagcagcatgccattaaatcttctttgagtgtggtaggcactgctttaagattttttttttttttaagcctggtaggctgacttctatgaatgttttaaattcaccttccttcaaatcacatagaatctgattctaaattctctgatctgaaatttccagtctgcagctgaaaagtgatttggtaggatttgttggatatctgcaacccagatacagctgagattgtcctgctccttaaaatatacaaatttgcctcaaaatccaaatttcttattttgtggaagttaaggtggaggagatctgtgaaagagtttcagataaagttcagattctataggaagctggttctataggaagtcctggttctaagactagcccctatatctctttggctttatttttaccactgcttctttgaactctgctctagaagattattaggagttctcaaatatgagttgttctttttcctctccttgtttttacaaatactctacatttaattactattaaattactatacactcaccaccctcccatgctcattaattcaggtatttattaagcactttttgtcaggttctcctctccctctttgtgtgaataactcctgcttgcctagctagaatgtcactctttccaggaagccttcctgatctcctgtctcacccctgacttagcgtatctcctctttgctcataattccctatacgttgcttttcagtgaaccttttttactgtttttgtagttgtcattaaatggggcggttcgtgccaataactttactgcagtgcctggcacatatggaagcagtgagtaaatgttggttattattgttttcagacttcccaccccttcctactcacaagctgctgagacccatgcaggtcacacttcgttgcttcctctttagcctccttactttacctaccttatccttgatgagggtccaggtggcatcagcttcatccagtgtcagcaggttgggggtacccaccaacatggtggggtatgggagggattgggcagggcagtggctgctgcaggaaccccaggcagcccagggaggtgagacctgaggtcttgggccctaaaccactgcatgacatcatagaggtcctgctagataattgtaccttggatagggggaggacagtgactttcctagcttcactgcagtctgtaattcttactcttgagtcacctatccatcctcctgcattaggggaagaaaatgcagggtctgttagggtgtgtttgtatatgtgtatgtgtgtgtgtagttcttggtctgagttctttaaggaaacaggatcaggcctctcctcccttcagcagcatctctgaagcaatttactatcttagctgcagatgcttctctgtgaggttggattggggtcctaaaggacacgggagaagtacagttatgagccacctaacagtgttttggaaaatgatatgtgactgacagtggtctgacgccataagagtataatgccatgtttttactttactttttctatgtttaggtatgttttgatacacaaataccattgtgttacaatttcatatagtattcactacagtaacatgctgtacagatttgtagcccaagagcaataggctataccatagagcctagctgtgtagtaggctataccatctaggtttgtgtaagtacactctatgatgtttgcgcaatgataaaattgcctaaggatgcatttctcagaacataccctgttgttaagcaatgcatgactatatagatcagggcttatactgagaaccaagcagtggtcccagccttggctgcactttggaattgcctgggagcttaaaaattactgttgcctggatcaattactggtgccagagattctgatttaattgatctggggtgtgcctgggcatcacaatttctaaaagctcttcaggcaattttaatgcataacttacgttgaaaaccattattaatgggtgggttacaattgcaatgaaaaccaggtgtgtgtaggaggttgctgtgctgagcagtgtgacaatgtggagggtaagaatataattgggataatgttgccttagtaacgagagaattttcaggaagccagaattacccaggtaaatttgagaaaaaatttcttcatgctccactccctgtcctagtctgatttgtgcctagtagctagataagagctggaatattagctatgtgttatctcctttgcgtctttgtccagagatctcaactgtgttttgctaaagaagaaccattctagagagcctttcctgtagttaacttttctactccgtaccttatctgttcaaggagtcctttctctgagtccctctggagagtctcctttgtgcccaggaatacctcttgtgtgtaggaggtatcctcccctagcccagcccggcatagctctgtagagcagtcccacaaagttggctgtcatcggagctggctgaggtggtatgagtgggggcataggcaaaggtcctgcagtggtgggaaagagtgttagtaaaattttcctaaaggagatgtaactggcctcgggagggcaggtctccttagataaagctatgaatatgggtgctgggtctttgagcaaaggttttacagtgggtgtggtcctattttccagagaggaattaatatcaaacatttccaggagaggaattatgccaaatattaatattgagctcttttgtgctaggagctgtgcaaaatactttgaattcattatattaatccatttggtatcctcttgaagtagttactactattatctcattttacaagcaaagaaacaggttcagagaggttgaataattactccaaagcatatagagtgagtttatagaggatctaggattcaggtaaaagtctgcttgactgaacctttaaccaacacgttcctttggctcactttagtgtgtggtgggaggagtgtctgccagatggaaagtaccaagtggtttagtgaaaaggaaatgggcaggataagagaggagccacgatgggccgaatcagaaaccccaagt

SEQ ID NO: 914398 - DNA, 4001 bp, Homo sapiens
gagatgtttaagcttctgggagacagggcatcttccagaatctggtgaaagctgtgagtcatctccacttccaccatccttccatccccaaatcacacgagcacatacacacaaaaagttccatgccacttcaactgttctggagctccctaagcaaatccacagaggtctctaatgctaggttaaactccgggttattttaatacatcgtgctggaacaactgcaaaaacaaaaatacaatgggaggttgaggctgcggtgagctgtgattgcaccactgcactccagcctgggcaataaagccatactctgtctcaaaaataataacaataatacattaagaaaaagaattgaaccttgatgcttaccacacaccatatctaaacattaacttaaaatggatcataggcctacaactaagtgctaaaactacaaaaaccctagaagaaaatctttgtgactatgggtcagacagagtcttcttagatatgacacagaaaacatgacttagaaaagagaaaagcgataaattggacttcatcaaaatgaaaggcttttagtctttggaaaacattgttaagaaaataagacaagctacacattgggagaaaacatgtgtaacacatccatctctgtccatgtttgctcacatttcaatgttaactcttagctttataataaaatggaaaggataccttttaacggggcatcacactaactgaaataaaattgggttctgtgaccaaggcagagaagaggaacgcacactgggtaagcaaccaagagtgtgctacatgtacaatataaaattataaaagaaaatagaatctcagcaggtggtaggtaaccaagcaggtcccacaagtctgatcctgtctgctgcaaggtagtaagggcagaacatcatctctgccctggattcccatctgtgcctaacacaaaggaggccaggggagagagctcatgtgctgatctggaatgcacagactacagagaaaagggcagaagaggagagaccaccacgggtggagctgtccacaaggtgtgtggaggacatggtcctgaacttggccttcaatgcaagggatgtcaggaagccagaggaaggagagcaggccttggactagagcatggaaacaggtgttgggtgctaccttcaaggaccaagaaggcaacatgccctaccacagcaggaggggcatgctgagaacaggagctgaaatttctctgagccaggtcaaagcagaggccgaaagtgccagccagggaatttggagcttgatgacaaagtggactggctctcctagaaccatggggtgacttgatgaaagttgattcattcagatctgctgcttctcctccaaacaggaccctggtgatggactttctccacacccaccttcagggaagatgcactcattcatttcagcagaggaacgtccctcttgctgcaccagtcacaggcattggtcatggagcaccagggctctctactgcggaacctcatgcagcctcgcaggctttctcagcacagcacccaaaaaacattaccaagtagtcagaacaggcatttgggacacacccagcatggtgggggctgacaaaccctacccttgttcccccaaccccacccccgcctccagggcctcccactgaacatctaccccacctccatcgccaccatcatttctcttctgctgtgtgtgttcttcaggcagcagctgtttttcctgtcactgcataatattcatttaagcctgatttcacctgggaaaaatgctggaaataagccagactccagagtgatgtggtcatgaccagatccctccaagatgacctggaaagctgagtccacctgagctcacaggacggctggagctgggccagaatggagaggccgctggtgggccatgccccagtgaccccagcccgaggggtggcagccaagctggcgaggaagagacagaggaggaccatgtcagaaactcacaaggacaagtgaggggtcctggtgaaagcataatgagtttaataaccagggacagccctgatcatccaccatccaatggtgtccccacctgatgactggcaacccattctatgggtgggtttaagggtgggaggctctttcatcctggagcctcttcaggtctcccagagctgcagtcgcctcagcaagcaaagcagaagaaaagaggccactgtgtttatggctggggtagccgctctcatgtgaaaatcagggggtgaaacaaggtgcttttgaaacctgttcaaggcctccttccctcccagcaaatcatcagaggagagattttgcctcacgcttttctctcatgcatgtgtctgtcccagagtcgccatggcaacactgtgtatgtttgcacggctggaaggatccagagatggaaaacgaggccagggtggaccagagcagggagtccagcaggaattcctctctgatcctctgcaggcgatcagttaacagaaagctcccttgcccttctgaggttagtcatagagcctgcttctgccaacagctcacaggaaaaaatcacaatcctcagcagtgagtcctgggaatgtgcatcaaagcctgttttccccccagcagttttatcaggtagggatttgccatgacaattccccaggccctgaagcccaaggtgccagcacacacatggcaaggcagccagtgcccggtcacagggtgggtccgggaaccacccctcactcggtgggagacagcaggtatgtcaggaagtgctctgccacgtctcacctgtttccctcacgcctgacacttctctatgccgcgtggacttggagaaccaagctctgaaaatctgtatgagaccctttttctagatgagacatgcacctcatgctgattctccctcagaagacagccccagtgggtgttctctgtaattcctcaacagacacagccagccttttaaccacttctttgtctctgaatcacctcccaaccttttctcaaattgtgggagccataaactggatgacagggaggattcagcccagcatggagctcaaggtggggccaagaaccgtataaatgaaactgattttttggcaaatcacgtgaacatatgcatattgaccagtatttaagccagtgtctgacacatattaggtgcccaaaaatatttattaaacaaataagtaaagttcccatagatagcagagacatggaaagtggttcccacctagaagtttggtgagtttactttcatggggtacagaaagactgttaaataggaagggatgctagtctaattgcacttcaaacccatccctcctcactccacagctctgccccttatataaaccaattctcacaaaaacgtcaggagcagggagttcaatatttacttggccatgatgcacttggtagatctcagttggctggtagagtgtatttttcccactctgagggccaaagattttggcagatggcaaatggaggtgaaggggagacagagtaagttatataaaataccactaactctcttctcctgtaggcagtaaaaacagcttcctagattattagcactgagccaaaataaaaatccactgaaatatattttacaggatggagatactgttctaaaaaggacgtgagcactttcctgaatttatatgctgctttgttgctgatcagttctgcagcaatcccagaactaaggtccttcagtcattcaatgaacatctgtcatctacagcggtcattctcaaccagggctatcttgttccttaaggggacattgataatatctgaagacatttttgagtgttgcaactgggggaagggtgctagtggcatcttggggagaccagcttctaaacaacttacaaggcgcagaacagacccaaccaaaaagcatcatctgccccaaaatgttgggaaaacctagagagtgacagaaacacacagtagcacaaagcgaggcatctgagtcccggagcctcagagaag

SEQ ID NO: 914399 - DNA, 4001 bp, Homo sapiens
aaaatgaggcgactaaaacggacttaatagatctgtttcaggattaaatgatacaatgcatgaaaaacactcagcacaaagatggcacagaacagggattccatgctggagctattattactgtttgctcccctgttctcaggcccacaaggctctgccacctcaccctgctcactggacgccttcctcaccagggccttcctgactcttcctcgcccaccccagacaagccaaattcaggactgcaccctggcctctctctcactctctactgcactgattttttttgcctgtgtactccccaccagaccaggaactccttgcggacagagaacgcatcaagggtcgtcaatctcattacctgttggagtcacctggggccagattctgggactaggcatcagcacgttgtccagctcccagctgatggcagcgtgcgtccagggcggagaggtcgtgctactcaggtgtgcactgaggaccagccgcgtcaacatcactgcggcttcttagcaaaaccgcggactctggaaaccccagacctacagaatcagaacccgcattttagccagatccccaggaagggaaagcacaggaacgaatgccagtgaagtgtgagtcgacctccttctatccccagagctcaacataattcaaacacccagtgggtgttgagtgggggttcgctgactaattgactgagtgagtgaagccctgtgtcagcttccactgggatttcacacctactccatcatgtgctatgaaacaaacaggctcaaaaagcaaacccgtaaaacgttcagaaattcaaaaatagacacagacctaagttgatagaacaaatagctgcaaaatggtgcggtttttaaatgaaatacctgacgggtttttaaagatttattaccaccgggctctgtgccattaaacctccgagtacactagaggataattttgttttgttttaaggttggtaattgtgaaaagctgggaaaccaggactggcccctgggaggatcctgtccaccggtgtggcttgggcacagtctctgggtggctggggccgctggcccgcccttcctccaggaagagagacccgctggcggggagtccccggcactgccaacggcctccccacgcccgttccctggggacagggcctctgtctcccctccgcaggcccctcctggctctcaccctcccaccccgcatcccccagccccgcctcctccgcagccgcagagctgcagctggccagggggccacacccaggcgtcgagcaccgccttatccagccgcactgggggcttcgtcccctgcggggtgaggggtctcccctgtgtcaccctccgaggccacgctagacgttgtggcgctcagggctcccggttcctgccgcgctggggctcccccgtcccagcctccctccccacctctcccaggctcccctcccctgtcgcagccaccctcccccgtcccaacctcctccccttctctcgcacgatccggccaagagatggcggggtggcgggaggggcgctctggcgaccccggaagcgagaagcaggcctctgcagggccagggatgaaggtgcaagggaaagccctgggacctggaccttaggcgtgggagggacgaaagggaaaggtcttagaaaattcctcaggcgtggcttctgggggggcggggcggggggaggaaaggggcacgggttcccggtctcgtagacgctgcagcggagcagagcctctaggcatgccctcatctagagcagctgctgcggaatccggggagcctgcagcactagccgtgcgattccgggcgaggtttttaaactctcacctgttttccccttttgtaaactgaagataatgcctctctcccgggagtgggagcacgatgctgacacaccgtaggaactcgggacttgctgattctccttccttatcctcaaggcgtttgaagcactcctgcccctcacccccacccctccagcccctttcccagccctgccccctggtggaaaatcctaagagctacctctcaggagggctcctgtaaaccaggcactgtacacacacctttcatttcatcttcgcagcagctctttttggtgagtactgttatccccattttgcaaataaagcaacggaagcttagagaagtaacttttccaaatgtgcctcagctccaggcaaaataggaacctaggtcatctgatgccagagtcagccttcctaactgtttatgatccgacttccctttctgtactggattttctatttctgccataacagatgaccacagacatagtggctggaaacagcacccacttatcagctcacagttctgtaggtcagaagtccaggcttgatgcgactgtgtcctctgctctgttcccacaaggccaaaaccagggtgtcagcgaggccagcattctcatgtggaactcagggcccccttcaagctcctgtggttctggcagaattcaggtctttgtggttgtaggactgaggtcctcacttttttgctggctatcatctgggggctgctctcagctcccagaggtcacccacattccttgccgtgtggccccctccatctttaaaaccagcaaaggagaagccccctctgtctaattcctctaataatttgaatctcttacttcgggaaaagcccaatcccttcaaagggcttgtgattgggtcaagctcaccccagatgaactttctttcttcagttcagctctgccatatgacatgccccagtcatgggagtgaggatttcctggggttcctcagggggtgtataccagggggcaggaatcacgagggtgtgttggaattctgcctacttacaagtgccttctctgtccccagcatgtattctggtgttacattcaagtgtaacacctcgaatgcttcctgctaaccctaaagggccttgaggggactggggcagcctgttcaccaaccagtttggagcattttcctatgagtacagtcatatatattcccacagaagagtatacaaatatctccatatgagacataagcacgccctcctccattcctcttcctccaacttcatcccgtgtttcaaagctcagagagtggtacattttgatccagcatatcttagaaagtaggaaattgataaagatgcttgtgatcacagatagggagactgagtctgtgaaaagactcccaagccagtggtctctccaggaagccctgctgacccccaagcaaggctcttaccaagttgttagggccctgactcctgacattctagaccacgccatgacaccaagttttcctccctgtgggtgcgtgatgtttgacattcttcattcagaggtccatctaaatggatgtcacattcactaacgcatcatctgaaatacaacttcctttgattttgcctcttttgagtctttctccacttgtgttttcctatcaaagggattaaaccactttgctggacttgaagctctgtcttttccaaaagctttcatcatgtctcaacacagcttcccattcacagacacaggagaggatggaagaagagaagtatcaggcttgatgaggcttaataggatttgctcaagtcagtgcctttccctgcgtcctgcagagagtagctaggatgctcagcttacctaggccagccacagcattcctccctgtctgtcctctacagacagttctgcaaaaaccctagcttcaaagaggaaatgctagaatatcaactatgggagggctggctctgcgtttatcttcttcactgctttatgtccagctcctagcacaggggtttggctatagtagttcctcaattaatgtgtgcttaatgagtgcataattaatagaacggatctcgaaaacctgattaaagaatttcatctccattgtccctgaaaatccttttgacttgataggcacacaacactggaagccagggtttcaaggatggggattttacttacccttaaaagaaatct

SEQ ID NO: 914400 - DNA, 4001 bp, Homo sapiens
gcaatcagggacctctgggggcaagtattgtgcttagaaacaccgaggagcagctgttagatgagtagggagcatgctggaggggagcaggagggagagggagaacacagccctggctggcgggaagtgacccgagctgccgggcagcttgtgcacagcggaccacatggcaggaaatcatgagttccttccctggtgctccccccgggactcagaacaaccccatcacacccagagggctcaggaggaaccaacctcccaggcagcggtggctgcacttagagcctttggaatcagacaaaacctagcccgctgcttagtaactgtgtggcctgaagcaagctaccacatcactctgcttttgtgacctgtaaaatgaggcgactaaaacggacttaatagatctgtttcaggattaaatgatacaatgcatgaaaaacactcagcacaaagatggcacagaacagggattccatgctggagctattattactgtttgctcccctgttctcaggcccacaaggctctgccacctcaccctgctcactggacgccttcctcaccagggccttcctgactcttcctcgcccaccccagacaagccaaattcaggactgcaccctggcctctctctcactctctactgcactgattttttttgcctgtgtactccccaccagaccaggaactccttgcggacagagaacgcatcaagggtcgtcaatctcattacctgttggagtcacctggggccagattctgggactaggcatcagcacgttgtccagctcccagctgatggcagcgtgcgtccagggcggagaggtcgtgctactcaggtgtgcactgaggaccagccgcgtcaacatcactgcggcttcttagcaaaaccgcggactctggaaaccccagacctacagaatcagaacccgcattttagccagatccccaggaagggaaagcacaggaacgaatgccagtgaagtgtgagtcgacctccttctatccccagagctcaacataattcaaacacccagtgggtgttgagtgggggttcgctgactaattgactgagtgagtgaagccctgtgtcagcttccactgggatttcacacctactccatcatgtgctatgaaacaaacaggctcaaaaagcaaacccgtaaaacgttcagaaattcaaaaatagacacagacctaagttgatagaacaaatagctgcaaaatggtgcggtttttaaatgaaatacctgacgggtttttaaagatttattaccaccgggctctgtgccattaaacctccgagtacactagaggataattttgttttgttttaaggttggtaattgtgaaaagctgggaaaccaggactggcccctgggaggatcctgtccaccggtgtggcttgggcacagtctctgggtggctggggccgctggcccgcccttcctccaggaagagagacccgctggcggggagtccccggcactgccaacggcctccccacgcccgttccctggggacagggcctctgtctcccctccgcaggcccctcctggctctcaccctcccaccccgcatcccccagccccgcctcctccgcagccgcagagctgcagctggccagggggccacacccaggcgtcgagcaccgccttatccagccgcactgggggcttcgtcccctgcggggtgaggggtctcccctgtgtcaccctccgaggccacgctagacgttgtggcgctcagggctcccggttcctgccgcgctggggctcccccgtcccagcctccctccccacctctcccaggctcccctcccctgtcgcagccaccctcccccgtcccaacctcctccccttctctcgcacgatccggccaagagatggcggggtggcgggaggggcgctctggcgaccccggaagcgagaagcaggcctctgcagggccagggatgaaggtgcaagggaaagccctgggacctggaccttaggcgtgggagggacgaaagggaaaggtcttagaaaattcctcaggcgtggcttctgggggggcggggcggggggaggaaaggggcacgggttcccggtctcgtagacgctgcagcggagcagagcctctaggcatgccctcatctagagcagctgctgcggaatccggggagcctgcagcactagccgtgcgattccgggcgaggtttttaaactctcacctgttttccccttttgtaaactgaagataatgcctctctcccgggagtgggagcacgatgctgacacaccgtaggaactcgggacttgctgattctccttccttatcctcaaggcgtttgaagcactcctgcccctcacccccacccctccagcccctttcccagccctgccccctggtggaaaatcctaagagctacctctcaggagggctcctgtaaaccaggcactgtacacacacctttcatttcatcttcgcagcagctctttttggtgagtactgttatccccattttgcaaataaagcaacggaagcttagagaagtaacttttccaaatgtgcctcagctccaggcaaaataggaacctaggtcatctgatgccagagtcagccttcctaactgtttatgatccgacttccctttctgtactggattttctatttctgccataacagatgaccacagacatagtggctggaaacagcacccacttatcagctcacagttctgtaggtcagaagtccaggcttgatgcgactgtgtcctctgctctgttcccacaaggccaaaaccagggtgtcagcgaggccagcattctcatgtggaactcagggcccccttcaagctcctgtggttctggcagaattcaggtctttgtggttgtaggactgaggtcctcacttttttgctggctatcatctgggggctgctctcagctcccagaggtcacccacattccttgccgtgtggccccctccatctttaaaaccagcaaaggagaagccccctctgtctaattcctctaataatttgaatctcttacttcgggaaaagcccaatcccttcaaagggcttgtgattgggtcaagctcaccccagatgaactttctttcttcagttcagctctgccatatgacatgccccagtcatgggagtgaggatttcctggggttcctcagggggtgtataccagggggcaggaatcacgagggtgtgttggaattctgcctacttacaagtgccttctctgtccccagcatgtattctggtgttacattcaagtgtaacacctcgaatgcttcctgctaaccctaaagggccttgaggggactggggcagcctgttcaccaaccagtttggagcattttcctatgagtacagtcatatatattcccacagaagagtatacaaatatctccatatgagacataagcacgccctcctccattcctcttcctccaacttcatcccgtgtttcaaagctcagagagtggtacattttgatccagcatatcttagaaagtaggaaattgataaagatgcttgtgatcacagatagggagactgagtctgtgaaaagactcccaagccagtggtctctccaggaagccctgctgacccccaagcaaggctcttaccaagttgttagggccctgactcctgacattctagaccacgccatgacaccaagttttcctccctgtgggtgcgtgatgtttgacattcttcattcagaggtccatctaaatggatgtcacattcactaacgcatcatctgaaatacaacttcctttgattttgcctcttttgagtctttctccacttgtgttttcctatcaaagggattaaaccactttgctggacttgaagctctgtcttttccaaaagctttcatcatgtctcaacacagcttcccattcacagacacaggagaggatggaagaagagaagtatcaggcttgatgaggcttaataggatttgctcaagtcagtgcctttccctgcgtcc

SEQ ID NO: 914401 - DNA, 4001 bp, Homo sapiens
agacatggaggaaacttaaatgcttactgctaagttaaagaagcccatctgaaaaatttacacactgtatgactccaactacatgatattctggaaaaggcaaaactttagagaccataagatcagtggttggcaagggctgcagggggagggagaaggatcaataggtggagcacaggggatttttcaggacagtgaaactattctgtatgataatggaatggtgaatacatgacatgcatttatcaaaacccacagaactgaacaacacaaagaaccctaatgtaaactatggactttagttaataatatgtatctataataatatatctatataataataataatatataatatattattatatattataaatatatatgtttatccattgtaacaaatgtaccacactaatgcaagatgtaaataatagcggaaactgtgagtgagggagacccaaggtatatgggaactcgccgtactatctgctcaattttctgtaaacttaaaacttctcgccatgtgcagtggctcacgcctgtaatcccaacactttgggaggccgaggtgggcggatcacctgaggtcaggagtttgagaccagcctgaccaacatggtgaaaccccgtctctactaaaaatataaaattaacctggcgtggtggcgcatgcctgtaatctcaactactcgggaggctgaggcaggagaatcgcttgaatccgggaggcagaggttgcagtgtactccagcctgggcaacaggagagaaactctgtctcaaaaaacaaaacaaaacaaaacaaaacgtctttaaaaaaataaaagtctatgaattatttaaaatgtgtattgtggccgggcgcggtggctcacgcctgtaatccaagcacttttggaggctgaggcgggcagatcacgaggtcaggagatcgagaccatcctggttaacacggtgaaaccccgtctctattaagtatacaaaaaagtagccgggcgaggtggcgggcgcctgtagtcccagctacccgggaggcggagcttgcagtgagccaagatcgcgccactgcactccagcccgggcgacagagctagactccgtctcaaaaataaaataaaataaaatgtgtattgtgtgcatatgtgtgtgtgtgtacatatctatgcgtgtgtgtgccttttttcattcattaaatgccttatacactaaagatgctcaacaaagtactacatatacagtcttagctcaagagccaagtcaatatctcaagttctgttggagtgggcaaatccggttctgatcctagcgctaccattttctagctgtgtggcctaacttaacgcaagttacctcttcagccccagtttctccacctgcaaaactggaagaaaacacggtaattcctcctagggctgttgagaaattcaaatgaagaatgatgcatgaaaaatgcttagcacagtgcctaatgaaaaagaaaagctcgaaatgttcgctgactgatttggcacttgaggttccaaggttattcttactccactaccagcatatcaataataccccaacagggccccaaatcctcaacgccaacctgacccatttgaacacaatccacattgcctgagttccagcccctacacttcaaacattctttacttcccaggtgcttttttccttcctgctcggccttacaggctcaggccctggaacccccgcctctccgcccctccccataccacccggacccgatcccactcagaccccgcccccgcctcctcccagaccctggcctaattcgtctgcacgtctttccctccccaaagttaaagggggttcctacccagatactcgtagtccggtagggctaggcgctccggactcagcatcctttgaccggggtggcttcaaagctccagctctccggcttccggaacccaggttgccgtctctctccgttgccatggcacccacgcggcggaagggggacgggagctggaggaggtgtcacacaaacagtctccgtgtcgcaaagtggagctggccactcaagttccgggggcagtcgcttcacgatggtccaggtttctttggactcccattcttgaagacttggttttagaggaatctgagatgaagaattcttttgaatccgttatgtttcccagtgtcgaagaattactgtcagccgcccatatacgcagtttctgaatttcataactatccctgcttttatacactgtttatcctaactcagtaatagcccccgccctttggcccccataaacacttagtatcccattagctatttttatctctttggtatttactatcttaaattgctacaaagtgcttacgtatgcatataccctggatgcttctagaggtcagagatgtgtcttttctgcctatgacggctggacacacaaaaggtactcattaagtcctctgaactaattgccatttcttctcaattctcactcagtcgcccaggctggagtgcagtagcgtgatctcggttcattgcaaccagcgcctcccgggttcaagcgattctcctgcctcagcctcccaagtagctgggattacaggcgcccgccactccgcctggctaattttttgtgtttttagtagagatggggtttcaccatgttggcgaggctggtctgcaaactcttgacctcaggtgatccgccgacctcaggtgatccgcctgcctcaggcctcccaaagtgctgggattacaggcgtgagccaccgcgcccaggctcaattcctttttatctttggttcttctttctattcctagcccttactatttggtacctttcccaggtgtctttcctttttcctaccaagacattgctcttcttgagggagaggggctgcagaaacgaggacaccagttagatttttttccctatatgcccaattgctcacttcttctttaagagaatattcactggttttcaagttcctaaatatttcttttcgcccctctccactcctgacaacaggtcagagatctgtagcactagacacagttcagacatagcagaaaaagccactctgtcctcacttttttagtgccctccccctccaacaaggtgaggtttgtgaaaaagagacaaagaaaacaaaatcaagctatcaaaggaatgactgggaaaccagtagaccacctacactgggaggaaaaggaaagaggaggttcttctctttgtgttccgagtggcctattcttagcgtcctccagtaaggagcctcaaacctcctaattcttgctttcccttaaaattgtatatgtgtctcaattctaggctcctgtgagtcactctaagtttggatgtggtgaggttaaaaggacagagccaaagtaggagcagggcttagtgtcttgaggcaaatttactaatttggtatttggtgtgaagtccagcaaatctgatttttttttaattgccttcttatctgcttcccccatctagcttgaggttatgggaggttcatatgttccataactgtggctttttactattttattaataaggtaataccatagtaattattaagtgataattttactttattcccaagcaacttgtagctatttgcaaataatcttatttgtcctcataaaaactttctgctgaggtgggcggatcacgagttcaggagttcgagaccagcctggccaatatggagaaaccccatctctactaaaaatacaaaaattagccaggcgtggtggcgcacgcctgtaatcccagctactcaggaggctgaggcagaagaatcacttgaaccggggaggcagaagttgcagtgagccaagatcgcaccactgcactccagcctgggcgacacagcgagactccgtctcaaaaaaaaaaaaaaaaaaaaaaaaaaaacctttctaaggcacttttccattttctaactagggaaactgaggcacaagtcacaacagtgacttgtctagtgacttgtctagcatcatgcagcc

SEQ ID NO: 914402 - DNA, 4001 bp, Homo sapiens
aagggacttattacctatggtcacatagtaaataagtgtgaaagtcatattcagatattccatggatattcttctttttcctacttctgcccttttatttttattttcatttttgagacagggtctcattctgtcacccacactggagtgcagtggtgtgatcatggttcactgcagcctctacccccagggctcaggtgatcctcctgcctcagcctcccaagtacctgggattacaagcacgcaccaccacgcctagctaatttttaatttttttgtagagatggggccaccctatgttgcccaggctggtctcaaactccttttctttttttttttcaagacatagtctcgctctgttgcccagtctggactgcagtggcgcaatctcagctcactgcaacctctgtctcccaagcttaagggattctcgtgccttagcttctcaagtagctcagattacaggcgtgtgccaccatgcctggctaatttttttgtatttttagtagagatggtgttttgccatgttggccaggctggtcttgaactcctggcctcaagtcatctgcctgcctcagcctcccaaagtgctaggattacaggtgtgagtcactgcatccgaccacttctgccctttaatttattttattttattttattctattttattttattttatttttgagacggagtcttgctctgtcacccagggtggagtgcagtggtgcaatctcggctcactgcaagctccgtctcctgggttcaagggattctcctgactcagcctcccgagtagctgggactacaggcacccaccaccacgcccggctaattttttgtattttcagtagagatggggtttcaccgtgttagccaggatggtctcgatctcctgacctcgtgatccacccgcctcggcctcccaaagttctgggattacaggcgtgagccaccacgcctggcacttctgcccttttaaataaacattgcttcaaagttgacttgcttgatctaagaggcaatattatgcagtggttcaaaaggtggcctctgaagtcaggtgggcctcagttggaatcttggtttacttgcttaccagccatgtgaccttaggcaagttagttaatttctctgagcctcagtttctcagctgactgtaaaataggaggaggggcaaaaccatttacctcataaagtattggaaaaattaaatgagactgtaaaatgtctggcacatagaaagctctcaagtgctacaattattactctcatccaggaagaaagggaaagaaggggaaagggaggaagagggcacagaaaaacaatgccggttcaatattcctgccctgctctggccattccgcagacagctagcttggctctgtttttttttgttgttgttgttgttgagacagtctcgctctgttgccaggctggagtgcagtggcgcgatctcggctcactgcaacctccgccttccggattcaagcgattctcctgcctcagcctcccgagtagctgggactacaggtgcgcgccaccatgcccagctaatttttgtattttcagtagagacggggtttcaccatgttggctaggatggtctcgatctactgacctcgtgatccgccggcctcggcctcccaaagtgctgggagtagaggcgtgagccaccgcgcccagccacttggctctgtcttctaaggcctcctgaaaggaggtgctgctctggtgttggaacaaggaggtaccaggcagaggaaggtggcagtgggaggctggcagacaactatctccaggtcctctgattttcggggcctctacatccaccaacagagatagatgttcccctttgcccttccagcctactcaccagcttcctccgcagcagacccggtttcccatggcgctctgtctccaagggagcccagctgtttttatgcatcaagaggcttgtgcatttccgggttcctggttgagctttccgcggcagctcccggagtctgtgtcagtgtcagatttcaacctagcaggttggacttttgaagccacctgctggaatgattcccaggtgactgtgttcccagccaaagggtagaacaacacacgggctccaggtgagagctatctcaacttcaggatttgaagcgtcttttgatgaagccatgaacttgagcttcaagcttcaataaaaagaaacctgagatagaaaagggctcttggtttccttacgaaatgcttctccattacatcactctgtctttgaaatatatcctctataatagatgagtgcctaatgtagtagtttgctcagcaccactcaggtttaactgagtttcactttcgaggcaattggtaccagtttcttattatttttgtacagaatctgggttgggatactggagtctcttggaaacttaagtttggggaaatgggttcctcatatattctcccttgctatttgaaatcgatgtgggcaaatcacttaacctttatagggcctaagtttctagggctgtgaaatgaaaaaaactgaatctaatcccctttctggtataaaatcagatgattctatgatcaggatggcctcagcacttcttaaccactcatttccttatccacagttcagaactactgattctccacttacccctcaactctgcgtctccttccagtaacccaaagttagactcacccgcactcaccagtagaaaatatgggctctacgagaatctgtgaaacccatcattcttgtgttcagttctctcaccccatttttagtgttttcctcggatgcctggttattgtcctttaagtggatgttcagggcccaccactcagctctgcactccacagagaataccctggactttgaactcctcctcttatgaaacatgggtaagagtgacaatcttacaggattgtggtgaaaaataaagctctagtgcagggcctggcacatgggacacactcagtaagagttaggcattgttgttattattacaaagcatcttattttctttctttcttttatttttaaagacagggtctcaatctgtcacccaggctggagttgagtggctagctcactgcaacctcaaactcctacgctcaaaagattctcccccctcagcctctcgagtagctgggactacaggctcacaccactgtgcctagctaattaaaaaaaaaaaaatctttttagagacaaggtctttttttttttttttaaattaatgtgagatgggggtcttgttatgtggaccaggctggtctcgaactcctggcctcaagcaatcctcccatctcagcctcccaaagtgctggggttacaggtgtgaggcaccacacctggccaagatagggtcttgctatgttgcccctgctggacttgaacttctggcctgaagtgaccctcccaccacgcctggttcccacatcttactttcttttcttgtgccccaatcattgcactatttcatggccatgcttcttccatgcaatccattctgtactctactctaccattaactgtatccttttcatcttgttacccactccttctcctcccagttcaaaagccattaatgatttcctatcacctacaggatacagttcaaactgcttagcctggcactccaagccctccataatctggttcctttttagtcaccccttctgtaatgttttaaaaagcacctaagcagctgggtttacacagtggcttggctcatgcctgtaatcccactgctttgggagactgaggcaagaggatcgcttgagcccaggagttcaagatcaacctgggcaatatagcaacaacccatcatctctacaaagtataaaaactgaaaaattagccaggtgtggtgatgtgtgcctgtagtcccagctactcagaaggctgaggtaggagggttgagcaagaaagtttgagggtgcagtgagctgtgatcacaccactttactccagcctgggtgacagagtgagactctgtctc

SEQ ID NO: 914403 - DNA, 4001 bp, Homo sapiens
ctacaccgggctaatttctgtatttttagtagagatgtggtttcaccatgttggccaggctggtctggaactcctggcctcaagtgatctgcctgcctcaatctcccaaagtgctgggattacagtcatgagatactgtgccctgctgtattgatatttttatcacacaccccaggtgattctgagcaggcactgtgagaagcactgaactaggagcagacaaggagccaattattcagacttctctgtagcagataagctccatttatttaactagaagagaggtggtggtttaaaagaaaggataacggctgggcgcggtgggtcacgcctgtaatcccagcactctgagaggccgaggcaggtggatcatgaggtcaggagtttgataccagcctggccaacatagtggaaccccttctctactaaaaatacaaaaaaacacaattagtggggcgtggtggcaggcgcctgtaatcccagctacttgggaggctgagacaggagaatcgcttgaatcgcttgaacctgggaggcagcagttgcagtgagccgagattgcgccactgcacaccagcctgggcaacagtgcgagactccatctcaaaaaaaaaaaaaaaagataacataaaatatgcaattaaaggtgttcttgggtgggaggaaattgaacgttcatttgaaatatgtctcaggagtttgattttggagcagagttgaacatggtgccaacattctcagcatacatgctggaagaaccagtacctgctgcgtatcagcccctgcactaggtactggacatggttgtctcatttatttctgttcatctgctctcatgctctgcacccagcaggtgccaacagatgcctgacattcatgtgattatattttacttgatagaataggtgtttatatgctgatcttggtaaccaaatgatattgccattttagaatcatttctggagatctggtgcaactacttaaacatttggggtatacagtagaactatttataaagacatggatggcagataaagattttagactcagaacatctcctactaggattttaaaatctgattttgcatgttacacagaagattttttttaagttatctctgttgggtttagagtaacaattacgtggatgaaggtgagtattattcccaccaaccaagcccttggtaatccatggcttggggaaatgaaaaagtcaggacacaccatcttttaattgccatgaactacagtagccagccagtaagatcacagagctcctggcgcgcctgctggctgctaacagacgtgccatgattagagatatttacagctggaagggaccccagaggtcattttgcctaactcatttcatattgggtccagaagagtaaaatgactttcccagggccacatgactggttcccggcaagggccagggcccctctctactggtgttcctccactccatcaggctcctcagtcaggaggagcaccagcatttattgactgtgatttatgtgatttacatgacatccagttatgagggaataggaattctgtttccaagggcatatagtcaatagcagatgaacaaagcatgaaaactctttcaaaaagggcatgaaaactctttcaaaaagggcaggaaaaccagcattaaatagactaggatgagattgaagtagagggagtgtaagttaaggtgtaaatgctggcaccactaagtgagagaaagattgtctgtcacagaataattctatactgcgtgccagttaaaggaaggctttgttttgagaataccagacccaggaagtaggtgattggtgtgtggataaagggagaggagagagaacctgcaagcacctcagaatatattaaattgggacttacattaagtcttgagttacttgtctgcccggatcgtttttctgccaggagatctttgactgtatgcttcactctcactccttgatacactcgtttgctgtagtctcctgggacttaagcaaatggaatagtcacaacgaatgtggatggaatcattaggttaagctcccaaaggacatgtttagggggctgatcattgtgatgtcattttcttgatagaatgatagaattcctggatttgaagtggctttgatagagtagcttcaatagagccgtgtctcctgatctttgatagagactcatctaagctctactaagtgacagaaacactgttccatcatctacacaacagctcttcaaagtcccttccttgtactctgacttgtcaagatttactctggcaaggtttacaaattatgctttaatcacaagtccaaggattggatgcaacttgaaatgatgcttctaaatacatgaggtagaagttagatttgtatgattcaggttacagcataacagtattcctgccctattatacctgatgggagtgagcaggtcagcaggagttttaagaagattacgttcctaagaagaaagttgtttgttattggtttactgcactaaataaatgttttgtttttgaaaatcggtgattcaacatgaggagttactgcttcaaaataaggccgaggataaataaggaatcattcattcatttaacaaatatttattgagcacttactatattcacttcctgaagatgttgtagtgcttggcaatttacatgtattgcttcatttgatctgttttacagatggggaaactgaggtctgcgactaaattatttgcaaggtctcacagctacttataagcaatagagctggaatccagacttaggtcggtttgtagtatcaacaaccagaaaaatatgctgttttcaccatgagggaattacagagagataacagactatagagtaaaacgtttccccaaggttctaaaattgacagcattgcttctagggatagtgagaaccttattactgaggatggtgaagaaataataagagaaccttttgtttggcctattctagaaagcatttatacactgtattagtggttccactagaggaattctaagatgttttctaactataattattataattgttgttctgtagtaggttagacaacttccatttaattaaaattaaatacatgatagttgaggtgttgctggcttaccagcaaattcagctggtacagaattcagcatcagtgtgtatggcagaatataaaaacaaatgtacgtatgaggcacataaccaaaattattctctaatctggttgaatttgtagatagtccagaatatatttgatttgtgagtcaaattggattgtaaaaagaatgaaaggaaggaagaaaggaagaaattaaagctacaaccagaggtagtatggtgcattggagaaaagaggttgctggtaatcacagttacacattagtcactggcttggaacaataataatctctcagttccattttcctcatgtgtaaaatgggtataatcacctcttcttagctgtcttcagaggattagaaggcaaaaataggatatacatgtgaaaattccttgaaagctaacaagcttcatacaaaacaccgatacaaaatgaagaagaaaaacaaatccaggttccaagacaatgtattatttaattcaagtaaagccacatgcagccttatttcagcaaaacaaagttatttgaatcatcatttgtgtctaattttgacaggatttggtccatatatgctataattaaagaagcttgaaatacttctttgaaatcagcctcaaatttaaagcttactgatcttatgattgttccaaaggaatctaaatgttgcttctagaattgtgtgtgatgctctacttttggaaaagcctaaggtcacattgatttattgattattgattgagtgttttctgtgtgtcagaactggggatacaaaagaacatggctatctagtggggagagaaatactttaaaataaaataattgtgatgcaaacgtgctaagtgcaagaacagaaatacacctaggatagtcaga

SEQ ID NO: 914404 - DNA, 4001 bp, Homo sapiens
aaagcgctcgctccggctccagcatctgctcacccccacgcaccctcccataaagggtggagcgcagcaggcctgggtgactggagttcgtggcttccagcactccagttcccgcctcattcactcgcgccccccctcccgcgaggagttgagagccgtgggctaagtaagtgaggcaccgcagccgcaagacccacgaaggggtcagaggaatatcctgcttcaactgcactccagcctgggtggcagagcaagaccctgtctctataacacaaacagagaaataccaaatgtggccgggcgcggtgattcacgcctgtactcccagcactttgggaggccgaggcagacggatcacttgaggtcaagagttcgagacctgcctggccaacatggtgaaacctggtctctactaaaagtacaaaaattagccggttgtggtggcgggcgcgtgtagtcccagctacttgggaagctgaggtgggtggatctcttgagcccgggaggtgggggttgcagtgagctgagatcgggccacactgcactccagcctgggcgacagagcgagactctgtttctaaaaaaaaaaagaaaaaagaaaaaatacaaaatgaaatgtgaaatttcaatgattctgcattaggagttaaatgttccttccctttaatagcacttttccccttctttttgaacaagggacgctgcattttcattttgcattgagcctcacaaattacacagctaggcttgctgctgaatacggcagtgagggacatgccataccagtcctggagcttcgtcattgcccagaccctgtggatcaaatgcagtgggctgcctaaaggatcggactttttatccccggaattgtccaaactatggagcaaagcaggtaaagagaccagattacttttaaggcccgttcaatcctaaaatgtgaactataaaataagactagacagctttactgatttttgtggtttatcatatgaaaacagaattttgaaagcggaaaaatcaaaccagttcattcctttttaaaattactttgggaggccgaggcgggaggatcacctgaggtcgggagtttgagaccagcctgaccaacatggagaaacccccgcctctactaaaaatgcaaaaattagctgggcatggtggcgcacgcctgtaatctcagctactggggagactgaggcaggagaatcgcttgaacccgggaagcagatgttgcggtgagccaagatcgcaccgttgcactccagcctgggcaacaagagcgaaactcggtctcaaaaaaaaaaaaattactttgggagaaaaaaaccccaccaaaactaaactagtttacactgtttaatcttaactcaggaaccggtcaaggaactaatggtgtggggcaggggggatgtaggaggaaacttaggaaaaacaaatcctccacaggtctcacttgtgacatgttagccaactcctgggaggcagaaagggtgagcttacgaaacaggtgcaaaagtggggaggagacctgggcgtgctatggaataacactggcgtccagcacaaaggttacacacttcgagtcatggtcaaagaatgagccttctccaatattttaacacacaagggtttctgaaggcagaaatagacaaaggattacaaaacactcaggcacacatcccacccgtcaccctcgccacacacccgggaccagatttagaaagccaggcgacagctcagcaaacgcgagaccaccggaaacgaaccgggctgagaggctgtttcctcacagttctcatccactcacaagtgaccgcacgttttgtttttgttatttgccgaaatgttcttggctattccactcacctaaacggtcacggtagcaaaacacccagagtccggatcttcgcctaggccaaccccgcctcctcagaatacgcgagctagagctccgcccacgttagtcagtcctccctgcgcggcgagaaaaatggcgcccccacgtcgcgtctcctcccaccgctcgccttcttcccggaagctaagttgtatcgcgagatttcggcctgactattacttgggccacggaaatagccaacccttttcttccgcacggttggaggaggtcggctggttatcgggagttggagggctgaggtcgggagggtggtgtgtacagagctctaggacaccaggccagtcgcgggttttgggccgaggcctgggttacaagcagcaagtgcgcggttggggccactgcgaggccgttttaggtaggttgctaagagggcgaggccgtccgggcctggcgggcgggggaggcgttgcatatctggggtttcccggggccccttcgttggtccggaggatcgagactccgaagtcggtccgagagggtgaagggatcacggccgcaggccactccgcgccacgcggctggtatgagtcccacacaaacgtggttgtagtgtggacgggcttcattatatcttgagatggaggtgttaaatcgtgttgcggacaagtttaaccttattacgtgatttaaatgatttaaccttcgtatgtgaggtacccattactcgcgccggttttctgcaggttaggcgctgccgggtgagaggcgctggtggtcacagcgttagctccgggtaaagcgccgctctctgcccacgtggcctctaagaattgcagaatccccacggaggcatcgacacccaagtaggagtgtcttctaaacacttcgaaaaagtgattattgagctagctttattttgataatccctacttttaaaaaaaattaactacaggtataccgttaaagcatgggggcaaatttttgttgaattccgtttttgagcattcgatatttaatgactttgtagaatcttgtacttaaaaaaactagtaagaccttgtaccaggaaaataccacagggggcatttaacaaatctgagctcttggtgaccttatcgtttcatattttaaatattttgctagttcatcctaggatttatatgtaatgactcatgtcaggtcccaagaagctacagaatgagacaagagattgactaaggcatgtacaataatgaaataagtagttatctttaatttttgttgccatgcctttttttttttttttttttttttttttttttttcctgagacagggtcttgctctgtcgtccaggctggagtgcagtggtgcaatctcggctaacagcaacctccaccgcggcttaagcgatcctcccgagtggctgggagcaaaggcacgggccaacacacctagccagtattttaagaattttttgtagagacaagggtctccttgtgttgctgaggctcactacatacaagctccacctcccaggctcaggtattccacctaccccagcctcctgaccacaggcgcgcgccactattctggctaatttccgtattttttgtagagacggagtttcaccacgttgcccaggttggtcttgagctcctgggctcaagcgatccgcccgcctcgacctcccaaagtgctgtgttacacaggcctgagccacccagaccaacctgtttttcttttttcttttagctcacaagaaggaatctttttctttttttttttttttttttttggtatgttgtatactctctaccatggggatgaagacacaagaattatgatagttcattgaaaaaggttgagaattcagaacttgtcagtttccaccaataatggcaaagatacaatatgacaaagttcagttgcttaaatgaatctaggaatgaagaatctaggaattataatggagaggtgattaggagtttaaaatggtttattgattggagatccttttcctggtttatatagggcacactttgctttaggaattccccctttgatcttggaaaacggcttttaattgtacattaatactgtattggtaattgtacgttaaaatatgtggctaatgataaaactacattttttacttatattgaa

SEQ ID NO: 914405 - DNA, 4001 bp, Homo sapiens
tgacaaaccatctttctaaaatataactatgatcatgccacaccctgtttaaaaacatttgatggcttctttattgcctagaggaagaagtctcagctccaaacatcacaatccaactctaattaccactgaggccttatcttctgccactatcccctaccttccctgctttctggataaatttcttgccatgccccaagtgattaatgctctttctcgttgccatattaatgcatgatgctgtctatccagaatgatatttcatacctggtaaacgtatacctattcaagaaccagttcaaagatcagcagctgaaataccactaattctgtaaaatcttttctaattccccagtgtagattttattatttcctccttagtgctccaaagcactttgcaaatatctctgttatacagtacttatcaaactgtattataattatctattttattcatcattttatttcctactgtgtacggaagcttccaaaaactagatgacaagaatattctttgtatctcccagttgttccaaaataatgcttggcacactgcttgccttcagtaagcgttgaggagtaactaggttgtacctcccaccttattgtgagcatctgtgtgccggatgacattcctcaggaggaccttccccagtggaatccgggacattcttcaatctgaaatgaatcaacaaataacgtttagtaataatttctgttattactttatcttttcttgaagttttataaagaagcatatgaggtacaggaaagatcactgaactagaagtcagagattctaaagaatagttttccctttaccattaaaagagggaaatgcctaaacacactaatgtgagatgaaaggagataatgtacattaaagttctttgaaaatgcacaagactacataaaattaagtgctttcatgagcaccattttatttaatcctcataactactttttatatgaggcaagtatctccatccctattttgtagatgaagttcccttaaagctgtaacgtcccaagccacatagtcccaggcaaatgatgtatgtcactgtctaaattaaaaatcaaacctccaatcccaatatagtttgcactgaagcaaatacgtagatttgagagtgtcaggaaccacgggtgtcaacagtaacagaaactgattactcaaaacatcaaatgcaaagatgtcctaaatttctccatttgggggcattttatttcctacttgctacggaagcttccaaaaactagatgacaagaatattttcgtgtgtagctagcaggagctttgtgcaaccaccccaacgctcactcaccccttgatcctgaggaaatcaggcatcttgctagtgagacgaagaaccactccattacaagatctcctccgacccaggaagccaaggagtcagggctcaaaggcagctctgcagcttcacccgagtccttcgtgaaaacgcagccttcccactggttactctgccctcacctgtggcccaggccactgccgcgtttcccccagcccagaccgacaggcagatctctctcccggactgaggccggaggctgagccggggcggaattcggacagcccggttgacctgggcattccccgctcacgctcctctaggacgaaccccgggggtaagtttcactccccagaaaggctgggaacgctttggatggctacggccttcggttgggccccagaaagtatctagggagcctgaagcgggggttgaggtttccaagtggaagacagaggaaatatccccatctttgtcaccgggatccctgttccccagcggcctcggagctcccggtaaccttccctccaaacgccctccccacacaaatacacacaaacacacccataccgtgcgccgcagcctcgcgtggcggggggtaggggggaagaagtggtttgggagaaaaaggaggagacttccttttcaggccggaagtcgtgctcctgagaaatcgtcccaccaacaggcagcccagagactcccacaagggagggttttcaggacactccagaggttgacgggtgcagaaggaaggcgggcgctttcctggaagagaagtgggtcaggcccaactgaaaagcaagcctggcaccagaagggggacattccggaactagatatgaagagacttttctccctgaagttccccggacccaattagatgttgtacccaggctggttaccctggtaacaggcgtcgcggtttgtcaaggaactgagagaagaggtgggtttgccaacctatagaatgattacccgttagaactgagagaagaggtgggtttgcagacctatggaatgattatccgttagttaagtttcccgtttagcataacccttacacagtaattgaagaatctaaacctcttttcctcattctaaagatgctgtgggacacctctccaatgggagaagaggctaaggagatttatctgaagacgtagagaagtgtcccagcctctctattagcttacttaatctcgcaataatcctatggtagaggtattatcgtcttcattttgaacagaacattaattgctcaaggtcacagagctagtgagagatagaactaagaccggaatctaggcattctggctcacaagtccatgctttgaaatactaaactatactgaggattaaggaagtcttatgtggccctcaccccacaccacacctctggcaatttcagaactggggagccaccagtcaggtgttggaacaagaagatcaggaaacccagacttaaaatgattactctgacttgtcagggtccaaatagaagtaaggccttatctgagaggacaatgtgagaatttaggaagaggtactagataattaaagaataaggaaaacataaagtggtgctgatccacaaccttttagacacaaatgctgtcctaacttcaccaaaacaattcctgacccattccacctccccaaagcagaaatgaatcaataattacacagacagttttcttcctgaagtcgtgtttttccacaggcttaagaaaattattcaccactcataagtcatggagacatcctcaaaaggtctgcttacccaagttactcagttttggaacctcctagatgatctagctcagagtgaccctgagggctatgagaagtttattcagcagcagctgaaagaagggaaacagctctgtgctgccccagaaccacagctttgtctacagaccaggattctggtatgtcgagttggtgccagggatggggaggtcttgaatgaaatgatcccagaataaccagagaatactttacacttaggtattgctaattttttttgttttttttttgttttgttttgttttgttttgttttttgagacagagtcttactttgtcaccaggctggagtgcaatggtgtggtcttggctcgctgcaacctctgcctcccgggtttaagcgattctcctgcctcagcctcccaagtagctgggattacaggtgtgtactaccatgcccggctaatttttgtattattagtagaggcggggtttcaccatgttggccaggctggtcttgaactcctgacttcaggtgatccacctgactcagcctcccaaagtgctgggattacaggcatgagccactgcgcctggcagactttttttttttttttttttttttttttttgagatagggtcttgctggctctgtcgctcaagctggagtgcagtggcacaatcacagctcacaatcacagctcattgcagcccaagcgatcctcccacctcagcctcccaagtagctgggatcacaggtgggcatcaccacacccggctaatttttaaatgatttttgtagagacagggtctccctatgtttcacaggctaatctcgaactcctaggcctcaagcaaccctcctacctcagcctctcaaagtactagggtaacatacgtgagccaccaccccagtctggattcctaattaaaagcc

SEQ ID NO: 914406 - DNA, 4001 bp, Homo sapiens
aaaaatacaaaaaattagtcgggtgtaatggtgcacacctgtagtccgagctactgtagtggtggtgggggaagagggggttgaagcaggaggatcacctgagccagggaggtggaggctgcagggagcactgatcgatcgtgccactgcactccagcctgggcgacagagaccctgtctcacctgtctcaaaacaaaaacaaaacccaggtacttaaagatacgcttatatgattgggaaaggtcttcaaggtcgtctagtttaaaccgacctcttccgaagctgtaaacttaatgacttaatccctttaactttgttaaatttcatatcacctggagttttctgtcacgctaaaagatatttccaaacaggtgtctgatatcctagcaatcaagtcacatttaaagatcaggaggaaaacaatgtaacagctttttaagtggcagccaggttactcaaaagtgtggatcaattcctgacaaaacctgaattaccatattaacaagatctaaaatccagtagcagaaataacagagagcaagaataaacttctctaggtgcccattcatccccaaatctttactgattgctaatctttctgcagagctgaagtcgattcctttaaagatccttaatattccggtcctcgccccacctcccatcagaggggtaggtcttaacattatctcatttgctacaaagtagtattcagtgggcttttaaaattttatgaagagcgttgaaatgcactatcgaaaaatttaaagctctatgtattcagaaattgacagtactttaaacaaaaccgaaaaaaaacctagatatcccttcatcttccttaaagatgacctctccgcgctctctccaacaattttccccatcaacgttgccaagacacttatccattgtatgaaggacctagttttacgtttactggttacctaccgtttccatgacactgggctaggagctaggacaaatatacaaaaaggcctaaaataagcatcatatttctctccgaattcccaacacccggcagtgcagtaaatatttaacgggttactttaagggataaaccgtttgctattaaaacctatgaggtgagggctgaggaagggaacggcatttgatggggagacgaggtaagaagaacgaggtattaatatccgacatcaaaatgggcttctaggtctcaacgtcttagacctcaccaccagagccagtaccaaattacacccgtggcacaattttcggctcaatactgttctcggtttacccttactagtgcagctaaagttaactctcaacagcacattgtaaaaatcatccaggcaggaaaaatctgtacaaacgtgcacgaacatttcgacattgtcacgggaacatttagaacccaaaacagggagagtcttgccgtctctatactgagtacaaaggcccgagaaagcactctcatcggccccccaaaacgcacgtacgaaatcccttgactaagctctttcactcctcgaccctctcagaatttccttcctcaatcccccttcctacgcaggtctccggctctcagcgtgtgggcctcttcaaaccttctgaccctcataaagattaagggaggcatttcccactcattcttctggtttcttccctgggctctcccgctgcaggccacctcaggcgcgtcctcctccaaccacccttcccggcctactccaggctttagtaggcctcaaccctcagccactccgccattattatttacatcgtcgtctggggaggctgaacgcttcaccccatgcgggtgagactctctggcagcactcatccttgcggggatcccgacgaaaaatgccgaaccctctcgccgctcttcccagccgcaaaaccagcagcttacaatccgccaagggcccaagcagcgccactacagaacgcagagcccctccgggccttctctgccacagtcgtcaccgttgcggcccctcgccgccccggggcactttgggagttgtagttttctgattcattgcatactggcccgaataaaaaagatgtgtccgtgactaaaactacaattcccaggaagccccgaggctcaattcgcgctgtgtggcgggagtgccctcagaggccccgccttcggctggtggaggaagcgttcccgcggatgtgtatggcggtgagcgttggccgagagctttgtcgccacaggaggaggcttagaggggtttttgcctttcaccgtgcaacgctgccctactggcaaatgtatcatcgtagctaggcacctatgtttaaatgtaatgtttgaggctgactgaatcctcacgaataccctccacccaggacaaaaaccttaaccaaaaatggcttctaccatttccaccctggtgttctctattgcgcgcaggggatttctaggtggtcggtgatgctgctttctaaatgttttcatgaatatttcgctgttttcccatacagaaatgagttcagtatgttgttaaatgttggctaattggcggttgttgaaaacggggatttagctgagggaaatctgttaagttttcatatggctttgtgtgaggtgggagtgctcctcactgacctcgctgtggatgtctgggcaccgttacagtaggggccttcaccaagcaaagtccatccctgccacaaaagcctctattttttttcttttttaaaaaaagtaattattgaggttaaattcacatataaaattaaccattttttaaaaagtgtacaatccactgtcacttagtacattcacaatcgtgtgcagctgtcacctctgattccaagaagtttcaccactccaaaaggaaccccaatgcccgttagcaatccctccccatttctcgccctctctccagattcaagtgatcactcctctactcaaaaagccctgcatttaaagctatttattgttcagatactgaagactatctcctactttattaaggtgtctgaatttgtaaccaggtctgaacttaactttctgtcagaatccttgtccttaataattctgaagctttctcaccttgaatacaaatgtgattttttttttttttaagcaaaaattaggcctggcgccatggctcaggcctgtaatccccagcattttgggaggctgaggcgggtggatcacgaggtcaggagttcgagaccagcctgatcaacatggtgaaaccacgtctctactaaaaatacaaaaattagcctggcatgatggcacatgcctctaatcccagctactcgggaggctgaggcaggagaatcgcttgaacccgggaggcggaggtttcagcgacccaagatggcgccactgcactccagcctgggtgacagaacgagactcggtctctaaataaataaataaataaataataagtggtatggataatacatatctgctgtttcagaactgagagcagtctgtgaaacaatgcttagctattagcttttgaactcagcaattgctctagtttcactgcctgtgtacaaatattacttacctagatttcagatcctcactgaactgtgaccagtggaaggtagtttttaaatttatgcagtcatagattcaaattctcccttattttggaagcagaaaaatagcataatagtaagtactataatagaaaaagagatgtcagggttacattttataagtataaccaaacaaagaacatcttaatggttctgtggtaagaataaatcataaaggaggaggagagtaaacccaagagaaaaaaaagaaacattgttttaggaagtggttgattgctttttgctagaattaaaatattttcactactacataattctacttaggttctattagttacaatgaaattacatttaagttacagagttttgcagtttcgactacagttcacctctaatgggtttgacaaatggtgatttagaactattagctatattaccaaaacaaataagatggctgaataggtactttagactgcta

SEQ ID NO: 914407 - DNA, 4001 bp, Homo sapiens
tggattgtgcttcctttcatctctacctagcatttctattttggtctattttctatctcactgcctttatacccattttttttttttctgtgagtcaggtaacagaaacctttaccattagaaattgctgtaaaatttgtcttaatggcttgctcttgttcttttggcaaatcctaactttaattaaatgacacaaccttattactattcctaggattgcttataatgttgaccttgttgctaatgtttgcaaggagcatcatcaaatccttggaggaaagcaccttaacaaacaacaggcaaaagggaacgttcatatgtaaatacacacgaagtgagttttctattgaactcgaagtctgccctgttggtagactaacatattattctctaatattacagactggtttgttgtattattttgtctcttatttttaaaatacatattgcattctgccttattattttaattgttgcttttttaggatgtgccaagaaagcagcaaatctatcaaatactaacacattttaagtaaaagagattgtttaacaccggttttactggaggagctaaggtcactgaatttgagatcctgaagagcaagcttaagcgttatagtgcaacttagaattactcttaaaataattcagtcccttgaacttctcttcttaaatgaaataggctaagctttcttggaatgaataaaaaataaaacagtaaccacagaagataattttgctgatgttagcagattcctgaagtttgctaaagtatgcaaagagcaaagccaaacgccacaaaagctgggttttctgtggaggcctgatcttaccaaaacatggggtggaagaaggaacagctgacagcttgaataagttagaaagtgggcgtttaaatttcatgaatgtggctccctcctcccgtccagtgaaaaaaaaaaaaggttgtgccgctgaaatttctgaccaagagaggtgactagtctcctgaataaacaagacagcgatagatccgatggcacctagggactaagaagcggccagctccccagggatccctgcagtgggtctagtccactagcatgggacaatcgaactttctcctggaggggaaaaggaaccctgcttgggctcaccaagatgaatcgtaaagaaaaaggaacgaaccctggtttgaaacaggccggaagctgcccaggggaggcgttcggttttctacctttgcttgttcctgaggaacaaggcctgtcacaaggggcgtttggaggtccaggaagtgacaagtcggcgggcctggtgcccgggaccggtcctaattgaccgggaacagggctgctctgggtgcccgggcgccgaagcctcgcatggcggccccccagccccttgtcgcggcctcgcccccttgtcgctccccactccgtcccgaaggctcccgcgccggctcctccccagcttgcttgggtggtttcctgccgtccccatccccagtaagcccttcccgtttccctccccgggcgcgccgcccaccccagatccgggaggccaccgcccgtcacctgcccggcgctcctccgcggccgcgacccggacgggccccgcatcctcccgcgccgccgccgccgccgcccgggcccccgcccgccccggcgctgccctggagaccgcagacaacacagacgccggcgccacatgggcggggcaggacccgacctaggatcccgcgtcccgaaccgcacccccggccctggcacggaggctgcaaacggccgtaataacgacatcggggcagagccggaggagcccgaacgccccgggagaggctgcctcgccgcccggacttcccagcgccggagggcagaggccacccgggggaggagatctttgccacaaataaaactactaaaatacgcgaggaactgctacaaatcaagaagaaaaggaacccaattaaataatgggtaaatggaaaggtatttcacaaacacacgagaaatctaaatggccaataaatatctgtttattgaaatgatgctttaattcattaataatcagaagaaggccaattaaaaccacagcggataataccacactcaccataagttgagtcgaaaagtccaaagttgaaacgtctggcagcgtcaggtgctagggaggacgtagtgcaaagaaccgtcaccttctgcgggcggacgtgagaaccgatgcaaccaaccattttggaaaatggtttgacattagccaggatatgtatgccttgggatccagcaatttcacttttaggtatttaccctaagaagtgcgtgctcctgtgcatgcaaactggaaataactgaactatccatcaaaagaatggttaattagattatgctattgcctatactggcatactacatagcactgtaaatgaatgaaatacaactatgtgtaacaatatggaggcatactaaaaacacaattttgaacaacaacaaaaacccagaaaaagtacatactgtatgatttttgtatataaaaaacaggctaaattacactctacagtgattgtggctccatacttagtggaggaaactatgaaaaaaagcaaaaaagcaattttatgggaaacactacccacttagtgattcccatcaagttaggattgtggtcggttctggcaggtagggagaagaatgtttttgagactgtatttcctgaccttaatgatggttatatagatgttcatcttgtaaaaattcattaagctgtacatttatgtatgggtagaatatttcactatcaaaaaaggtttcaaaaaagaataaagaaaggaagcattaggaattatcttcacattaaaacaacaagtagatttgaataactaccttcaaagattggtttgaggccaggtgcagtggctcaccctgtaatcccagcattttgggaaaccgagctggaggattgcttgagcccaagagttcaagaccagcctggggaaaatggcaaaaccttgtctctacgaaaatttttaacaattagttgagcgtagtggcgcgtgcctatagtccgagctacttggaaggctgaggtgggaggatcacctgagcccaggaggttgaggctgaagtcagccaatattgtgccactgcactccagcctgggtgagagtgagaccttgtcaaaaaaaaaaaaaaaaaaaaaagagaattcttcggccaggcacagtggctcatgcctgtaatcccagcactttcggaggcctaggcgagtggatcacctgaggtcaggagttcaagaccagcctggccaacatggcaaaaccccgtctctactaaaaatacaaaaatcagctgggcgtggtggtgcacgcctgtagtcccagctacatgggaggctgaggcaggagaactgcttgaaccggggaggcagaggttgcagtgagctgagatgtgccactgcaatccagcctgggtgacagagcgagactccatctcaaaaaaataaaataaaataaaaaaagaatgcttcaataccagttgcctcattaatgataggaaacacaggaaattggaaaatgtctttactacccagctttagcactttttattctgttttttatttgagttagtttttttttttttttttttttttttacttttttggcagcagggaccttgtcttatgagtacacagtaggacctcaatgtctgtagaagaaataaaagcaacgtagctgaaaccattagtgttattctgcccagtatattatacaaggtattattatagcaactgcaaacatgcaagcaaatttcaagcaaaaggatttagtcctaatagtggcttccagaatatgttatagaatcaatgctgagtcattcacacttgtctacttttgatgctgtggttctttagactcttccagtgttttctgcactatccagaagagattttaactggcttttctgaaaattagtggtccctacgtgattcaggagtctgtcaatccagcagctacttgcagagac

SEQ ID NO: 914408 - DNA, 4001 bp, Homo sapiens
ggcactgcttcagtggagtaagcagggaaggaagtttgggttgggttgaggaagtgggaaagttgagacagtaagtacagtagtaattctttggagtgctgtaagggagcagaaaaatggggtgtagctagagagtgagaatggattaaaggtttttttttaaaaaaaaaaggctgggcgcggtggctcacgcctgtaatcccagcactttgggaggccaaggtgggcggatcatctgaggttgggagtttgagaccagcctgaccaaaatggagaaatcccgtctctactaaaaatacaaaattagctgggtgtggtggcgcatgcctgtaatcccagctactcaggaaggctgaggcaggagaattgcttgaacctggcaggcggaggttgcggtgagtcgagatcatgccactactccagcctgggcaacaagagtgaaactcggtctaaaaaaaaaaaaaaacaacaacaacaacaaaaaacgacagattctaaagcatgttaaaatgtaccatccagtagtgagggagaaattaaagtgacggagaacttaaaggggcaaaaaaagggataagttaaatggtaaaacctttgagtaggtgtaagaggacaccatctggagcagaaaggagggtgggaccgttgctggctttagataagaaataagatcgactttatatggttattatgatgctccagataaaataaccattgtgaaaacccttcataagttttaagatactaaaatgtactaccaggccgggtctggtggctcaggcctgtaatcctaacattttgggaggccaaggtgggcagatcaccttaagtcaggggtttgagaccagcctggccaatatggtgaaaccctgtctctagtaaaaatacaaaaataaactgggtgtggtggcgcacacttgcagtcacagctactcggaaggctgaggcaggagaataacttgaacccaggaggcagaggttgcagtgaactgagatcacgccactgcactcagcctgggcaacacagcgagatgccttctcaaaaacaaacaacaacaaaaaactaaccaaataaaatgtactatcaaacaactgctcaggcaatgaagtattttactacacccatgtgccacttgtagattcacagataagtattttccaagcttattatatccctaatcaataaaattttttatcataatagatgatgttttcacttatttatttttacgcttcgtggaaaaaagcccacaagacgtgtttggattcttggtttcacttttaaagcagcaaacaatctttactttgcttgaattggaacctgtatacgtcctattttgtttcctctactaaatttattgaataaacaaatgattcgcgtggcctttataagtttcgtaatttcgcttttcctttttacctgtggtccttgatgctaggggcaggagaagaaaaactaacctattctttaaaaacgcgtttcccttttccatctctaaaaaaactgaaaagacgtaaaacaaatgggagggggcaaaggaaagaaatgaggaaaaatctaaggaagattaatgtgtacttcccggtcagcgggaaggtggacggagtaatatctttgcggaggattggggtgtggggatctgtgaaggcgcagtatgagcagtaaggacttgtcaaccagcccgacgcaacttcaccgagggcgaggaaaggagctctgaggaaggggttactcccgggcaggactgtaaaccagctggaggcctcgctgggagggctttagaggaatgaaacgtccttaagaggggcggatggggaatggtatcaagggtatgggttctttagggccttgaaacaacgaaggctcaaaccagtgggcacaaaggctaccggaacagtagtacgcgctgagagaagggacactattcccttcacctaccaatcgctgctggcccgggcgccgctggactcctaggtaacgtcgcaggcggaaatgacgtaactcaatccgttctgtcccgccccattgccctcctagccccgccttctaggccccgcctttcctctattcgcgctctgacaaagtgcaggggatatagaccaaccgcttgtgaaggctgctggttctgttagaagcccgctttcgattgtcagtggctttgaggcaaaggattttggaagggaaagcaaagtgattgtctacgaagttgggcttagtatataataaagcccagtcatttcaaccaagaaccttaaagatgttgagaaatataatgaaatattttctattaatttttgtaaaatttttcttgagatagggtctcaatctgtggccgaggctggagtgcagtggcgcgatctcggctcactgcagcctggaactcccctggctcaggtgattctcccacgtcagcctcccgagtagctgggaccgtaggagtgcaccaccacgccaggctcatttttctatttttattaatagtggcgacagggtttctccatgttgtccaggctggtcttgaactcctgggctccagcgatccccccctaccccatctcccgccttggcctcccaaagtgctaggattacaggcgtgaaccaccgcgcccggcctatttaattagtttaatttattcatttgaaaatgagacaactgatccttctagctatttgacaggtcttgctcaaggtcaaagaatacgtgacttgcagtccaatgttatttctaaatgtaagctcttcagctggttaagctaaactgctttaagtgaaaacagacgacctcttgaatgagttttcaaatgaccttaaataatgcaagcactgcttatctaaagcaagtctgacttgcttgaattctgagtctgacactttggcagtgctttagttggtcacagattattgcaatgtgaaaaaatcttgttcagaactgcccagttttgctatgttcgtcctatgttcatgcatggaatataatttgtttgtaaggaagataaacttttaaggagggaaaagaaacacctgaagagaaatttccctgtataatgaaaacatttgtacagaaaaaattcttggtaggttaattcagtgactcactgaacttccagagttctttaaaatcatcacaatcataagcaaggggtgagcttcagttcctctttatgtagttgccttgatgcattaatacacagtagttatgaacaataaactgtaaaaatatagtcatggaaacattatgtatatcttaattttcaatctaatagaaactgggttaaaaaatttaaattcaggccaggtgtggtggctcacacctgtaatcccagcactttgggaggctgaggtgggcggatcacttgaggtcaggagttcaagaccagcctggacaacatggtgaaaccccctctctactaaaaatacaaaaattagcccagcctcccaagtagctgggactacaggcgccctccatgatacccggctaattttttgtatgtttagtagagacggggttttactgtgttagccaggatggtctcaatctcctggtggcgcgctgcctgtagtcccagctactcaggaagctgaggcaggagaattgatagaacccgggaggcagaggttggttgcagtgagccgagatagcgccattgcacttcagcctggcaacacagcaagattccctctaaaaaaaaaaaaaaattaaattcaaaattacacaacaatgtgaatgtacttaagtccactgaattgtacaattgaaactagttagaaggataaatttatgtatattttaccacaatttaaaaattttaaattaaaaaactgcaaaactaagccagtaaataatttagaacaaaaattcctaaatgtactggatgaaatataaaaataaatttaaggtatactgctgtttagatattatttttattaggttggtgcaaaagtaattgcggtttttgtcattaaacatacataattaaacataatggcaaaaaccgcgatt

SEQ ID NO: 914409 - DNA, 4001 bp, Homo sapiens
agggctggaagcactaagttttctctctcctgagggggaaggaaagaaggggagatgcaggaggaaggggaggtatagcgggggatgagcgttccaagaagtctctccttctaggtgtctgcacccaactcatggtgctgggcagtggagaggagcagcattacaaagggaggctgaaggctcatccctcagggaaccggagccccccagcctgtggggcttgtgtcagccctgaacagagggcagaagttcaaggggactgaagatgcaggtagttcccaagtgacctaggagtccccagagctggggggtgtggccttcataggacaaggaggaagacaggaggatccaaccccagcatggaggggggagtgggcagtctccccaatttggcccccctaggtcagttccacgttgttggcacggtcaagcactcgggagccacgggcactacccccaagctggaaacggctctcatagagagtggggcagaggtgccagcgattggcccggtagatgcccaggtaggtgtagacatcaggcttgtaggtgagcaggcacttaatgcccgctgcacggatggctgaatccgcctccagtacacccaagcggtccgtgaagtcgtccgtgtaaacacagatgacctggcgcccaccctccttggcacgtgggctcaccttggccacctgaagctggccttcaaccacggcccgggcaatgccagcccaggcgtggtccagcttgaagcccggtgccagatgcataagccacttgcccgagagcacgtggtgggtgatggcgagctggcgcagggtacccggtgtgatgggccgcccactggtctgcagagcttcccaggctgcctgcaggccctgcacgtccccggagttggggctgtagccctgcccatacactgcaatccagcccacaggctctgagttgggtgaaccggggtccccatagcgggtaacttgggatggtgggtacttggccagccaggcatccagctcagtggcaggcgttgtgcgggcatcaaacactagccaggggtccatgtcagctgccatggcctctgcagccaggtgctcggcggtgaagccatcctcacggccacctggagagccctcctcttccagctcctcacctggttccatcctgctgtgagggaaccgagtcagggcagggtctgagacaataactacagatgccaggcactggattaaactgtggccttgagtaagagttactgtcgatgcgcctcagttgcctcatctttacaatgggataacaactgttcctgtcccgtagatctgctatgaaaattagatgcctgaggagtcagcgctccagaagggttgctgcagttattactattctccttgacttacagaaaaggaaactgaggctgagaaaaaggacttgcccaaggtcacacctgcagtgcgtggcagggccgaagggtgaatccaggcgtgggagcaaccagccccagctacacctcccggccctgccaaggcccccttttcctggcaggtatccggtgcgctggcatttaatagaggaacgcaaagaagcgcacgttcgcgcagctcccgaggccggctctgtaaggccaggcctcccaggcaggcgttatcgggcccacttacagacgaggacgctgaagtccagagaggttacaggccgttccgaggccaatggggcggttcccagactcgaaccagggcttgttagagcctgcaggagagccaggctccggccgtgccgcgcccgccgccattaacgcccacgggcccgagctgtgctcccgccccggccctgccctgcccctcccgccgcccgcagtcacctccggccttcgctgcgttcgacgccggcccagccccgggcccggctccgctcctgccgtggctccgcgccaccgccaccgcgccccacccccgccacggccgccgccgccgccgccgccatcttagcgccgcgccacctcaacaacaactttatagacaggcgcagccacagggcggagccgcgggcctcagcggccgcagcggccgcgctgtggggcggggccggcaggggaaggggcggggccgacggggaggtgctgactcgggggcggggccatcgcgggaaccccgggaggggcgggccgcggggggcggggccaacgttcgctcttctggccttgggggcgggcgggagcggcggtccagactggggagggacgcgcaccggccaggaggcttcaagaggagggcactagggccctgcgagcggcgtcttaaccggcggcgctaggactccgcgggaaacggcgggggcggagcgggcggcaccaggacccaggggaaccgcgacgggcgggcggcgagcaggcccgggagccgggaggctgcgggcggcggcgctggacccgacgcggcgagagaggccccgagatgccgagcaagaagaagaagtacaacgcgcggttcccgccggtgagcacgtggcagagcccggcaggagtgggcccggctcccgggtggcttgggcccagttcccgctgggcaggcgggcgcgccgcggtgttcgggggcctggacgccccgccccctccatgccctccccgcgtccgtgtcccccgccccctttctccggggatgccccttcctcccccagcacccccttaggggacggtggcgacggggtctgaactctgctcccccacccgcaggcgcggatcaagaagatcatgcagacggacgaagagattgggaaggtggcggcggcggtgcctgtcatcatctgtatcctgccgggggcggaccgggtcgaggggcgtgggggagggaggcagcgggtcgccctctcctgccccggagttctccttgacgctcctcagcccgggcgctcgagctcttcctagagtcgctgttgaagaaggcctgccaggtgacccagtcgcggaacgcgaagaccatgaccacatcccacctgtgagcggcgaggagccgggaggggccggcgggtttggcgcggggagttcacacactgaggaaggcagagcctgggtggcgagggaggtgggcggcagccgggacaccagcaaggccacagactggcagaggagaggctgggcttccaggcagagggagccacctgagtaaagcagggcaggcccgggagcggagatcggcccgggctccagcctgacatctggggccccttgctgccacccactgcgggtttgggtgtctgggcccctcttgagtgccagcccctcctcacctcttccaggaagcagtgcatcgagctggagcagcagtttgacttcttgaaggacctggtggcatctgttcccgacatgcagggggacggggaagacaaccacatggatggggacaagggcgcccgcaggtggggccagggcctggcatacagtggggaaggccaaggccacagggcttgggggtggccaaggagtagggagcactccgggcagatggactgtaccttcccaaaggggccggaagccaggcagcggcggccggaagaacggtgggatgggaacgaaaagcaaggacaagaagctgtccgggacagactcggagcaggaggtgagtgaggccccagcccttcgccctgcccttggtgatgggacaggcagcctcgccccaggctgaactggcaggaggccagctctcatccttttctgcaacctgtttgctcactggtttatttgtaaattggggctatgagggtctactgctgtccctgccactcccagtgatgggttcgtgtcttttcttgtcaactctgacctctgcggtgctcacaggatgaatctgaggacacagatactgatggggaagaggagacatcacaacccccaccccaggccagccacccctctgcccactttcagaggtgagcagcccagaggcatgggagggtgctggcagactccccagagccaacttacccctcttgttctccctggccccttggtcttgttg

SEQ ID NO: 914410 - DNA, 4001 bp, Homo sapiens
tgaccttagttggaattagcgttgttgctgatgtaattaattaagatgaggttatgcggggcccttaattcaatatgactggtgtctctataagaagaagagatgcagacatatgaagggaaaaggctatgggactgacaggaagagaagaaagttctgcagctgcaaactaaaggacgccaagggagggtggcaaccgccagaaggcaggaagaggcaaggatggattctcccctacaggtttcagaggaatgatggccctgccagcaccttgatttaagacttctagcctccagaactatgacacaatcctacctaatgttctcctttctccatttcctcctattttctttactgcccttatcactatatgaaataatcagattgttttttcatttattgtagtcttgccaaggcccgtacaatctttgacagctgggctcttgtcttgttcctcctcgtatccccagcactggaaggaattcctagcacatgataggccctcaggaagtgtttgttatgccaaactataaactacagtcaatgcatgaaggacatgaatggcagagaatgaagataacttcataaactgtaacagtattttccatttgattgaggagaaaaaaaaaacaggattgaaaataatggactaaattttaacaaacacaccaaaacttaaactttcaagtgagttttacctctctcaaagtagtcacctctagtagtcaaaagacttattcaaatcactgtgctacggcttcatacttttttgggggaattcctcatttggaactgttggtagagcctgaagcccagttctcagagtgggtgtgatgttgagaaaaaaatcgaaagtaatttggagctagtaaataaagcggcgataaagctgtgtgataatatttaaaatattttaaaatgagatgtgcctattgaaaaagagaggctgggggtggtggctcgcctgtactccccagcactttgggagcccggggattcaagactagcctgggtaacatagtgagactctgcctctaaaaaaattttttttaattagctggacgtggtggcctgcacctgtagtcccagctattcaggaagcttgagcccgggaggtccaggctgcagtgagctgagatggtgctactgcactttattcagcctgggtgacagagaaagaccctgtttcaaaaaataagtaaataaaataaaataaaacaaaataaaatgaaacaaaaataaacaaagggagaaactaatcttctagagagcgcgcgatcttccagaactgcaaagttccccgaggcaagatacaagatgctgaaagtagagaaagaatgaactaaatggcaaacaaatttatgatgactgattcgaaacgtaaaagttcctttaaaaaaatcatttgcaccttttattactcccaaacgccaagaaaacgacgtcagtaaggaatagcgtgttcacaagaatctatgccaacttggggggaagtttaaaaatccgcagagacccagggaactctccgacccccatactaaccataacgaaatcatccttccgataggactgaaaggtctggtcaaagccgaacgcctgcgccttgattctgcccagcatggacctggggcagaggaggaaaaagaaatcatctgggggctggcaccctctcagagcgcaccgataaccgatcccacccacagcatccgcccttcccgggtggttcggggttcactcaggaagcctcagggttcactcagaatggcgccgacccgcgcgggcccctcgacgcccggcctgcgcctccacagccgcgaagaccaagggcctcttctctccctgtgcctcggttcctcaccactggcggagccggctggtgatctccttagagctcagagactggaaggttttctgaggcaagaacctgaagtagtagccacccaagtccccgagctccccagtagccatcgtgctctcggctgggtggatgcctgggccgtttccatggagacgcggcggccgtcgtgtcggagcgacgctgcgggggcggggccacacgtctctagggacccaggagttccggccttgccgccgcgggtgcagggagggaggttagcctgtctttcccaggagcttgtgccactccactccccaaccccgggcttggcggttagggaaactaggggtcggggatggagacaaattgccaatcgatacttgttgacattaacttttaataataattactcagcatgggttaatattctagtctcaagagctataacctcagatttacagttatctacgtttgatgactcaaacgtttctgaagaaaagattattctgaattaattaggtttatctattttggaagacaaatgtctatgtgactacttaggaaactattctgttttaccatctgtttttttttttttttccttaaaatgtacacttgaaggccaaaaaaaaaaaaaaaatgtttccatacacagtacattacaacatgctgtttatttatttttgttttttagaccacttttgttctggtatgcgtgctgtttaatagaaaacacacttttcttattttctattgaaaattatcttcgtttctacttttttttttttttgagatggagtctcgctctgttgctcaggctggagtgcagtggcgcgatctcggctcactgcaacctccgcctcccggattcaagtgattctcctgcttcagcatcctgagtacctgggattacaggctaagtttttgtatttttagtagagacagggtttccccatgttggccaggctggtctcgaactcctgacctcgagtgatccgcccgcctcggcctcccaaggtgttgggattacaggcttgagccaccgcacccggcctgtttctatggtttttatttttgccttatagcagtgcatttggacttcagaatggagggatagttcttttccatctcgttgctttctctccttttcccctagcccttaagaacttgattattttttaacagcattagcagaagaagagacagggaacaaagacaaaaaagagaaacagagggagagagagatagattattccttttcattgatgtttagtattctgttacttgactatactacagtttatccttttgggctgtttcctctttgaggttgttatgaaagcagctatgaacattcctgtgtatgcctttagatggacttatgcaccatttctgttggaaatacatccaggattggaattgctcagttacatggcataagtatgtctagctttactacatactgtcaaaaagttttctaaagatcagtttacatcccaaccagcaatgaatgagatttcccgttgttcaacatccttgccaacacatagtattgccagtcttttaaaattttagccattctagggagtttgtattaattttttattgtgatttcagtttgcatttccttgatagttaatgttgctgagcaactttgcaatatgctgggtcatttggatatcttctttagtgaaatgcctatttgagtgttttgtccattaggaggaagaagggttgtcagtctttttcttactaatgtttaggaagtttttatataatatggatatgagcccattgccagatatacatattgcgaacattctctttgcttgtagcttgcctgtagctttgatgctcagaaattcttaattttaatgaagttgaatttatcaactttcttttttatgtgtcaggtttgatttctgcctaaacaaagtcaagaagatagtctcgcatttatgtccataatccatctcaaaataattttttgaagctgaagattagttctttccctgtggtttttcagtagacgcagctctatatattggtaagactatttctaatccagtgaattgctgtggcacttaaaaaaaaaatcaagtgagtgtttttgttctttctattcagtttattggactgtccttacacaaatgccacattgtgt

SEQ ID NO: 914411 - DNA, 4001 bp, Homo sapiens
ttattctaagtgcttaccgcaggcagtagcaggtacagagtaagttctcaataaatatctctataaacaatagaagtcctagcacactgacttgcacatagcactcaataaaaggtagctattactattctttcaatcattcttcctatgatctggtttctagaattctcactatattaatcaccctcttatggaagctatcttgtttactcaacattcttcttaacacgtagttataacaattcaatactatgtggtgtatggagattttgctttatttgaagataattattttaaggaagtctaaacagacaagcgtctgctgggaaaaagctagtctacctgcttatataaagagctggcacttacaaaacccattaactttctcaaaataccaccctttaaacattgggaaatgtatggttaagagaacaaaaataacagcaaataaggagtgatcagccaggtaagagaagaaccaggatagtgcagtattatgatgaaaaaaaaaaaaaaaaagtcactgcaaccagtacttatgtttattactgtacctaataaacagcccagcgtggtgattcctattcacttagtagcctccccatctagaatatactccgtgatctttcttgatggccagactgtgtaaaattcatacagtgtttactacagggatccccaaatattgttagttgaatgaacaaacacacatttcaaggagggcactacagtgagtagatgaacagttttctgataggagattgtacaagtaatgttttcaccagtgtattttaggacagcagattcagattaatgcgctgggactgaatgcaaatagtaaaattacaaatataaagtaaaaatttggaacctttgccaaagaaaggaataataaattgatttaataatttgaaagaactgtaaggtttaggttttgttcttatttttagtgcgactgagattggagtctgtttgtagacatatctgaaaaaagtgaagggggagatggaagatggtaaatgccaaggaaaagatggaaggataaatcagtgtaataaaaaggagcacttctttttcgccaacagaagtaaaggtaaaggttaagtgtctgagttaacgaatggattgttgacctctggggagggtgctcccatcagctcagctttgtgacgacctaagaatatcccttccacacctttcctgatccaatcgttctggctgcataaaaccacctaaatcaatcaactgttacacttcccttagtgctaggacatattcatataactcccacgtattaaatgaaaatacatccatctaaaaataaaacaacacgattgctgctacaccaagaaaggattttaaaaaggcctgttcacaagctaagtgagggccagaggaaaggtgttcgtttaaactgaaattcgagctgcgataacacctcctaatgcaatcaaacgctgttgcagcacacttcttaggagatcgggttcaacggcagggattgggtaaggtgagaatctggcttggcggctccggccccggccatctggttcccttgggctccggccgccaccatccactcgacggctctcggcccgaacgcttggtcgcaccgcctgccgaggtcctagatgaatcgcttcaggcctggaaacgaggaagccgtctccggagaccatcgccaacgctgacgcccgcggtctgaggtcgccatgggaagagcggtaggccaccctgctcctctgatcaccggaggacagggacacattgttcagggccatattcaaacactgcccgcagtacttgcgttacgtccctttgtgaaggcaggcccttcgcggctccccagatcagtccagcctgtgtcggacccgatgactaagcacacaggaacccataactgagcctgcggaagagccagaagccgccttgcctttaacgaggggtatcctggcgagcatgcgcagaccgtccgcgcacgtcgtcgcccgctgagagcaagcgcaacgggcgttttcgtttgtgacgccagggagcgtgaggacgtggggcttccgtgaatgcgcagtgggtgcgtcggccacgaccttttggccaggttagggagggggcgacgctgagatgggggcggcggcggcggaagcggatcgcactctctttgtgggcaaccttgaaacgaaagtgaccgaggagctccttttcgagcttttccaccaggtaagcggctgggttcggccctttgcctttcgttttccgtctcgcctagggcctggccagcggccaccccgttttcttttcgtagccgtcaggggacccgacgggtggctgtttgggggtgaaaggcgggtctgggttgcgaaacgctcgctgggtgtcgctttcctggaagatcttggttcgtttaggccgaaagtgacgactaaaggtggtggagggatcctcgatcaggtttcccgtggtagagatccaggggtccttgggaacacagtgtgtgtgtagggtcttcgttgagcagtgctttttcttatccttcctgttgtcatcttccccttaggataatttgtctttggtttatctgactgggaacttaatattttaatttatttgtgtctgttttcccctaaagtttgcttatcaaattgcagcattattaaaatatgtaaaataaaatggttaagtactccgtagaaaaacagcattttagtgttgctgtattaaaaagtgtgaaaaattctgagtatcctattccccccatccctatcccctaataactggtattgtttgattaatcaatacaaaagtccgtttttagttaaagaaaatcattctcttgttcttgataaatgttcattttcatggagtggcaaaataatggcgattggtcactatgttaagccatacagtgctgtgaattgcaaaagtgattgtgtttccagttccttatgggcccccttccccaaataaatctaatgttcagtcataactaggatgtttactgtagccaaaatggaaatccgtgcatcattttcaaaagaagtttctgattacgtttctgttgtttttaaactttgtcatatcttatttgtaaaatttgagtattttcccttagttgctttatttaaattctaaacacctttttgtttgtaggctgggccagtaataaaggtgaaaattccaaaagataaggatggtaaaccaaagcagtttgcgtttgtgaatttcaaacatgaagtgtctgttccttatgcaatgaatctacttaatggaatcaaactttatggaaggcctatcaaaattcaatttagatcaggtaactgcccaatgaggttcggggggcattgtttcctgctgtttttaaatttattattcagttttaaagaacctcttatttgtagatgaaacttctttcttaagcattgtgaatagtaaactttatatagcaaactttatatatccctgaaaacgggtaacattgacacatggattttgaaattagaatttcaaaactgagcttaaagtttcattttgggttagtgaaaaaacataaactgtatcactaagagagctgggcttgggtactctgaaaagagctaggtttattttctgaaaatacttctcctggctgctttgtaattacttttatatattttggttcttgatcatgtgaggatgaaactgtccatgtatccagtgttacaatttagggtggagatcagaaaattatggtcagattggatatttatggagtgctttgttttgcttatctgatattatacacttataattttcaccccgatgaagccgtaaagcggtctacagcagcttgagattctttttttttttttttttttttttttttttttttttttttgagatggagtcttgccctgttgcctaggctggagtgcagtggtgcaatttcagctcactgcaacctctgcctcccaggttcaagtgattctcctgccttagcctcctgagtagctgggattacaggtgca

SEQ ID NO: 914412 - DNA, 4001 bp, Homo sapiens
ctatctattagttataaagtagtatcaactggctgccctaaattaagtctcaagatacaaaggcagtgttcctaaagtcaaattctgattccctcttcagaagtattctgacccactttaaaatcctccagctttagtataaagaataaaacaaaggaataacacaaaccaaatggcctgtattagtattaaattcaatttcaccagtctttggcatgcatataacctaaaaagcatgggaaattattatttatgagtcttgaaataaccaccaggcaaaataaatatttcttaagtgtcaactttgtataggtactgaacagtctgcaaatctgtatcatcacactctaatttttgacattaagaaaaggtgtatctctttaagaaaaaaaatcttaagaaataaaaactgggttcataagtttagataagtagatttttcttataacagagtcgtgtagttaagttttgagatgccactaggtctatttgtccttcactttgatgtgtcctaatactccataattaaaggaccaagtatccccaatatatagaggcaggtattaccataactaaatttccttccaaattagttgacaacgtgagagatacatggattccaaataggctttttattctttaagaaacacaattttaatgtcattcattaataacactcactcgtctgagtcacacaatcattccaggtttgtcctttttccctattaagagcagggcaaaattatctcaccaggattatgaattaccaccatcaccacaggggtctcccagtcattcaagagacaaactttatgaggctagtcatctccaacttatctttctggcttcttagaactgtatatgtacagaatacaatacattatcaaaacttgatgggaaaaaaagacaattcagcaaagggactgcaacattttaaaaagccaggagaaaaaagaaggaaaaatacttctaggggaaaggaatcaggcctgaaaattgatgtctgtgtggtttctaaggaaacaaacaagattcaccttccagattattcctaaagaattccaggtgctgttctcatttactctaacaatttggcaaggtaagttatctattttgacccataaggaaacacactactcgcatccttctctggttatctcagatacggctcacacgttaagtttcagccaacttccaattaaattaagcttatttttactcgggttcttccaaagggacccaaaagatatacattccctgagcaccttaatctttgaaaaacagtttgctatagaccaaattcaatcccaaattcacctctacctcaagttaataaagaaggtatttatactggcgattgaacttagttctgtaactgcaaaatgtcaaagataaagaccatctcacgagttatgaggattaagttcaaagtgccaaataagcgccacacataaggctgagtgaccaaaggcgtgcattgcacttagcccagtacttggtacaaaatgcacacttaataaatgccaacttatactgtgactactattcgaaagaatctgaatagagctgggcaaaggagagcacccagcttcccacgctccatcctcacatacccacccaaaatataataagtgggcttccccgcatccctagcgcctgcgcaccctccctgccgtagggcttcgccctcggtatcctgaccccttcctgatatcacccggtcccatcctcaccagcctccccgccaccaagcagccaaacatggcgacggcagctccgttcagccggcagtgacctgaagccggcgactaggagtcctggggctactgccctagtcgagactaagaaccttccagaatttgcgggagggtgtctgcccctccactacatagtgactgggccagcggcaagaatgcctctgcccccgcgaactctgaccttctcttcctaagcagcccactgctcaggcaacaagtacttccggggcttacacccggttttccccactaaggaagaaaggcgggccagcgccagtacaagactacaagtcccagaacaagtcccagagggcaccgcgccagtttccgggaaggtaagcctggaggctttgcacactgggatcggtagtccgggtgttttatagccacaaaatctgtggatccttcatttccatgtacaatcctgggaagagatgcttctaacgtttctgtgacatctgagagattaacggtgcacttttacaataatcacgtcactagatctttacaaaaaccctatgaggtaagtattataatccaaattttataggagtgatcagcctcaaatctttacacagcagtaaatgttggaggctgaattcaagtcctaatccaaatccgggtttctttctgctacacagtgtctcagaagtattaatctttaaccaattgttttgtacttgtctacaatttatagtagttctttccagcttcacttagttctcccattcatttgctgtacaattgtggacgagttgtagatgtctttgtgcttcagtgcccctcctttgcaaaagacaaataatgagcctattgcctagggttgctgtgaggattaaatgagctaatatgtataaaacacttaaaacagtgcttggctgtgcttaattagtgggagttttattgtaaaaatgtctattttttttctatgtggatctgcagaaaagtttcataggaaatacaaaacaatagccaaaaaaaaaaaaaaaaatactggcattaagtaccgattgccaccaatacttattctccctttcacagctccaattccttttcttcttgaataggatagtaaagggtctctgtccaatttgaaatatctgagcttggccaccagccgtaaagcaggtctgtcttcccagttctcagtttatatatgggggatcagtgtttggaacagtcctctggcctccactgtggatccctaaactgatcacctatcttatcaccgatactcctttgagatagctgtgccaaaggtgaagaggtaggaaaggatctaccaatgtttccaacttactatctaaaaagtcctagaaccttcagaataaaaaggccattcatatgaagaccacttcataaattaaggcacccacactacctgggttcagagcccatctctgccatttattagttacataatctcaggcaagttaacctaacactcccatacctccttttccccatctttaaaatgaagtaatagtagtatctacctcataaagttgttttgagggttcttacacgtaaagtactcaatagtggccagaatgtagcttactcaataaatgttaatatttagcattattgcctttcctaactaattttccatgtcttcttcatacccaccttgtgcactagccatacttttgaattctctgagcaactcctacttttaaatttgtatgtgcttatgcaacttgttttatctccctgtaatattcacttggttatttcttacacatcctctcacttttcttcactaacctttctatgacccacctgatagtcatttcttctcctacccagcaatcttatatttagtggattgagaactagctagcttagaattttttttataaattacagatgatgtttattaattgtctcaatctctgttatgtgagatatgagctttttctccattttgctggtcaactgtcttagttatagattgtacaaagagttagaggcagtgagtacagtatcatatctctagagtagccagtattccagctaccaaactatattatttgtacatacagtagttctttgtaacttctgcgggcagaactagatacagtgtgaggaagtgaaaaaatgtttcagggaaaaaaatctttccaataatcagagctctctgaaataagaatagatagtcatggaatagagtgaatgctcctattcacattgatattgtaaccaatgctgaaatccacttacattgttgaggagacttacgga

SEQ ID NO: 914413 - DNA, 4001 bp, Homo sapiens
gatataaataaaacactgcctagattattttataagcagggcagtttgctgaatatacaactgagggagacaggcttgttttcataactttgataataatccttctgagacaccatttcctcacctgctttaataacccaccagataattgttgaaagatcacccccttacgagtctcccaagtagactgaaaataataactacaagagattatttagcagtaaattacagctgatctacagaagttctttaaagcaaaaaaaaaaaaaaacaaaaaaaaaacactaccatctcattagagtgaccagagattctaaatagtccaaggaatctttgcaggaggaataaagataaattagataaattatagtatcaattaacatttattgagtgtttatgtgccaggcactgttctatgtgatttacacgtgctatcccatttatttctcaaaacagcccagtgaatatataccaagattatccccagttagacaaagggtgacaagaagaataaaatattaactatcttctgttaataaattaactactaccagcaccctcatcatatatgtttatccaattcttttagttcaaatgtttatctgtctatacccactgacctgattcccatatcctaaagccccttctcatcctctccaaccttatcaactgccattactggcaggtgcgtatgcactagaccttatttttggtaaattttaaaataatcataactatcgtctactatatgcaaatccctgttctaagtactttacgtatattcaactattaatcataactgacatcaatatatgaggttggtaaaattattatctcagttttcagatgaggaaactgaggcacacagaggttacataacttgcccaaagtcatgtagttagtggcagagccaggatttgaatccagccagtaagcattcagagtccacactcagccattgtttatactgcttttgaagcatattaagaattaactcttaaaagtcaagaaatctgtgctatgttttgtttcctttaacatttggtgcacaggacatcacactgcaaacacggagtgtattccacaactctctaaggtaaacaataataaaatagaaatttatcaagcttccttcatctagtaaatattctttttgttgtaacacaagtatgaaattctgaataattcaaacacttctatgcttagtccctgcttacttactacagaattattaaagaattacccaaaagttcttggactggaaagatgtgaaaaagccactaactctattttcctagaatgaagatgaaaagaagatgtgtttaggaaccttctctgcttccctaaaagaaccctaaaaacaggagtaaaaacagtgaagaaaacaaaggaccttcaaagtgcactcgttaaaacctaataactgtatttctattactaaatgtagaagtggtaaacatctttaacaggcaatgtctcccctgcactctagggattcaaagatccatctttcggttctgtaagacagtcacggcttttgtaacctcggtgcccccttcaacctcccgccccaagcacctccagggtcgtcaggggtgtagttttgagtcgcgctcctaagcatccagacaggcaggacaccgtaacgacatctctgccgggagtcccttcagactgcggtctccaggtaaccgcactccaacagaagcagttgtgcttcctatcgggtcacctgttcaaaagtccccaggagaggctccagcaataccagggtagcggtttgcccgacaccgctccgggcgctgcagccttccggcaacccggacgttgggtcggtgtcagccactctcacctcccattccctagttttcctcctttgctcccgtctagtcacttcgcaccttcggctagtctttattcacagacacattccaggagtcccctctcccagagcaacaaagacagatttccaaagctacacatcccagagagaacggattcttgggaaatgtggttctttcagctgacgcatggtgactctttacggaaaaggactacaattcccagaaatcctagggagcatatagtccgtggctaaaacatgtcccagctccttggatggaatggcagtaaaggttctgtggctctttactgacctaactccttggattttcctcattcagtcccactgcaagcgtgtgggaggacttaaaaaaatgctattcacatgtgaaggaatctaaatacgatgattatatgaagcgatctctaagtcattttattttataattctttcagacaaaaatctacgtaccatcagaaactatgtctctgcagatggtaacagtcagtaataacatagccttaattcagccaggcttctcactgatgaattttgatggacaagttttcttctttggacaaaaaggctggcccaaaagatcctgccccactggagttttccatctggatgtaaagcataaccatgtcaaactgaagcctacaattttctctaaggattcctgctacctccctcctcttcgctacccagccacttgcacattcaaaggcagcttggagtctgaaaagcatcaatacatcatccatggagggaaaacaccaaacaatgaggtttcagataagatttatgtcatgtctattgtttgcaagaacaacaaaaaggttacttttcgctgcacagagaaagacttggtaggagatgttcctgaagccagatatggtcattccattaatgtggtgtacagccgagggaaaagtatgggtgttctctttggaggacgctcatacatgccttctacccacagaaccacagaaaaatggaatagtgtagctgactgcctgccctgtgttttcctggtggattttgaatttgggtgtgctacatcatacattcttccagaacttcaggatgggctatcttttcatgtctctattgccaaaaatgacaccatctatattttaggaggacattcacttgccaataatatccggcctgccaacctgtacagaataagggttgatcttcccctgggtagcccagctgtgaattgcacagtcttgccaggaggaatctctgtctccagtgcaatcctgactcaaactaacaatgatgaatttgttattgttggtggctatcagcttgaaaatcaaaaaagaatgatctgcaacatcatctctttagaggacaacaagatagaaattcgtgagatggagaccccagattggaccccagacattaagcacagcaagatatggtttggaagcaacatgggaaatggaactgtttttcttggcataccaggagacaataaacaagttgtttcagaaggattctatttctatatgttgaaatgtgctgaagatgatactaatgaagagcagacaacattcacaaacagtcaaacatcaacagaagatccaggggattccactccctttgaagactctgaagaattttgtttcagtgcagaagcaaatagttttgatggtgatgatgaatttgacacctataatgaagatgatgaagaagatgagtctgagacaggctactggattacatgctgccctacttgtgatgtggatatcaacacttgggtaccattctattcaactgagctcaacaaacccgccatgatctactgctctcatggggatgggcactgggtccatgctcagtgcatggatctggcagaacgcacactcatccatctgtcagcaggaagcaacaagtattactgcaatgagcatgtggagatagcaagagctctacacactccccaaagagtcctacccttaaaaaagcctccaatgaaatccctccgtaaaaaaggttctggaaaaatcttgactcctgccaagaaatcctttcttagaaggttgtttgattagttttgcaaaagcctttcagattcaggtgtatggaatttttgaatctatttttaaaatcataacattgattttaaaaatacatttttgtttat

SEQ ID NO: 914414 - DNA, 4001 bp, Homo sapiens
ttcttgaaaaatccctttggatctggaatccattaccactgtatggcttgccttgtatctcaataacagtcatcacaggtgtttgaaacaagcaggccttggctttggtgttccccccacccaaaatgggacaactctctgatcataatcactcaggctgagtgtaatcacctacagttttctgaagtgagggtcaataatgtctccttttagtttctatgaatagcatttttcatagttgctcagatgccttccctcatgtaggcttgggtaggccatgatataaataaaacactgcctagattattttataagcagggcagtttgctgaatatacaactgagggagacaggcttgttttcataactttgataataatccttctgagacaccatttcctcacctgctttaataacccaccagataattgttgaaagatcacccccttacgagtctcccaagtagactgaaaataataactacaagagattatttagcagtaaattacagctgatctacagaagttctttaaagcaaaaaaaaaaaaaaacaaaaaaaaaacactaccatctcattagagtgaccagagattctaaatagtccaaggaatctttgcaggaggaataaagataaattagataaattatagtatcaattaacatttattgagtgtttatgtgccaggcactgttctatgtgatttacacgtgctatcccatttatttctcaaaacagcccagtgaatatataccaagattatccccagttagacaaagggtgacaagaagaataaaatattaactatcttctgttaataaattaactactaccagcaccctcatcatatatgtttatccaattcttttagttcaaatgtttatctgtctatacccactgacctgattcccatatcctaaagccccttctcatcctctccaaccttatcaactgccattactggcaggtgcgtatgcactagaccttatttttggtaaattttaaaataatcataactatcgtctactatatgcaaatccctgttctaagtactttacgtatattcaactattaatcataactgacatcaatatatgaggttggtaaaattattatctcagttttcagatgaggaaactgaggcacacagaggttacataacttgcccaaagtcatgtagttagtggcagagccaggatttgaatccagccagtaagcattcagagtccacactcagccattgtttatactgcttttgaagcatattaagaattaactcttaaaagtcaagaaatctgtgctatgttttgtttcctttaacatttggtgcacaggacatcacactgcaaacacggagtgtattccacaactctctaaggtaaacaataataaaatagaaatttatcaagcttccttcatctagtaaatattctttttgttgtaacacaagtatgaaattctgaataattcaaacacttctatgcttagtccctgcttacttactacagaattattaaagaattacccaaaagttcttggactggaaagatgtgaaaaagccactaactctattttcctagaatgaagatgaaaagaagatgtgtttaggaaccttctctgcttccctaaaagaaccctaaaaacaggagtaaaaacagtgaagaaaacaaaggaccttcaaagtgcactcgttaaaacctaataactgtatttctattactaaatgtagaagtggtaaacatctttaacaggcaatgtctcccctgcactctagggattcaaagatccatctttcggttctgtaagacagtcacggcttttgtaacctcggtgcccccttcaacctcccgccccaagcacctccagggtcgtcaggggtgtagttttgagtcgcgctcctaagcatccagacaggcaggacaccgtaacgacatctctgccgggagtcccttcagactgcggtctccaggtaaccgcactccaacagaagcagttgtgcttcctatcgggtcacctgttcaaaagtccccaggagaggctccagcaataccagggtagcggtttgcccgacaccgctccgggcgctgcagccttccggcaacccggacgttgggtcggtgtcagccactctcacctcccattccctagttttcctcctttgctcccgtctagtcacttcgcaccttcggctagtctttattcacagacacattccaggagtcccctctcccagagcaacaaagacagatttccaaagctacacatcccagagagaacggattcttgggaaatgtggttctttcagctgacgcatggtgactctttacggaaaaggactacaattcccagaaatcctagggagcatatagtccgtggctaaaacatgtcccagctccttggatggaatggcagtaaaggttctgtggctctttactgacctaactccttggattttcctcattcagtcccactgcaagcgtgtgggaggacttaaaaaaatgctattcacatgtgaaggaatctaaatacgatgattatatgaagcgatctctaagtcattttattttataattctttcagacaaaaatctacgtaccatcagaaactatgtctctgcagatggtaacagtcagtaataacatagccttaattcagccaggcttctcactgatgaattttgatggacaagttttcttctttggacaaaaaggctggcccaaaagatcctgccccactggagttttccatctggatgtaaagcataaccatgtcaaactgaagcctacaattttctctaaggattcctgctacctccctcctcttcgctacccagccacttgcacattcaaaggcagcttggagtctgaaaagcatcaatacatcatccatggagggaaaacaccaaacaatgaggtttcagataagatttatgtcatgtctattgtttgcaagaacaacaaaaaggttacttttcgctgcacagagaaagacttggtaggagatgttcctgaagccagatatggtcattccattaatgtggtgtacagccgagggaaaagtatgggtgttctctttggaggacgctcatacatgccttctacccacagaaccacagaaaaatggaatagtgtagctgactgcctgccctgtgttttcctggtggattttgaatttgggtgtgctacatcatacattcttccagaacttcaggatgggctatcttttcatgtctctattgccaaaaatgacaccatctatattttaggaggacattcacttgccaataatatccggcctgccaacctgtacagaataagggttgatcttcccctgggtagcccagctgtgaattgcacagtcttgccaggaggaatctctgtctccagtgcaatcctgactcaaactaacaatgatgaatttgttattgttggtggctatcagcttgaaaatcaaaaaagaatgatctgcaacatcatctctttagaggacaacaagatagaaattcgtgagatggagaccccagattggaccccagacattaagcacagcaagatatggtttggaagcaacatgggaaatggaactgtttttcttggcataccaggagacaataaacaagttgtttcagaaggattctatttctatatgttgaaatgtgctgaagatgatactaatgaagagcagacaacattcacaaacagtcaaacatcaacagaagatccaggggattccactccctttgaagactctgaagaattttgtttcagtgcagaagcaaatagttttgatggtgatgatgaatttgacacctataatgaagatgatgaagaagatgagtctgagacaggctactggattacatgctgccctacttgtgatgtggatatcaacacttgggtaccattctattcaactgagctcaacaaacccgccatgatctactgctctcatggggatgggcactgggtccatgctcagtgcatggatctggcagaacgcacact

SEQ ID NO: 914415 - DNA, 4001 bp, Homo sapiens
accctgctaattttttttttttgagatggagttttgctcttgtagcccaggctggagtgcaatggtgcgacctcagctcactgcaacctccgccccctgggttcaagcgattctcctgcctcagccccacaagtagctaggattacaggcatgtgccaccacacctggctaattttgtatttttagtagtgacggagtttctccattttgatcaggctggtcttgaactcccgacctcaggtgatccgcctgcctcggcctcccaaagtgctgggattacaggcgtgagccaccgctaatttttgtatttttttcagagacggagtttcctcatgttagccaggctggtcttgaactcctgatctcaagtgatctgcccgcctcggtctcccaaagtgctgagaatacaggctacccaccgcgcccggccaactcccattattattcatgcaaacagattctcacttttacagggaggcaacacaaggaaaattattaccccctttttaaaggcagggagatctgggaactaagatcctcatttgtaccagttaacaagaatggtttccaggtacgtgtagagtctaactattccttcacacgtcctctgttacgatattcccatatcgggccgggcacggtggctcacgccggtcccagcactttgggaggcggaggcgggcagatcacttgaggtcagaagttcaagaccagcctggccaacatggtgaaaacctgtctctactacaaatacaaaaatgagccaggtgtagcggcgtgcgcctgtaatcccagctactcgggaggctgagacaggagaatcccttgaacccgagaggcggagactgcggtgagccgggatcacgccactgcactccagcctgggcgaaagagcgagactccgtctcaaaaaacaaacaaacaaacaaacaaacaaacaaaccctaaagatattctcatgtcggtatgacagcgcagttgggaaaagaacactggcctatgagtcagcgccctgggttctagcctaggttcggttatttgtaaaatggaatcccgccgccttctttgatgacaacaaacaggcaggacgcccgggggtactctctcaggtgccctcagagcctgtgcttctgtcacctgcccagtacccctcacaaacagcagctcaacgtcccattgggcaccggccgtgaaagtgggtaatgaaatgagcacacggggcgtggccggcgccaggcgctcagtgccgtcttccagagcagctccccgagcacaggtgtggcctctgaacctcgcccttccacgtccagctgcttcgaacccagaaacctgcacctgcaccggggcctaaaaaaactctccctcgctcccagtctgcactgggtccctccttgcctctgtcctggcgccccgactccccccaccccgccccgcaacgccagggcttgccccattcctttccttctttccgcgccccctcccagcacccggtgcatggaaggcgctgggctccggcaggcacctccgaggctgcgtcaggctctgcccctgggtgtccgccggtgctcggcaaacgccgcagctttctgagccgtaggctggagagagggcgtcgttcccccacagagtaccccgcgagcgagagccctcatctgctcctacttcctcgcttccccgtgggagacgggcctcgattcccgaaccttcctccttcaccttaggcgacgcccgacccctctgcccaaacttcgcggtctcctcacaaagcccgtctcctcagaaagtgtcctccgctttctctcccttcccagcatcacctcgaacacggccacggccgtcccctccatgccgcgcagggaacagcggcaacgcccagtcgaagggtacccgcccgccgccgccgccgccgccgccgccccctcctcagcccgggcttggaactccgccagtgcccacgcccgagtccacgcccacgcccggcagcgcgagcccatcccttcccgcgcgcgcgcctgcgcccgcgcacgccccgcccacctgcccgccgcgcctgcgcactcgacgctgcagggccccgagaccgcgaaccgccgccgggagccacctagagcctctgagcgccgcgggtgccagtgggcccgcaggtgggaggttcggggcggggaagagcccgcgagaggcggccaaggctggaggtgagcgggaatgaggccaggccacgactcctccctcctctcaaagatagtttcccacggtggcggcgagatgcggcccttggccctaatccgggctttggccgcccttcgcgctttccaggacccttccctcggccgggaggggcgacggtaacggcgcggggctaccaagcgggttcgtgacccctccaacagccttgtctgcggcgggggctgccccaggccaagccctgggtcccagacttagcaaagaaaaagacggccaattaaaattgaatttcatatagacagcgaattttttttataaccatacacatatctcggcaatttttgggacatatactaaaaaattactaatctgaaattaaaaacgacgccctgggccgggcgcagtggctcacgcccgtcatcccagcacttttggaggccgaagcgagtggatcacctgaggtcaggagttcgagaccagcctggccaacatggtgaaaccccgtctctactgaaaatacaaaaattagccgggcgtggtggcgggcgcctgtaatcccagctactcgggaggctgaggcaggataattgcttgaacctgggaggcggaggttgcagtgagccgagatcgcgtcattgcactccaacctgggcaaaaagagcgaaactctgtctcaaaaaaagaaaaaacgaccccccgtcttttaccttacaaccagccccaagcatctcccagcctaatccagggggaccagcttcccccgcaaaggtgggacctgggagtcgacccctccctatccaggcccctttccacgtttgactgcactgaatgtgccaagaccaggagctggcttttctgggctctggctgacaggagaagctctggggttttccaagtgcattcctggctggaataaggaggtcctgcagagtcccagctgctgctctctgccaggttccgggaggggcatggtgacaggggcttaagcctataactgctggtgatctgacagccaaaagaaaaccctgatgagagattcctgcctggcaaagagttgcccaaggagaagggtgggacagggtgttggctgctttccttcaggaaaaattcttccaccccagctccaagacgccaggattggacagaacaggctggcgagctggcagagtgcctgcccagtacacaaccttggtgctactccaaagaacattgtctatcgagacctgaatcatacccttctcgagtctatgctcagcgctcctccccattcctccccatctcagttgctcacaggtagacctattggagcaaggtagcttttatttctggaaaatccatcgtaaccatcaaacttgataaacagctggcatttgaggaatcattggagtcttcctttcattccccccacaccccccgcagagctccccatccccacccccagtctcttgtcctttttcagaagaggagttgccaaggggaagggaccagtaacattgaatgactgcttgttgtcggaccccactagctctttacataaatgatgtcatcctctcaactatcttgtaagaaaattgttatcgtcactattttatgggtgagaaaccaaggtattgaggatggttctttaaaatatttcccatcgtggccgggcgcagtggctcacgcctgtaatcccaacactttgggaggcccaggtgggtggatcatttgaggtcaggagttcgagaccagcccagccaacatggtgaaaccccacctctactaaaaatacaaaaattagccaggcgtgttggcatgtgcctgtagtcccagctacc

SEQ ID NO: 914416 - DNA, 4001 bp, Homo sapiens
tcaaactttcactcccagtctcccaagagcaccgcagccttccccatctcggaaaatgggaaggctcttcctccagttgctcaggccaaaaaccttgaattcaatctttcttcctctctccaccgaaatctttccagaagcttgtgctgccggacctttgcacttgctattcggcctgaaatgctcttcctgcagatatctgcaaggttggcatcctcacttccttcgggtctgtgctcaaaattcaccttattagaaaaccctttctgaaccactcgatatattcaattaaatacccattcctcctctttctccttttcctgctttagtgatctctgaaccatttattgccacccaacatactatacatgaacctatttctctgtctttagccattggtatatatatgttcttcaagagcagggtttcggttgctctgtttactactacttcccagcctaaaaacactagcctaaacagcctaaagtagacgtccagtgaatattggttgaatgaattcacctgtctattcctgccctaacagtggggataaggccacccttgcagggttgagaggattaactgagacagcctctgacaatgcccaatgaacactcaacaaatattagcagaagtaggaaaacaacctatcttttggactaaatgctccgagaagggaggtgacctttatttccctcatgaattttataacccttccagttccaaaaaggatgacaggcagtgcaggcagacatcattctgttcggctgaagttcaatgaatggcattgctgctctcaacctcttttgggtactatcccgcctaagaaaagcggggtgggagaatggaaatatatttgcattttcatgcatattaagtctcccacaaagatggctctttgttttcttacggtttgcaagctcctgaggactagaaatcggtgaagggggaggggagagcgagtgttctgagattgttcctcccatcccctcccaaagctaatctcgttctagcactgcactgcttttccaaactagctgttgtatgcagtcccattcatcccttctctccagaacttgacacctgtggctcctgcaagtggaaggcccgggaatgggaatgaagcggggtggtgggcagggaagcgttatgctcggagagcccttaaaattctcctggaggtcggcagcggcgcccgcctgtagcctccggcctagaggcttcgccgcccctcggactagaacacagcccggccgttgtgcttgcctccccttcccaggctgtgagacggcggccgcaaccacccagcgcctctggggatccggcctctggtgctgggcccgggagagggggcgcttgggcaccggaagatccggagcgtgcggggcgtggatcgaagtctccagaccctgggcgggggaaaggggaagggagggggaaatcgaggaggcctgagcttctaaaccatggtgggggaggtgcaagagcgcgccctggacccagatccgagagggaaacctgggccccaaggctgaagggggtgagaaggtgcccgggtcccggaccccgactggggagggacggccccagccccggccccgcaccgtgacgcggaagtggaatcccctccatcctcacctctgagcatcggctcgggccgcggaattacggccaccaccatggcctcctcctcgtcctccccttcctcgcatttcagcgtcacctcgaagcagtcgagtgcggcgccctcggcctttagggccatggtgcggccgtgggcgatagcagtggccggaggactggcgcgcaggcttcggcgcgcagccggcaaccgcctcccgcctcctggccggaatagcgccgggcccgccgcccgccccgcgcagccccctccccgccgcccgcccgccgctcgccggccgggcctgcgaccggcgcgtccgggcctccccgagacctcggcgcgtcgggagcccgggcggggagggctcaatccggggcccctgccccccgccgctcccttttatggaggctcattgtcggcgcccgcccggccggccagccgcggacccgcccccgatgccgcgcggccaatcgcgcgtggccccgccccgggcacgcggccccgttagaaaccctggacccgggaggcggcgggaagggccgaggggacccggggccacccggtgcgcagaggcagaggggcccccaaaacccgcaacgcgggcccctcagtctgcgggccaagcccggggtttccctccattaagaagtcagttgggcgtttctgctggcgtggagagcgctaccaggtgcccccggattttgatcgggagtcgcttttgcctttccgtggacaagccttcctccgccagcagatgccccgggcaggaagagaagcggtgggtgagtggaaagggccttggtatggaaacgcagagaccgaattccttctcatctgccagctccgtggccgtgggcacattatctgttttcttagtccggctcatcgtttctttcaaaaaccattttggacccttctgggaaggcaaagaagagaagcagagtggactgtgagcggacataaaccaccctgatgggtatgatttccatttttggcacgggagtccggagattttgtgaccctctccaaggacacacagcaatcccttgagagccccaagaccagagtccagttgccatgacattgctgccctataaccacactctgggtgagcttttacttctgtgacatggaatgtgcatctccctcttctatagcaaccctcatgagatttcagctcagaaaatgcaaaatgtctgacactgaaaatccatcttcgaatgtcgttatatcagaccagacacagtagtattcagaatcgcgtagtaggatgggggtgtgagaagaggtgtgaactagtctatatggattgcagtcaattttttaatttttttttttttgagacagagtctcgctctgtcaccaggctggagtgcagtggcgctatctcggctcaccacaacctccgcctcccaggttcaagctattctcccgcctcagcctcctgggtagctgggactacaggcacgtgccaccatgcccggctaatttttgtatttttagtagagacggggtttcagcatgttggccaggatggtcttgatctcttgacctcatcatccgtctgcctcggcctcccaaagtgggattacaggcgtgagccaccgcgcctggccttgcagtctatttttaagggaattattttgttatgtgcaagtgtatctgatattttaaaggttttacaacaaaggtattaccaagcctgtttaactatttctgctgaatggtcattctctaccatttgctacagatcccttccgtgcccctctgctctgctctgtattgcagtgggctgagtcttgcggggggcagtttctcaggctcccagagcatctggcttcaggcctcggtttagccaatgggaggcagtggcaggagaagagaaggcaggaggaaagaaagagccatggtatttcttctctttctctctcttgctcaggctcaggtgacatctccagcagcagatgaggcctctctgtggctccagctcatggataggtagctgtggtcccaacatctgtaggatgatccatgcccctgggctctactcagtccacctcctctttttgtccctgcaggttaggagttgtaggcagcttcttgcttttgccagtctctgtactgcctctctctgtcccctgctgggctttccagacctccctgttaacccctgttaatcgtgtcaccaaaaccctgcattacattctctctgttttcaatacttaaagtggttccctcctggcggggcgcagtggctcccaactgtaatcccagcagtttgggaggccaaggcaggtggatcacttgaggtcaggagttcgagaccagcctggccaacatggtgaaaccctgtctctaccataagaaaaaagaaaaa

SEQ ID NO: 914417 - DNA, 4001 bp, Homo sapiens
agtgacacttgcctgtaatcccagcactttgggaggccaaagtgggtggatcacctgaggtcaggagttcgagaccagcttggccaacatggtgaaaccccatctctactaaaaatacaaaattagccaggtgtggtggcagacacctgtaatcccagctacttgagaggctgaggcaggagcatcgcttgaacccagcaggcagaggttgcagtgagcccaaatctcaccattgcactccagcctgggggacaagagcaagactccgtctttttttttttttttttttttttgagacggagtcttgttctgttgcccaggctggagtgcaatggtgcgatcttggctcactgcaacctccacctcctgggttcaagcgattctcctgcctcagcctcccaagtagctgggactacaggagcctgccaccacacccggctgatctttgtatttttagtagagaccaggtttcaccatgttggccaggataatctccatctcctgaccttgtgatccacctgcctcagcctcccaaagtgctgggattacaggcatgagccaccgtgcctggcccacactgtcttaaaaaaaagaaaaaaagaagaaagaaaaagaaaaggatgttcggcaaagtatacctgctggcatctttctgcccacttgcccagatgccaagattcaatcaaggctctggggagtggcacagagatctcagtgccatgactcatatttacttgcaaggtgcaatcgggcatttgaaagccagaaactcattcaaatcaagacatgatgtgacaggaaatgtttcagtggaaaaaatcttgttttcatggcaacagctaggctggggttggagggtgggtatagaccagaggagcactttagttcctggggaaagtctgtggtaagaaggtggggtgtggccgggcaaagcggctcacacctgtaatcccagcactttgggatgccgaggcgggtggatatcctgaaatcaggagttcgagatcagtctggccaacatggtgaaaccgtctctactaaaaacaccaaaattagccgggtatggtggcgggcacctgcaatcccagcactctgggaggcagaggcgggtggatcacttgaggtcaggagttcaagaccagcctggccaacatggtgaaaccccatctctacaaaaatacaaaaattagccaggagtggcggcgcatgcctgtaatcccagctactcaggaggctgaggcaggagaatcgcttgaacccaggaggcggaggttgcagtgagtcaatatcgcccccactgaactccagcctgggcgacagagcgagaccccgcctcaaaaaaaaaaaaaaaaaaaaggacggaggaagttgcgggggggcggggaaggaggaggaggaggagggtgaagcgctgggtgtggagtggggaaagggcagtctctggagtcggcggacgacagcagggtccccgtactgtgtgccggtcactcgcccgaaggaggggacagaggcctggagccccccggtctacctcgcacgctcccggcctgcgacccgcgctccggtcccgcggcctccccgtgggagccctgcagtggcacggcctgcaccctgggcgagcttgctgggtgtcccgagagcccggcgctgagaaagggacctcagggggcaggggggactgcacttcggcggcggagggtggagcccggcccggaaacttccctcagaaataaacagaaacgcaaagacaacttcccgagggcccgggccgtcgtgtgccgttacctcagccccaggtggttcccaggctcggccaggctatgtctcacacactgactaggggtccttcggcctcagaaaagtggccccggacggaatacccactaagaagtgctctctgaaaaaggcgggcgccaacctcgaacgaagtcgttttgagggactggctcgccagctcctaagcaacttcggggctcgtgccgcgcacccaccaggccttctgcgcacgcgcaagtgcgcttcccaccgccccttcgggcgcagctccaaggcctggccgcggtctgcgcgtgcgcatttcattgtcgacaccgagaggacgccttggcgccttcaggtccctcctggatttaccagcccattgtttatttcgcgcctgctttagcgtggtgtcgtcgggaactagcgactgcagagtccttactgtgtgctaggcgttatgcagggtaccttcctttattcctcggcgatatgctctgcggcaggcattaatgccccaaatttaggatcgcttgagctcaggaggccgaggctgcagtgagccgagatcgcgccactgcactccagccggggcgaccaagcgagacctgttacacacacatacacacacacacacgcactcccactttttttccttaaatcttatttttaaaagtagagacagggccgggcgcggtggctcatgcctgtaattccagcactttgggaggccaaggtgggtggataacctaaggtcaggagtttgagaccaacctggccaatgtggtgaaaccccatctctattttgtaaaaatacaagcttagccaggcgcggtggctcactcctgtaatcccagcactttgggaggccgaggagggcagatcacgaggtcaggagatccagaccatcctggctaacacggtgaaaccccgtctctactaaaaataacaaaaaatacaaaaaactagccgtggtggcgggcgcctgtagtcccagctactcaggaggctgaggcaggagaatggcgtgaactcggtaggcggagcttgcagtgagccgagtttgcgagattgcgccactggactctagcctgggcgacagagcaagactccgtctcaaacaaaacaaagcaaaaacaagattagccaggcacggtggggcacacctgtaatccctgcaactcgggaggctgaagcacaagaatctcttgaacccgggaggcagagcttgcagtgagctgagatcacaccattgcactccagcctgggcaacaagagcaaaactccgtctcaaaaaagaaaaaaaaatcggggggagtgggggcctgggcgcggtggctcacatctgtaatcccagcactttgggaggccaaggcaggcaaatcacgaggtcaggagttcaagaccagcctgggcaacatggtgaaactacgtctctactaaaaatacgaaaattagagttgggcatggtggccacgtgcctgtaatcccagctactctggaggctgaggcaggagaattgcttgaacctgggaggcagaggttgcagtgagctgagatcactccagtgcactccagcctgggctacagagtgaggctccatctcaaaaaaaaaaaaagaaagaaagaaactgcgaagcagttttccagagtggctgtaccattctgcactcccgtcagcagagtgtgagaattgctctgcatccttgccagcacttgatattttcagttaaaaattttttgccatcctaatagatgtgtagtggtatctagttatagatttaatttgcatttccctaacgactaataacgttgagcacctttttatgggcccttgggattcttgagaattaataaacctataccctaactcagaaacaatttacagtgctaaagagactcgtatggattcagacttagcctgccatactggaacatttcaacagcaacgctcgcagatgacaacagaattcaaagcacatataccagatctgtcaagccagccagcacatggcaaaagcctggcaacaaaaaatagcatgctgtgtgtgtgtctgtctccaagaagttcagtgttacttaactataagaaacaggtggccgtgtgcagtggctcacacctgtaatcccagcactttgggaggcggaggcgggcagatcacctgaggtcaggagtttgagaccagcctggccaacatggtgagaccctgtctctactaaaacaaacaaaaaacacaccacaa

SEQ ID NO: 914418 - DNA, 4001 bp, Homo sapiens
acctcagtggggtgggcacagaggcaggacactgagagccaggtcctctgaagctggccttgaggtcagcacagggtgggcacaatccctctggggagaaaggtccagagaagtggcaggaaaggcccagcctggtgggggatccagcccgccccgggccctggtgcccctgcccaagcattctgggatgctttgggcttagcctgcctcacaggggtcagcaggggtgggggggtgggggtctgagccagcgagttagtcaccaggcaaatcgttgactttttctcagcatctttattactgtgttcgactccagtgctggacactggatggggtggggtggggtcggagatgtcaaaaccaagaaatcccttccccactctgggcctcagtttccccctctgtcacacagggaggaagacttcctctgcttccttcatcaggacaccgtgaggttcaaaggttttcagcacagagtgctcagccaggagggccacccagctgtggtccttgccccagagggctcaccatctgggagggagacctgcgccctggcccaccatcagcaactgacaagaagggcagttgggtcatggcccagtgaccaggcaacgtccgtgagcctctcggccatgggtctggcttcatcaagctccgtcctggaagttgacagctggtcgtgtggggcaggagcgtccacagcccccattccgggcaggcttcttctaaaccttcatagaatcatagtccaaggcccctacccaagcccagagggcagacagctgagcccccttctttttgaccctgctgggatcttcaaagagagctagtgctggagtggaagggccagagctaagagtggcagccacgtggcgactccagtgagctggtggcagaagcctcctagggccacccagccaaagtccagagagctgtgaagaggtaggtcagcagacacggtgggctggtccaggcacagcaagggggccacgatggcttccagcatctttagctgatggtgcccagtgtgggctacggggaggccggctgactcagagtcacgctggggaagatggcgacaaagctctcccaccttcttcttacctgctggaagacagaggtgggggaggtcccatgggctgagtggtgggcttagatgttgttccacccatagccacgaggtgggggtagaccccaggtagagaagcactgctcattggagaccctgtctcttagaggagggagcctgcagccccccacaaaggggtccagatctcccctttttctctggggtgagagggtcacacagtgtacttcccaggaagttgcactggctgatctccttgcctcctgctctattcccccatccagcatactatcaatcagctaaaaacagcgcttaccatatcaccctcctcctctaaaaccttcagtggctccccagtgcctgtgggataaatcccaaatgccttcagggccctctgaaacgtggctctggggtgtctctctctgcaccctcatctccaggcagctcggttgtcatcttggtacacagcctgggctggctctgtctctgaacctttcctgccctggaatccctgcccacctgctgtggtaccctccatccttcagcccacagccatacctgttggtaccgcctcagccaccaccggctgcctcttcgctgggcttggatcagctgctctgtgtcccccaggctccccggcacccgctcctgggcagtggcatctggcccttctgtgcctctctcgaggccctgggacctggacttctcttgcccctgtctgaggcttagcgccctgcggagttggccctcctggggcctcccccagggctcctgcagctttccataggagggtcggggctctcgcaaggactgacttcgcagccctgttcccatggctccggaggctgcaggcacaggactgctccggcccctcagcaagacactggccctctgaggtggcccagtgcctccacccatctgacaagagatcactgggggcaaaggttggtgctgccaaggtggctttcataaatcaaagggcaggccacagggccaagcatccctgagtcacctcaccactgcctccccaccttctgggtcaaggagtgaaggccaaggggaggaaattgccactccctccttcacctatccttcccccctccccctcccctccccctcccctcctctcccccctccctcctcccccatcctcccccctccttctcccctcccctcccccttccttcccctcccctctccctcccccctcctccttctcctccttctcctctaggcagcttccctgactacctcatccctgaagagtttgttctcctctgaatctctatggccccggcatccattgacactgagcaccatggcttaacaaccaaacagagacagccttttaagaattgggccaggcccggtggctcacgcctgtaatcctagcactttgagaggccgaggcaggcagattgcctgagatcaggagttccagaccagccttgccaacatggtaaaaccccgtctctactaaaaatacaaaaaattagctgggcatggtggcgggcgcctgtaatcccagctactcaggaggctgaggcaggagaatcacttgaacccagaaggcggaggttgcagtgagccgagattgtgccactgcacccaacctgggtgacagagcaagactgcgtctcaaaaagaaatatatttttcaaaaaagcatcagtatggctccaagctagaacaatcacattcacaaagacagcaaggaggatggccgttgccaggcactgggggagggaggaatgaagaatttaatggctgtaaattttcagatttcataagatgaagagttccagagattggttgcacaacaatggttgaaatggtaaactttatggtatatgtgttatacaatactggagaatttctttttttttttttttttttttaagaaacagaaggaaacaggacggctccaggctaggagtcaggaggcctggattttttccaggcccagcgctgcccctaatgtcccagcagcacagcactatccttgagcactcaagctctgaggaccaactgcctctgggtaaactgtagcttcattccttgcagccttgtgaccttgggcacatttttctccttcattcgtaagagggacaaataacttgggtaattgttgtgcgtattaaatgtggtccacagggcttggcacacagcaagccctcgaacaaagtgagttggtggttgtatttgtccgttctcctgctgctataaagaaagacctgaggctgggagcagtggctcatgcctgtaatcctagcactttgggaggctgaggcgggtagatcacttgaggtcagaagttcaagaccagcctggccaatatggtgaaaccccttctctactaaaaatacaaaaattaggccaggttgcagtggctcacaactgtaatcccagcactttgggaggctgaggcaggtggatcacaaggtcaggagtttgagaccagcctggccaacatggtgaaaccccgtctctactgaaaaaatacaaagattaggcaggcatggtggcgtgtgcctgtaatcccagctactcgggaggctgaggcaggagaattgcttgaacccaggaggcagaggttgcagtgagccgagatcgtgccactgcactccagcctgggcaacagagcaagactccgtctcaaaacaaaacaaaacaaaacaaaaaattatccaggtgtagtggtgggcaactgtaatcccagctactcgggaggctgaggcaggagaatcgcttgaacccaggaggcggaggttgtagtgagctaagattgcgccactgcaccccagcctgggcaacagagagagaatctgtctcaaaaaataataataataaaaataagaaatacctgagactgggtaatttataaagacaaaaagtttaattggctcatggttct

SEQ ID NO: 914419 - DNA, 4001 bp, Homo sapiens
cacagggaccctggcacgggaggccaggggacgaagaggacaacgacgaggcgttggaaggggcgcagaagggagagtcccggggctgcctctccagccgggtttcctttgcgtgggttggggcctgcctgccaggtcggggcagccccccgccaccgcggctgccgctgcagtgatcccgctcatattcctcctgagccctctgcatcttccgcttcttcatcctacgcttgtggatgtggaaagtggagagggacagcacgatgaggcagaagatgagggtaaccaggacaatcagcaccagcgtggaggagaaggactggaagagctgctgtcccacctgcgtgatgcaggtgccgctgcctactgcgcctgggccgcgggcacccgtgttgccgctgccgctggcgttgggggaagcaaaggtccggttgaggagacacggcggcaacgccagcctcagctccttcggcgccctggcactcattggcgcggggctgggaggggccaggcccactaggcttcccctcttgggcacaccgttcctaccagccaagaagaggacggagcccacgccacccaaaactgctccctgtagcgggagggggtgtgcgagcgagccaaggactaagggagcaactgctggcaagcaaggcgaccaaggagtgagcggcgcccgagagatcctcgccgataccacctcgaacacgtctccacgctcccctttcctttgcagaggcaccaggctgcaaagacacaaagcttagttagaatctcggccgctgcccaggggagtgctgtcgggaaagatcaaccaccaccgcaaagcggccctctgggcacactgcctgagctgggcgctgcctgtattttcggtcagcggaccccagcctgccggcccgtggccgtgcaccagagccaccagcagcctgctcatgccactcgacaggatggggtctgcgccggcaccgcggaggtgcagattactcagcagataaggcagcctcccttccgcccttcacaactttataattgcaacagacacgcagccgctttggttgaagtccctacttcccagagcgccggctctcctcttttctgcgccctctcggttgatgtcttcgcctggatcctacccttcccagcacccactccgggccgccgcgcgggctccgggtacgcagtcctcccttcctttccctccccgtccagactcgccctccctggacagcgtcagatcccttgggtcccattcccagggggatacccctggcaccacatcccactctgcctctgtccgcgaccgcggctgacgcgcaggaacgcgctccatctcttctccagccttcttccctggtattctcccctctccaaaaaaaaaaaaaaaaaaaaaaaaaagcagctgaagcatctttctcagctgacacattcccacaaacggccccctcctccccatttccctgtgcccccaacttggcagtagcctgcttctttctagaggagctggaatggaaaggggagggttcccgcctgcaaagtttggggaacgggaccttctttctgtccttcccagacccagcccaaaggccccgaggcttttccggcatactggagccggtagacccgcagcgcacaggagagcctccttgctgctcccaagaggcagctgcaaactgttgcactgcggagtagcgaggtagcgcgcaagcaagccagggcaggggccgggggcaggggcgggggctggagctatggccaggggtggctgctcaggccgcgtgagctgtcctccccactcgcacctggccgtcaggccacccggccatcagaagcctttactcacaccttgtctcttacctggaccgccggctggctgcaaggagggagcccccgccgcgcggctgcagtggcggctgcagaaagcgtggagtgaatggaccagagaccgagccgcgctgctgccgccgccgccgccgccgccgccgccttcgccgccgcttcagggagctgagctcgcagcctattgccagagaggccggtgacgtcaggcagccaccgccagggctccaagccacccctcaggcccccacccaccctagtaccccaacaccttgtcctagcatagcgagcctctgacacacacttcccagttccctgcccttctccagcccaggaactaggaggagcaacccctacctccaccctgcaagcaacccacctttctcactctcttgcctaggaagagttgaatcttcagttctccagctgtctgatttcgttctagagctgaccctttggtcccagaatcacatttttacactctggatagccatctaccatcggtgcacacatcaccggtggtgatgaaaatttcccccaccgctaattcctctctgtgctgcccgtttctgaacataaactgcgtgcattagagagatggcagggacgtttctcaacataagtgtgacagaacccaaaacacaaacctgaacaaattaaacaatccaaattagccatttttctccactggagtttccaagttatctttcgctccatctgattcaagatcctccttcttgcatccctcacatcttcatctccaggccccagacccactcaatgtattaaacactccttctattctgacaatctagacactcatgagcacacaaaccctagtcttacaaggaagaaatatgaaattattcacaggaaggcagaaatgaactgccttatgaaaattccaagtatttgtagcttgcacaaagtaccccttcattgaccctaattcttggtaaagtgtttggagcacaacttttagcaaaatacatagaacttccagaaaagaattcaacagcctccctaaatcttggaagagactagttaactattggtttaggagccttggaaaaatatgaatagtgcatttggttacagaatccagctttgaaatggagtatgctcatttttctgttggagaagctagctgggaacagtacctaaagacattgcatggtctttgaaggcactcaggtgtcttactaaacgtgcgttttcttctttgctccctgtcttcttttctatctttgagtctagcacagtgcctgtagtttacttgataaattgaatgatacagtgtatgttgttgctctttcctgcaatgcatcagaaatgactgatgcccagttatctgcttgtatttgctgtatttgtaaagaaagagggtctgatatgtggaggaaaggctgtctgtaatctgggggtcccttcttcggactctgtgtttagggtcatacagttactgatgtctgccccccgcccccaccccaatgctagcctcaccttcctgactggaatgagagcaccagatgcctgcaatagccacctgccacatttggacaatttgactttggtgggcttaggggatggaatggtgagcctttttatttatttatttattttttacgctgtgactaagtgacactttaccattgatgcctgacaggcaatgtcccattttttcacactcgctttgctcctgaaaagttgagtctaataaacattttgtaaagcaaatccaattttggattctccaaaaagagatctggctatttcaagagactctttagcaaaaaataaaaaattttttaaaaaatgttattttgtaaagcaaagaatttttatgcaattagaattaactcttggccaggcacggtggctcatgcctgtaatgtcagcactttgggaggctgaggcaggtggatcacctgaggtcaggagttagaggtcagcctggccaacatggtgaaaccctgtctctactaaaaataacaaaataaataaataaataaataaataaataaataaataaataaataaaagccgggcatggtgacaggcacctgtaattccagctactcgggaggctgagacaggagaatggcttgaatctgggggacagaggttgcagtgtgccaagattgtgccattgcactccagcc

SEQ ID NO: 914420 - DNA, 4001 bp, Homo sapiens
atcatttaattttgacctattaagacaattaattctatttgatttttcctgttcttatgatttttttttaagactgtgtctcactctgctgcccaggctgaagtgcagtggtgagatcatagctcattgcagccttgaatttctggactcagaggatccttctgcctcagcctcccaagtagctcagactacaggtatgcaccagcaggcctggcaaattaaaaattttttttttttttgtagagttagaggtcttactatgtagcccaggctggtcttgaattcctggcctcaagggatcctcctgcctaggtctcccaaagcattgggattgtaggtgtgtactactgcacctggcctcttatgctatttctgttcttagaacactgtatatggttggggaccttactggatggaaagtgtgtgactctacctctttctatttctctctggttctgttgttcctatacattcttggacttttgctgagattgataatagccaatgttgaatagaatttttaaattttcaattaaaattctaataaaggtttccttaatttgctcaagctgatgcactagaagtagcagatttttaaatatacatgtgtttaaaaaatcaagattatttagaaatttaatgatgatcagatgaccttctgaaatattggcctaccttttggagatactttactttctcctcagattcctgtatctttagggcttcggcaaagatgtctctattttctagagggaataaagtcaaattcaatctgaaataattttattatgattttatactaaaattgatataaaattggacatgggttgaaagggaatacatagagtaggaaggtaaacaaaaatacatgtggtgtattggaactttacaaaccagatttgcaaacaactggagactgagttaattagctatggctgcagggaacctctaatctctttagatgatgagtaagctcgagtccagagacaagaaaaagtctcgaaagagagcatatctgcaggatcagagattccaatttctacattcctgttcaaactgttaaaggaatttaggcattgtcctctggataaacagggtggtccctgagcagggacttaggtgttcaattcagaaagttataccacagtgtaaagtagtacccttgtacttattgtctattttctgatgaacctaggagtcagaatgttgaaaggcataaaacttggtacttactgttactcgcaaggtgaaaagactgcgaggagtggctgttttctaaaaaatacaaaagggaagtaaagaaatcattggaaaagtcaacaacattaaaggcgtttgaattttttatactataacaattgcataacagtttccacatcctaggcctcactaagggctcacaggtccaggaagttcattggtaatgttgactccaccttcatctttctccagggcttttcatgtttgaattaaactatgtaaactatcctttcagccaacacatagcatttcctcagattattctatactgtttaccaaatagatgccataatttaagggaaacttatatgtttttagatgtaacatatataccactgatccttttcgggtggaagggttgctggaagggttcaggaaatatttatacatgcatttgtatgtacttataactatttgtatataccattgcagtttctcctggaaagggctctggtacctgcaggccagttacggtgaggcagatatgactgacaggaggccgctattctactcaccagaccctctgctcctcctgggccgcgccaccggcagacgctgactgctgtctctgcgcagcaccagctgagattcgctagggggatacatcgacgccgagatccagaactgcttagccaagttggcatcttgttccgaggagccagcaaataccagtaatcccggggggcacatttcctgggactcttttcggccgctaggttcttcgctgggtcccgtttccatggcaactgaggacgcttctgcaagcgtcctctcccctccccccgccccgcccctgccccgcccctccgagaaccgccaagttggtaccagcccctgccggctgccctcggtttcctaggtaggtgttgggatccgccacgcgcgtgggggccgtcggaagcccacccctgcggtgatcaggttttaggaccagtccaaatcttggatatgggagagtcaaaacgtcaactttgggttgtgtcctgtcggagtcagtgggggagtagtttagcttcttatatcctcagtgggctgccacatcctctcccctccccccagaaagatagctaaataaactttaaattcctcagccccattgccccaatccccacttccaaaccagattgccagggacagcacctgctaggtggaagttctgagaacgttgcgctggagaattcacgcctgaaagcctagcccttgggagctagaggcctgaactgggcggatacgtgcccatgtgtacagtttctgtgattttaaaattctgaatcctttaaatcttaggaaacaagctggatttaaagtgtaagtgcatttactaatcactcccactaaaagttgcatagactccaacagttgtaaatgattacttaaaagaagggatacatcttaatgagtgaacagagtctcttcatggaaaaaagaagtatgaaaaattttgttaatgtatttcttataaaagtattaacaagtctgtgtgtatgagtagctttcccgggagatttttgtcatggcaggaacaacttaaccacttcattgatagaaaagttaagattactgtggcaggaactgagatggacatcataaagtcaatttagcaaaggaaatggacacatagcaataaccacaatttatgtctttatggcactttattctttcgaaatattactaacaatattactttcaaaatattactaacaatatagtctcaagaagttaataatcacatgttcatataataacatacatcagtcagctaagaaaaaaatcatattcccccttatatctaaaattttggttaagagcctgaaggaatattgaaaaaaaaacaaaacaaaaccccacatacatacacattacatacattgtaaacttagtagctgaaatgttgatttttttcttttggctgagcaattaataggcaatggatgaaatcagcattttccaacacccctcttccccacgcacattgatgatgcacaggcagctcatttggacgaattcccaaatctttttacctggccgtgtggttagtgattggtactattagcaatcagctaactacactgcctagtaactagactcatagaaaaaattgcagtctcaagttggtaccccaacacgttgtgacaggcaggcaattcattggttgagttggagctcaactgagttgctagcttggtgaatactctactagacgatggcaaatagacacagtgaatcacagcatacagtattaaccgttacatggatggaggggcttcacctccagggattttgctttcctggcatgagactgtttcatcttctgtgactcctagagagagctaacagtttaactgtatctggagaaaccgcgggtttcctcgcacttgcagcgggcgctcgcggggcaggctgcgcaggacccacgccgacgccgcgcttctcaggcatcttctctcgaaggctgcgggctgcccgagccggcgtcttcttcccggccgggcggcggtgatgctgtgccttgttttgatggcagtggagttagtgattgtaaccaccacagtacaatcagctaatgacactgcctacaaaccgagcaccgggcacccgcggctgcagctcccggacggtccgcagcgccgacgcggggtcggggcccgcctcggaccccatttcaccgggggacgccctaccatggctgggcgcaagcggcccccgaggacacccccgggcccagcgggacccccgccggc

SEQ ID NO: 914421 - DNA, 4001 bp, Homo sapiens
gagttgctaagtcctggatttcttcttcttctaattttttttttttttttttttttttgagagggagtctcactctttcacccaggttggagtgcagtggcacaatcttggcttactgcaacctcggcctcctgggttcaagcgattctcctgcctcatcctcccgagtagatgagattacaaatgtgtgccaccaagcccggctcatttttgtattttagtagagacagggttttaccatgttggtcaggctggtcctcaatgatcctcttgttggtcaggctcctgacctcaaatgatccacccgcattggcccccccaaagtgctgagattacaagtgccagccaccacacccggcccctggatttcttaactatgtattcggttaagatttcttaactatgaatacatagtattatgtatgtattcatagttaagaaatccaggacttagcaaagcccagtttttctagggactgtcttccttccatggctatgagaaagggtgcattacagtgtgtctgatgaactgaagaccatttccatggccacacggacctaagcatttaggttatttcatacttcccttctctgtgtggcaggggaagccaacttaagccgttatatacgatagttggaatgatctttttagaactatctgcccttctccagtggtcaaggacaagccttagccaaaacaagtgatgggaaagacaaagtctgcaggacaacctaccgctactgaaagttctactttgcaataggtccttcttggagtacaaggcatttaacaactttaccctccaacagggaggagtcattcagctcgtaggctgagggatcctgcccgcatcagcacacgtggtccagagccctaagacttcagacgtaagaccagatatcagcccaggatcctggtgagagaactaccggcgccaaggccacagagtcccaggggggctgccccccagcattgagaagtggagtgtcccaaagctgccctggaaacggccttgggccttgtggttcttgcacaactcccacctccccctacagacaactgacagtcaccttacttcaccttccccccatggagagccccggtttaggaccgaacattaaagcttagggactgtctgtggtgggtggagctccagagtacagggtaggaggatgactgtgcaggaggattaaagttcaggacggggtggtggcggatggagttccaggtgtggaggctcagagtccagatgacccaaagggtttaggacggagggaggatggagtttgggactaagaggctcatgaagttcagatctgtggtggggggaggagtcggttaagtccaggataagggagtctgggtgctaggggatagattttggatctgggactactgggggctggagtcaaaccaggctacatttcgggtcggggcacggagccaaggagggagctagggcaggctaaggctgggctcggtggccctggcgaggtcacgcacagctctgggagtcgaagccgtccccagtgatggtgagcaactccagctccttaatccggatctccagctcgcagagctcctccgggtgggaggcagaggcgagcctgggggtcgaggggcaggggaccaggggcgaggcaaccacctcaggccccggcggcggtgagtagaagaagcgcagaggctcgtaggggatggaggccaggccggagggccagggcgagggccaggggcgctcgctggagggacccaggccgggtggtggcgggggcgggggcgccggggcggggagcgcctgggacagggaccgggcccccgccgccccgcccactggcgccccgcccgccttcagcggcacgaagagcttcttccagatgttgaagtcgctgagcggggacgaggagatgccgcggtcgtacagggacgggaaatagaggggcggagccgaccgctggctcatggtggggctgtggctgccgcgccgcccctttggcatcgtttgaatgagggtctgcgtgggaggaaccccgcgccgggagacgcgcgctcaggccccgagtcgccggggtttcgaggttccacaagccccgccccgatggagcgcggccccaccctttcgcctcagcccggcccctaacaggcggggttccaaagcccggacgaccacgtcccggaacgcggccccgcccacctcggctggccgcaccccgcagttagaaagccacgccccctggctcgcctcgcctcgcctcccgtccctcgactccgcccaccgcctcgctcttgctctgcgaccccgctggcttccgttgtcatatcccagcataccctcatccagaacaggcagcgggccagggctgcagaagaaagcttacttcaggcttcctctctttctcccatgagggagaaaagtatttcctagaaacctggcccctgcaccagcagacttacctcattgcctcactggccgcgcccacagcaaagaagtctgagaaaatcagtgtctgatttttcatccactactgtgggaggcagacaaaggagaagaggattgattgggaatggctgttagagccaacctatgtatctgccaaacgttagcagtgttgaggaagattctagaaaaggggatcctcatctggtttgtaatagacctgaaggagtgttttcagtgaaatgcagtttagttctcttccaaacacagatatcaccaggagctaacaggcaacgagctaaccaccaaaaggaaatcctgtccgccctacctcaaatacttcacccattgcttatgagcgatttggacattttgtccaaaggacatgacagctcatttatgtgagtaacctgtattagccatagactgaggggaaataactaatacattttcttgagagcctctgcctaatgatcactggtatgactagtgatgggtggagggcagttaaagagtcagtatcagcttcacaagttaaatatatatatgcatatgtatctgcacacacagtgcaaagtgtgtgtgtgtgtgtgtgtgtgtgtgtagcagcaaagtggagagagtcagatattcaagctgggtagccttggacaagttgcttgacttttaagtaggttttccataaaatagaaataagaaaaccaggctgcctcatagggttgtgatcaaacagaagacggaacagtgtgtgtgtgaaacacttgaacttggacactttgtccaaacacaagaggcagctgtccctactaaggggcatgtctgaaactgggaagctttttcttcccacactgagcttcccacacttagttgtcacacgcagtatttgctctctgactttggcagccacccatcattgtttattcatacaagtgatcactaggctgaggctctcaagaaaatgtatttcccctcagtctatggctaatacaggccatgtgcgatagctcagcacccagcctgtaatcccagcactctgggagtctgaggtgggatctcttgaggccaagagtttgagaacagccaggggcaacatagcgagattctgtctctataaaataatttaaaaaattaaccaggtgtggtggcatttgcctggagccactcaggagctgaagtgggaggatttcttgaaccaaggaggctgaggttgaggctgcagtgagccacaatcatagcactgcactccagcctgggtgacaaggcaggaccctgtctcaaaataaataaaataaaataaaataaaaaatacccttatcttccattagtttcccccacatatttaacttcccataatttactgcccaagaagctcaaacctcttttcctttgtcttatcacttttctacaatcgcccattgttaaaattgtatataagctctcaagccacttctttgggttttcactttgtttctgtaagaaccccatgtacctgcgtaataaactttgtcttctgttaatctgtctttgtcagtttaattctcaggccccaggctctgaacctaa

SEQ ID NO: 914422 - DNA, 4001 bp, Homo sapiens
gggagcacgcccaatcccaggccctggggctgcttcctggcgctcagctttgcccctcggtttcccccgcagctctggagaactatctccggaccccagtgcgggtggcctggagggagggtggcgcggcagggtgagcctgaggagcagcttccaagcttggtagctgttgggccatgtcttcaactgacatcttactgggaaacgcgatggcaattctgtagagaacagagccaagtggccccagccagaggaaccagagctgcacttgggccccaaggctccagcgggaaaaccctgggtcgggatcctgttcctcccttgccagtggcgatctgagccatctgtgtgtcccctggcttctaggagagcattccagcagttctacaagcagtttgtggagtacacctgccccacagaagatatctacctggagtagctgtgcagccccgccctctgcgtcccccagccctcaggccagtgccaggacagctggctgctgacaggatgtggcactgcttgaggaggggcacctgccaccgccagaggacaaggaagtgggggccgctggcccagggtaggggagggtggggcaatggggagaggcaaatgcagtttattgtaatatatgggattagattcatctatggagggcagagtgggctgcctggggattgggagggacagggcttggggagcaggtctctggcagagaaggatgtccgttccaggagcacacggccctgccccatcctgggccttacctcccctgccagggctcgggcgctgtggctcctgccttgatgaagcccgtgtcctgccttgatgaagcctgtgccacctgcaagtgcccgccctgcccctgccccaacccccaccgaagagccctgagctcaggctgagcccagccacctcccaaggactttccagtgaggaaatggcaacacgtggaggtgaagtccctgttctcagctccgtcatctgcggggcttctgggtggctcctgccactgacctcaccggcatgctggcctgtggcaggcctaggacctcaggcggggaggaggagctgccgcaaggccctgtcccagcagaagagggaggcttcctgactgacacaggccagccccatcttggtcctgtcaccctggccccaactattaaagtgccatttcctgtctggactgcagtggatgtatctgcatgggcccctcccgtccccgtctcgctcccagcccaggaaagccaagcctttgtcacacatggtatctttatgagggccttgggtcataggtgtgcatcatagtaatactcggcaaggtcgggcccgtcccgcttgcgctgctgggccctagacaggaggggtcgaggccctcgcggccttgggtgcttggggaggatgccatagtctaaagagagaaaagagggcatgggtggtagggggcagctggctctgatggaactgaagtcacccttgaacagatgtggtttgggatgacaagcccctgaaggctggacttggggcacctcttaggggcgtctccactgtcagggatgggtaggggaaggggacaagagagatactaccatccaccaggccggaaagtggctgcgagagttccaggggggcggaaaatgcctcaggaacagaccgctgagacctgtgggagatgtcggggtgctcagccctggcccagaaggccaccgccacctccttgtgaatggggggatggctcagtgtgggggcacttggcaagccctcgaacgcccagggtaccagggccagccccactccagagaggggaggggcagcacctccaccatccggcccaagtgccctgccctctgtgccccaggagtcacctcagaggctgggagcgaagcagtgccactgccaggatgaggtggaggaagaggctgagcccagcccgggggtgcagagcccccagcatggcgagaaccatctcctacacgggtcctggctcctgtcgtccctatgctggcaggacggaacccgttgccggctcccagggccacctcacaaagggccttcattccaagcctgcgtcagcacctgccctggggcagggccagcagtctcccccgaggcttgtttttgttcttattgatgctgttggctaataggtgccaaacccgatcttgttctagtgttgctgtccaaggaataagagcacacactgtggagtcagatctcagttgaggtcctgaccttgcctcttactagccggacaagtcacttcatctctgtgtgccggagtttcctcatctgtgacgtagtccattacacaccctacagacataggccctccgaagagggcaggggatcctcaccacccagagccccagccattcctacagcaccccccccccacccccactggcatggcaggaggtccgagcaggtcccgccagctgaggagcccagagtggctctctcagccctgcctgtctcagggtctacgtgagagggagtgtgcaggctccctgtgtccccagctcagggcctttccctctccgctctctgcagcttacagcggcctgaggctggatggagggcttccagacatatggtggcagagctctggacctgcccctcaagtgcaggcttcaggagggcagggagggctttgttcactggaatctgcagccctggacccctggtaggcgcccagtgagcctgtacagctcggccctgcactggacaccgtcccctcgcaggcctgggctcagctgcaggtgccaccagaaggcctctggctggctcctggttctccactcagcagccaggctcagcccatttatacctgcagtgcgaacctggctcaccagaaccatggcaagccttcaaaacaaaatccctggccccaccccagatctgtagtatcagaacctgagggccgagcccagggctctggagctttggtaatccagttgcttgagatggccaacctgccagctggcccagccgctctcctctgacagctgaggggcccagggagggaagtcccttgtttccaaccctggctcctccagtggcctcattcatgctcctggtcctgagtaccggaggctgacaagttctggcggttccttcagccccgtcaccctctgcatgttgttcccgcactcacttcccagtggccacctccctttataagtcctggagacaacacgtctccacgagcctgcctcagcatcctgtgcccaccaaggcttgccctgccaggaacctggagttctgtccactctgtctaaccccaaagcccctcgtccttcttgctcctcgtctcctagacaccaccctcttcctccacgccagtccccaagactagctggggttacccttaatctccctatgtctgctgccactgccattgcccctcccactgctacagaccactgcctccaatgtcacggcccccattcttccacctctgcccaccaaagcatcctccaccaggctgctggaatatttacaaacacagacccctccccgcctaccatagaccaggtccaagtttctcccctggatatgtgatgctatgttcagtttggccccgaccttcccctccagcgtccagctcccacctcccatggctccacagagctgtgaccctgggcacacagcggccccttgcaggctgtctaccgaaaaactggacagttctaccggtttcaagcctgcctgagtcaaggcttggccaatggagcccgatgaaacccttcacctctgtcaccactgcaggtaggcagttgccattaccggggcacccccaagctagaccccgctctggacatgccacctcctgccaagtccccagtgtggtgcctgcatccacatgcctgtttcctccgttggtgagaggcggagggcaggggactgtgcttcactgctggtttctgatggccaggcatgtgcccagaaacgcctgttccactaagctggaggccatgggagcccaggcagccccttcccctgcc

SEQ ID NO: 914423 - DNA, 4001 bp, Homo sapiens
agcagcaggccagggcggttccagctggagcagagcaggcagtggggccagacaaacaaagggggcatctgtctacagccagggctgcacacgggacccacccacctggggcccccgccaggagggccccacccacaggtcttctccctttttccagtaatgcttcaaatatagcttcctgagactcccattttggggatgggctaggcattgtcagttccccaaatctaggcccccacatgggagggatccccaagacaaagctgccaacatctccagggaaaggagtttctgagactgaaacttctccagattctggaggagccaatgaccctgtaaagggatggcaggagggccaccagagtgacaactaatgacactgcggcagggagtggccaccatccactgaagcccattaagtctttctggggctttatttgctgctctggcagggagccggccactgcccagcagtcagaagggcgggcactggagaggccccactaacccaatggtgttccctgtgccagacacccacccagagcagtcccctaccctccctacagttcccacccctcttgatttagaaaaatggtctcctgggcacacaggcaggttctggtcattctcccagtggagaatcacagggttgggaaaacaaaagacaggatcagaaagggctcctgtcacccttgtggaagtttttttgttttagtttttatttaagtagatccatagaatccactggcttcggagtcataggcctgggttcaagtcctggcttcactggtaacttgctctgtgacctttgataggtcatgtccgcactctgggcctgagcttctttgtctgcaacgacactggctagctggctggtctctaagcatccttccagcgctggatccaggctagtctaaggtggattggccctttaagagccgaaaaagggggaggagccgaggttctttaaaaacaaaaggggatggggcgtttctgggaggggagagaccgggaggggagcctggagattcgggcagagtctccctggcctggaggaaaccctcaagggtcttaaggcgtgaccctgcagccgggaaatgagtcaacagtctcctttgagagcgaacgaggaggactggttggttccgctagagctgacaaattagggcaaaaaaaaattctgaaaagaagggaagggagaatgcaccggccggaggggtgcctgcctttgtgggcgaacccatcgctttaaaaactgcccgcggtgggaaaagatggtgtgggcccccggggcgcaagcgatgcactttcctagggagaatgtgggagaaaagaaaaagggtgcatgtctctcacaaggccacgagacgagaggagcagcccgatttaaaacagcagagttcggagctgagctcagctccgctggggaaaagcccccgaaggggacccagggtctgggcggacttttgagagaaagcccgattagggagaccacctgggagtctgaaagagaaaggggcgggggccaaagtccagcctcgctccgtggcgccctgccccgtggggcccctcgggcctggcccccaaggcggggcgctgcgggcggcagcggggccctttaagggggaggcgagccgcccgagccccgcgagccgaccccgggagctgggcggggggctcccccgccagccctgcagccgcgctccgcgcccaccaggtggcgcccccggccgccctgcccgcgtcccccgctttgttcggcggcggagaggggccccgagccgcagccctcccttcccccacgccggggcccccgcccgggccgccggccccagctcttaccgccttcgtcttcctctggctccgcgctgccgctcgatccggcgggcggcagccgtcggccccgtgccgaggccactgctggcccggggccgcccctgccgccgctgctccggctccggtggtccccgccgggctccatgcgctgcgctgcggagcggggccccggggcggcggggcgcggggccgcggggccggcggcagcccgcgcggagcgctcgctgcgcggggccccggggcgcggggcgcatgcacggggcggccggccgcacggacggcaggctgctcgctcggcggcgcgggctggaccggggtggggattcctgtctggggcccctggggctcctttaagggctcctgggtaaatttaaaggggccgcgcgctatttcctcctgccagctcgcggggggctggggggaaaggcgggaggcaacgagcccagccgaggctcagcagcctgcgcccgctccggacgctaggggcacggacctcgccgcccccgcgggcccgcaccgccgcctgcggggctccggtcccggctcccaaagggtcactgaggtggcgaggggcgcccgcgtccgctgcgacgcgcttccacccgggctcggctcgcggccaccgccccctcggggcatctcagcgccgggagcgcccgctgaggaggccggggtccctgcccggggctgcctcccgccgcgcaagcgggtcgcgagctccgtgcgggccccggagcggccgctactggcaggggccccagatggctgcggccccgccgagagggtggagccgtgggggcggccgcgccccctcccgcgggagccgcccgggagcgctgagagctcgggcttctcatgggaggggcggacaagcgaggctcccccgagccagccaggggtgggggcggcggccgcagtgactcgggctggggagaggggcgcacagcagacccgcagagagccggctgcgccggggcccgaccctgcgggctggaggtggccccaggatggaagccgggaggagagggcgtgcgcggcggtgactcaggatcctgcccccgcaggcctgggggtgcctgacgaggcccttgacgcagccccagacccccggcccggccctaggaagcgaaaaatgctggccccgggcggggtgtcgggcacctggggaggcgcgttaccacggctcggaagcgctgggcggaccctggctgcgggtcccggggcgcccccggtcccccagctccggagaagcggagcgcagggacccggagaggcagccggggcgcagcagcctggggtcctcctgcgaggaccggcgggaggagcaggtgctcgctttgcctgaggttgggcgcccacaacaaaggcgattcctggagatccaaattacagggtgcgggaggcctgcagggtcttcttatctggaggcgggttttgttccctgcactggcgagttacccagctgtcgccgatggcagttcgtccgcttgtcaccacctactgtgtgcccgcatgctttcagacgctggacacacagcactgaaaaacatgggcaagaccgatactgcctgtgactttccttctcagaggcacccacagcctctgaaaaggaaaccgctccagcctttcgggagccatgggaattaaattacttggaacacaggaaacctgtccccgaagtgcttatgaggaggggacaagaactaagatttcttaagtgcctctgggctctgtcgccgcggagatgtcccgtctcttcctcagcccccatgttgacgtgcttgagactccaccttgggtaaactgagtctcctttcacagctctgctctcttcgcggcaggccctgcgctcaggggggcgggggggggttgcacttcctctcacccactggggtcagaggccctgatgctgatgggtgccacgcaggccctgagatgggagattccttaattcattatgtccctcatctgtgccaggcccgggaacacaaagggaaagtgagacagagacctgggcttcacgcacttctaagtagtatggtttaaaaaaaaaaaaaaaagaaaaagaaagaaagaaaagaaaggaaaagaagctaaaagagcctaatgtcctaaaatgaaagaagcctgttcttctggggccaagggcccttgtgctttattct

SEQ ID NO: 914424 - DNA, 4001 bp, Homo sapiens
cccaggtgcccttcaggctctaaccaaagacatgccccaccctcctggaggaaccctgcggagcgcagagaacggctggagacatagcggccgcggttttccccgcagcgcaggagcgccaggcactgcgctgggtcaactgcggtcagggagtcacctgcccgcgacagcgagcgcgcacccacactctcgaccaacccaggctggcctccagcccactctcgggtcccaacgcccaaacatctcgcattgctggctccgacatctccccacccgccgccaggaatcagcgcagagggagatgcgtcttctgtggcgggtgcggggcgaggaccctgaccccagctctgggaagtgaactgtacggaggagagagctctccatcgtcagctctgcctccgcccctcctgcggcttcacttcagcccggatgccggcgatggggaatagaccagggacgcaggagcacactggaccgggggtggatccacttggggaggcaggcaaccgacccgcgcaccggtggcgcaacctcgttccggtgaccgaagcttgtggaggtagctccactcccggctccctggtccgacatccccctgccacctcctcccccacctccccgagtcttgggagcctggaccccgaaggtgcaaaaagtcaagagcctggaaaactgcactgtgcaaatatattgactttatttgtctcctttcaggagcctcacagacatatccaggtaaaaagatcgttaaataaatgccttcagccatcgcaatgcaaaaataaatatcaatcctccagacgcagtagcagccgcgctgcgcccaaagtcccaacggccacgcctaacaattataaaagtgttcagcgagagtgttggcgtgagtgtgaatgggtgtgcgctggggggcacggtggagcggtgtgcaaaatcggagttgcaaaccatcggacaagggcatggagtggctacccgccgccgactcagcgcgggcgcgcctccccgcacacactcacagcagagttcgcactgggaagagttaaaaaataaacatttacaaggacgaggaaagcggccccgctcccggcgctcccgggccagggcgagcgcggcgaggggcgcaccgaccggttcgcagcggggcgggagtccgagcgcgcgaggagcggcggtcccgggtccttgcgggtcccccgggagcagggcgcgggcactctcggggttcacacgccggtccccgcgcggaccgcggacgcgcgcgtcccccccgcgggcggcgccccttacagggccgagtcggagtcgctggagtccaggctgttcctcagtttgcagctgctgagctgctcccgctgcagcgacaggctctgcgtgctgcggcgcaggcactccaggctctgcaggaacgacttcttggccttctcctcctccatgggggacaccccctcctcctccacctcctggatctcgtcgaaggtcaccggctgcgtcttgaagcgagactggcgcggccgccgcagccggccccggcccttgggcagcttggcgggccgcacgggctgcgggaactcgtcggccaggcacacgaagtgcggcatcaccgcctggtaactggagcagatgcccatcagctcgccgggcttggcggccatggcgcctccggcgtctgcggggccgggcggcggggcgccggggctctccgagggcggccgctgcgccggggccccccgggaggcagcagccgggggctcgccgggcgggggatccaaatctgctgcggggtggcggcggccctcgcgggcccgggccggcgctcctcgggagggcgggcgggcgggcggacccgtcggggggcacggggctcggggggcgctgttccgccgcgctccgaggcgctcgccgccgctgctgtcgccgtctgccccgcggcggccaggctcgcggcttatatagcccgcggctgcccacacggctctgagctcggatgacagcgaatgccatttaaagcgtgcgcgccccgcgcccttccgcctgacgtcgccccgccgctctgggaaagtaacggccccttccccggcgccgcccgccccccgccaaccggctccggaaggcaggccccgcccgcgggggttccgggagaagccgcggccccggagcacgcggctggcccgagctgcgcccggacagggaccctcaatcgccgcgactgggcgggcactgtcccttctgggatccccaagtctgcaccaaccgggttggccgcggggccgcaggtccccctcccccgccccctggtcccagatgcacacacttgaggcgctggttattccaccgccggttctgcgcggggcgcgaggcagctctcagctctctttgcagcctggcgagcctgagcgcccggctccccagagctgagctcggaagaaggggtgggctccccttctggatccttgccacccccctccgcaggcgcgcgcgcgcacacacacacacacacacacacacacacacacacacacacgcacgaatgcaaacacatctcgattattccattccggttcttcccttccctagatgtcttctttatgtttgtctcctcactcccccacccaagtccctcgggcacccccattcatgctctgaagagtgacacttggatatggcactaacaacaacaacaacaataatagctaccatctggagagctttactccaagccaaccatgagctctgttttacgtatattatcctgtttaatcttcacagcagcagccctatgaggtaattggtattctctcatttttacatatgggaaaaccaggcacagaggggataagtaactggtccactagtatctgatggaaacagatgggctgactccagagtccatgctctgacagccccctgctgagggtgagtaccctgagctaaatctcaccagtgttcccaaggtctctaagagcaggtccacagggcagtccctgccctatgtcctgggactcccaagaggaaactgtgagcctggccatggccaagtgggcttgagatgtggggcactgacaggcacccagcagggctcacagggccacccaaaaaggagggggtcagtgggatttggcctccgtcctttccgtatccactcaacacagatttactgagaagttactttcctgctcaggaaaggcatggaagccaacaagaaaggtacagtcctggccctcatgaaagttacattctaatgggagtggggtgttgtggggagagacagatgatacacacacgaagaagaacatgttttgtggtgaaataaagtagggcgatgagctggggatgcaggtggtgagatgcttagagcacgggaccaggaaaggctgctcagagcctggatatttaagctgccaccagaagggcaataataacatgctaagtgcttagtatggccatgctctgcacacttttgatgcgtgaactcaatgtgttcactatattatttaatcctcccaaccaccctgggtaacaaataccatacatttcttatcgccatttacaggtagaaaagtcaaggcacagagaagctaagaaaacttgccccaaggtcccacagcaggaagtagcaagagctgagattcaaaccccagcagcgtggctcctgagccactacactgcagcggtttgccctgcaatggacaaagatggaaccagtcatgtgacaaggtgggaagagagtgtctgggcagagggagtcttagtgcaaagacgctaaggcaagaatacacttggtgtattcgaagaacaaacagcaaggaggcttgttggctaaagcagagtgagagagggggatgggaaggggggacaatcacttgaggccttagtggcaggttacaaagttagaatttcagccgggtgcggtggctcacgcctgtaatcccagcactttgggaggcttaggcggacggatcacaaggtcaggagatcgagaccatcctggctaacacggtgaa

SEQ ID NO: 914425 - DNA, 4001 bp, Homo sapiens
ttcgtgtttgagagcaggactgtgattagggaatatagggaatagaagctgtaaagagactgaagacttttccaataattacagacatttgaaaaattgactgagtactttgtgcttgtgcgaacagcctgtctctacttaggctgagtccctaaaaggaggttctgagggaggctgaggcaggaactctttcattttcccaccccaactttgtgagcttgtgaaagtttggacacctgccttaagtcattagttctttccctgaaacttgtggaatgcctagcatgtaataaagactcaatatgttaaattgatgagtgaatgttaatcccaccttttactcctagagccacaggactaaagaaacttagaaactagcatctttaatggggaaatttcctgatagaatttgaagtaggaggctgggcgtggtggctcatgcctgtaatcccagcactttgggaggctgaggcgagcggatcactcgaggccaggagttgaagaccagcctgaccaacatggcgataccctgtctctactaaaaatgcgaaaacattagccgggcatggtggtgtgtgcctgtaatctcagctactcaggaggctgatgcatgagaattgcttgaacccaggaggctgagttgcagtgagcccagatcatgccactgcactccagcctggcaacagagttgtctaaaaataataataatcataataattttaagtaggagtaaagaatctccattacccaagtatactgaatttatgtgctctaagcaaggcctctgcatgctgctgataataataacaaaaggaatgacatttcatagtcatactggagctgatgcccagggaagaggcccctttcaccaggaggcagtagttctgtaacttcttgatgaggtctctggggaggagagtgtgtggtccaccaagcacaagtatggaggtgcttcagcccaaccctccctcctggggcctcccggtgcagaggaaccttggagaaacccagtctgctctccagagatgcagtcaagaaggtgctgcaggaaggctggaaactactctgttcctctggcttattcttctcaccatcattccttagcacctactgaagacctgggggtgcaagaggctgtgaaatatctgttaattcatgaaacagtatgggtgaataacaacctggctaggactcaaattacaaccacttccattatggctgtgggccagaactgtctttacctatttgaatattgtgtgtttgtcagggcagagagcaaagaacagtgcgttaaaatgtagcccataattatgagattctaaaaggattgggtaattgtagactgagagtccaagagatggaagttaaaagtgattttagtatttcgcctgcactgactggctgtggcaagtctctttcctctggtctagatctcaatttcctcatctgtaaaatgaaataactggcaaaatgagctgcgtgtttctaagggtgtatacgcatacatacatacatacacatatacatatacaaatgtgtatataaaatggtatacatataaatgtgtgtgtgtgtgtgtgtgtgttaattcctttcagaataacgccactatgattaaattggagctgatgcccagaccctgaattcaggcaggctatcgggaaggagggcttggaaagatggacctatgctttctgccacagtgccatcatctctggttctgccaaaagcagcagctccacctcccctgccccaaaccttctcagccagtcccactgcggtttcccccaattgccctgtcactcgttctccacgcccctcctcccagtagcgtccgcggctggagctgaactcacactgctggccgtgctctagggggccgcggccgggttccccgcgcgccccgcaccccagccctgctggcggaggaggctgctcctcttcgcgacccgccttgggcgccaccactgcggtcaccaccaccgcctcctcgcctgtcatgccgcagcggtcttccgagagccctgggcacggtttccttctcagctcagtcgcaggcagcccagcatgcgaggcgtctcgggttgccatagtgactgccgattctccccgcccccagccggccttccgaggccctaggtattccgcgcaccaaagaaggtgctgaagttatggggctggggttattattatcattgaccaaagcaaaggactttccattaatttctcgttaatttattgttaatttctcacacgagctcggcaagagaggctttactattcccagagaatccgagattcagaaaaagcgaaggaaactgcataaggcctcatagctaggaagcggcaccgttggaatgtggactcagaagtctggtcccaagccgacagaacagatcactgcccagaacagaaaagttagaagtggaaccggtgtgcaggtgagtgcaaggcaccgtcgctggtttcacgcagccttgtgcctgtcgcgtcctgctccctgctacacacacgcaacgtgattgaataagtaaatactgaggattcccaactttcacgttgtgaattattatattaagcacattgtagtttccaagctcttttgtattcacaaaataacaaactaataactaactttacagatgaaatcaaattcagcaaattttaatttgaagagcaagtagaaaaattcagggttttatttggagcataaggttgcttttgtcttggtttggttttgcaggccttaaaaatggattacgttgtggtgttaattttatggaagttgaatgtgcattgttttatagtattaaatcgttctacaaggcttgcaaccaaatataggagacctcttctgtctccactgtaccccagagccaaacacttttaataccaaatccttatattgctgctttttatgtttttcaattttagatatcatgttgatttcctacgatgaaagacgagatttctctctctttcatactccctgtgtcacatatacttattgctcctttatactcccattatagataaattgaaattttggctagagtaatatttgtttacattactatgacaattgtattaggctagtcttgcattgctatatacctgaaactgggtaatttataaagaaaaaaggtttagttggctcacagttcttcaggctttacaggaagcatgatgctggcatctgcttggcttctggtgaagcctccggaaacttacaatcatggtggaaggcaaaggaggaacaggcagctcacatagcaaaagcaggagatcgctctctctttctttctctctgtagagagatatctatctatatctatctatatatatagagagagagcgagaggcaattaaaaggttgtgtggaaaggttgcgttccttttttatatctctgtatttttgcactattttctgagagatttttcttaacatgagtttgaatttcaaactgctctccagtacccacagtgtttctccaggcagttcaggcactcctcattcatttaatacatattcattgaatgactgctttgtgtcaggagctattatatgtgctaaggatgcagccatgaacaaaacatacaaaaatccctgcccttatgtagttgagctcacattctgcctaagatttgatttgaacagagttgttgacatgtttgtacgtgtgtgtataacttttacctaacatgtttggagtgaattcatcgccattctcacccagctatgttactgccaacatgccttggcttttgctaagcccttcggctatcagaagtccatatggctgaaataatttgatgggtgagttatggcaactcaccatgagttctgataggtgaattatggcaactcacctatcagaagtccaaatggcagaaataatttccaaaaagttattctaaatgacttatattcactatatccttacctaatatgggtttatataatttgaaagcaaaaacacctagatttcatttgattgact

SEQ ID NO: 914426 - DNA, 4001 bp, Homo sapiens
acctctgtcccagcctcaccttccatggctgtcttctctttctgggcaagccggatctgctggaggagttttctgcgcttcttccctgacagtgtaatgttggcacgtgcactggacctgatgggtaagtggaaataaagagagctaggttaacctgaaccaactgaggtcacacaaatagttctggctatagaaaaagtattaaataggctgggcgcagtggctcacgcctgtaatcccagcactttgggaggccgaggcggctggatcacgaggtcaggagatcgagaccacggtgaaaccctgtctctactaaaaatacaaaacattagctgggcgcagtggcgggcgcctgtagtcccagctactcgggaggctgcggcaggagaatggcgtgaacccagaaggcggagcttgcagtgagccgagatcgcgccactgcactccagcctgggcgacaaagcgagactccgtctcaaaaaaaaaaaaaaaaggaaaagtattaaataaatataatataaatagtaatagaaaccctaaatatttacattgaagaagctaatgaaaggacatagatcgggggcggtggcttatgcctgtaatcccaacactttgggaggctgaggtgggcggatcacctgaggtcaggagttcaagaccagcctggccaacatggtgaaaccccgtctctactaaaaatacaaaaattagccgggtgcagtggggagcacctgtaatcccagctactcgggaggctgaggcaagagaatagcttaaacccaggaggcaggggttgcagtgagccgagatcatgccacttcactccagcctgggcaacagagggagactctgtctcaaaaaagaggaaaaaaaaaaaaaaaaaaaaaaaggacacagaaagtaattaatgggatgggaactcttcctcaagacacaggaggccttgaaacttacaagtgaaatcctatgagtgcctttgggaaaattcttcgagttttatgcgcctatgtgtgcacttttctgtatgtaaaaataagtttacttataaaaatctgtgtgaatgtataacattacttggagaatggagagccaacagatttcctgatattcttttttttttttttttttttttgagacggagtctcactctgtggcccaggctggagtgcagtggcgtgatctcggctcactgcaacctccgcctcccaggttcaagcaattctcctgcctcagcctcccgtgtagctgggactacaggtgccggccacaacgcctggctaatttttgtatttttagcaaaaacggggtttcaccatgttggtcaggctggtctcgaactcccgacctcaggtgatccgcccacctcagccccccaaagtgctgggattacaggtatgagccaccatccccggctttcctgagattcttaacagaatccaaaacccaaagaaaggttgtctgctacaggtattgtgagaggctatcagagcttaggaactaacagccgacagacattccccgcataagcgtcagtgcacaaggtgagctgagaggtgaagctgctccggagctctgcagggaggaaggaagactcggtggggacgaccaacaggaagagggtctagtacttacgcccgcttcttgaggtggtgccgcgtgatcagcccttggtctatcacagccccgaccacccggtgcctcagacgccgctcccgattcaacacccgccggcgtttgaacagcttcttcttcagctcctgccggggagaaagatgcgaatcagatggagtgggctcgccgcgacccggggcccctccaccaggcagccccggcccctcactgatcccatctcgtgcgagataaaagggctcaggaacgcttgaggaaacaaagtcgcggcccccacacagtcaccgttcggggccggttgatctttccccccggagctcccatagtcgcgattccactccagttcacggtccgtacttccgctcagcgccggatccgcggggctccgccccggccttccgcgggccaatcgcaactcgggggcgggtcctcgggctatataaaggagctccgcggtgcgggaggcctttcggagggtggtgagctagtaagtgtggttttagctgtagtagccagattgggcggccgggagtggtgggggtgccgggtggaaggctctgggcggggtctcaggaccctccttttcttggcggggatcgggcttgtggtgccgctccccgtaatgtacggaggaagagggaaagggctctggccccctcggcgtcatgtcttcggtgctggcggcttcccatccgctggttctatcctcaaacgccgggacaccgggaatctcggagaaggacaaccgagatccagctggctcctccatcggggtgctcacactttctcatttgatttcaggtctgcggacgctgtataccctcctccacttcccgctgcagccaataaaggccgttcctaccatagtctgtgtccgcgttcttttttccgggactgcagagttcggggaagctgtacgccgcctttcgctacgcggaatttgcagatcttcccctggacctcaggcctctccggctggagtagggtggacgcttcacataagcttctctggtcgaacttacccgaatctccagatggccgcgctgcgtcgaatgctccacttgccgagcctgatgatggggacgtgccgcccctttgcgggtagggaggtgggggcagagtggagagggcaaggtgggggcagagtggggagggtaaggtgggttcctcgtgagtcaggagtgtagtccctgaaattgtgattctcaaaccctacggtgggccgtgcgtggtggctcacggctgtaatgctaacactttgccaggccgaggcgggcagatcgcttggcccaggagttcgagaccaacctagggcaacatagcgagaccctgtctacaaaaaaaattaaccgggcacgatggcgcctatagtcctagctactcaggaggctgaggtggaggcttcagtgagccatcattgtgctactgtactcaaccctgggtcacagagtgagaccctgtctcaaaaaaaaaaaagacgccagtgtgtatatacgacgtttttgcagtggcgacatagaccaagtgacaccctccaaccgtgcccacaggctcactggctgatagttgcctggcggaccgctgtctctgggatcggctgcatgcccagcctcgtttgggcactgtccccaccttcgactggttctttggatacgacgaagtccaggggctcctactgccattgctgcaggaggcacaggctgccagtcctctgcgagtgctggatgtgggctgtgggacttccagcctatgtacaggcctctacaccaaatctccacacccagtggatgtgctgggggtggacttttctcctgtggctgtggcccacatgaatagcctcctggagggtggcccaggccaaacacctctatgccctggacaccctgcctcaagcctccacttcatgcacgccgatgctcagaacctgggggctgtggcttcttcaggctctttccaactactgctggacaaaggcacatgggatgctgttgcccggggaggtctgcctagggcttaccagcttctatcagaatgcttgagggttctaaaccctcaggggaccctgattcagttctcagatgaggaccctgatgtgcgactgccctgcctggaacaagggtcctatggctggactgtgactgtgcaggagctaggcccgttcaggggcatcacctactttgcttacttgattcaaggctctcattaaagacattttagtagtcctgaccctagtatttctgtgggcaaggagagggctgaagaactgtctttgcaagctatctggctgcaaagtgagaatttgagtcctggcttccacatttactagctgggtgccatattgctgaatgtttctgttccccagtttactcatc

SEQ ID NO: 914427 - DNA, 4001 bp, Homo sapiens
tgtgaacatggtttgtcaacggcagtgctgaggtgtgcagatgcttctgtcggttgccctgacaaaagtgatctggtccagttcttgacgtaagggtttagggactcagtcactcctacccctgagagcttggtgaaggcactgcttaactcaaaggagtcactctctgatgtagggattccatcctgcttcctagtagggcacgtgctttggggcttgaatacccaaaagccctgatgtggaaacaaaacaggaaagaaatgagctggagacagcctgggatgtgggctgctttagaaaatgccctgtatgtgtagctctgtgtctcttagagacagcagggacctgctgagaagggttgtcaggtgtagatgtgcagaacgtcccagctagaatctagctcacactccacatgttagagcagcacctggcgtaaagtatgccaccttctcattctcatactaaagaccccaagttgctagccaactgaatgctgtctccttccagaggaggtgctttttgtaattctcacaaaggtgtcctatggattagttaggtgtcccttggttaggacagggaggagggaaggggccatccacagtggtgaagatggcacctcacaagtgtccagtgcattcccttttacaaagttcttttagacacatggtcttggcaaacctacaagacaggtgggccgtctcccattttatagatgagaaagctgaggcccaacaagggaaagcattttggcccaaggtcacccatggagcactgaggttttttgactcaaattccgtatgccttcctgtcactcttccctcctagacacaggtatgtccagccaatttgttctgtgcctcagtttacctttttgcaaaactaggagaggagatcagaggaatgagtcttgggatccagggtgaggaagacagaaagcaaaaccaaacaaaagcaagcaaacacattctctagtgttttgtcttctgggaacacggaaaacagctcagcttttccataccgctgctttcctagtgggtcctgccccagaagcagctgcccagcaacctcctgaccaaggctggtgcaccccaccagtgccaagggtcttcctgtgcacccagtacccagcctccgtttcacccacactgcccaattcccagatccctggatcctcgtccttccctgaacccccttccctgagcaggtcagaggtgtgggagggtgtgtcaggtgggtgtcatagctccagggaaggaaatggctgttcctggctctgtccaggtggggttcaaaatagtcatcttcaaagagaaaaactgggacacagagctggagagacccagagccccggagccaaggcgggaggtgcagcgatgtcaggctgaggggatcgcagagttcccccttgccctgccactcaccagttaacccttccctcaagccctgccagagccccctccccaacctaccttgaaagcccctcatccttccaagaagtcccactttcacagaagccaattaatccttatttttaaaaaacaaaaaccaatccctctcccccgagaccttccctccatccatccatccctttggaatgaaagcccttgtgcctgtttcacgaaaaggctcccaggtcctcctttcaaggaaaaaggacccaatttccccgcgcctccccagccctcgcttccagtaaagggggaacctcggctccctgcctcccctcagctgccctcacctggctgggggcggcggtcgagtcgggttcggtctgagcccgcgatctggctccgggctgcgggctgcgggctgcaggctgcaggctgcgggtgccgggctgcgcgctgaccgcccgcgctgcggcaggggcggcgggggctccggctgcttttcccggctctgaggcggcagcggacagggtgctggggccaggggccgggcgtggggaggcgtgagggaaagggaaggtcagctagagagggagccgagcgagagcgaagaggcgggggagagacgggagggggagaggaggggagtaggggagagggaggggcgagctgcggggcctaggggctccgcacggagtctgcgccgagcactggacccttcctcatctgtgacctccttagagcttcgtcctctgggtctagagagcaggcatcattaatctgagcagttggggaaactgaggccagaggcagcagctaacgcggggtggcccagagcgctctacagtccagcttccttcctagtgtggggagagagggctagagctggactcagaggctggactagcctttgggctgcaaggacagtggaaggtgagattttggctgggacagatgtccaagctaagtggccttgggggagaggtctgaaggaagagaaggataaatgggtcaatgttgccagtaaaggaagagctgaaaataacctagtttttcctcctcacctccaaattggaaaatgcccacggtcggttaggaaagagggagaagggagtctgcaggcatcagaggggcagcctgcgttccccggggtgaggggcagtaaggaggagagtccttggggcagaatggaattttctgctgggaaggttgctcctgcaagaagggacaggattgagagggcaataggtggggaagaaaggcctctggagagggaaactgatgccctgcctcgctggggccaggctagcaagagtccagcagggcacccgggctgggaacagcggtcttcccatggtaatactcaccagaggcactagtgctggcctctactctgggcttcgagcccgtgggatgggggctcagactccctttctctaggctgctgttctctcccctgacggctgtagaggtgacgacactgcctggcactcagtagatgctgactgagtggatgacttttgaagagctctactttcagcagccaagagctggtgccctctgcctggccctggttgactccagagccatgggctctaattctgcctctgctgcaggtctgctctgtggtccctgagaggcctggacccctgcagaacccccgtcctctggagctttccttttggagctctcaaagtttaccccaccccagttaatctatttgtctctaggaagatgttggtagaggtgattggctctgcttcaagggtgttaggtgaatgatggaatgaattaacgaatatgtgccagaatagaaaggaatgaatggaggtgttttgggctggataatgagggtatttggtgacagagggtgaagcacctgtctagcccttgtcagatcacaactgtctctttcaccaacttgaaaagcttgggccacaggactgtggggaggacaagaagcagggtaagggtgggatgagccacacagggatgtcgaaggagagctgggggatgccaaaagccaacctatggcaatctatggcccttcttagggccatgggccccttctggatgagaagagtggagctgctctcctgagggtgattccaatggtgggaggggaggggaggggagaaggtatattataggataatataatctcagttgaggtttggttcaggctgggatttgacactccctggatccacaagagttctcaccagagaagtgagggttgaggtagagatgggtggctggggcagatgacatcaggatttgcatcaggggactgggatagggaggaagccactgggaaagggatatagagaaagatgatgccatgagctggtgggtgtaaggcagatgggtgggctccagaatgggagttaagaagaggtggcagcaggatccagagaaaagccctaggctggttatagtccctgctccctcctctcttgttttgcagccacaattttatttatttttgagagagggtcttgctgtgtcacctgggctggagtgcaatggtatgatcttggctcactgcagctttgaccttgcgggctcaagtgattctcccacctcagcctcccaggtagctgggactacagg

SEQ ID NO: 914428 - DNA, 4001 bp, Homo sapiens
ccatgatcccagaaacagggagcccccaccactaaagaagaaaggctggagccggtaggagggttcttaggtttattgagtgatctctgagaaaagggccggccccaggagcaggagggggtggggaggatccagagaagcagaggaccaggaagagagcaccccaccgtgggctcctggaccagagcaactgggggacttacacttgccagcacagcacactcctctggtcttgggcagaaatccagccactgccccatgctgccagacctgatcgcagacagccactgttcccattccttgccagcagcaggacggagagtgctctaccccacctccctagtcattcacaatattccaggggggccagccctcctggatgacctggttgtcagcctcacaccctccttctaggagtgagagcatgagctcactttgcagtgggcactaagcaaagactggggagctgtgccagtcggagtacaccagaaatccggagaaggtgctgtctgtcttgatgctggcatagatgccaatgtagtcacccacacccacctgcacccacacttggtcctcaggctccagcctcaccatggccccccccgagagcgaggctggcttgggccaccccccgaaaaactggaagaaagaggcaatggattcgccattcttcaccagatcaaactgcaggctggcccggtagacggtggcatggacggcgaagtagtagaccccaggcacctggcaggtgaacttgccggtgacggcgtcgtaatgtccctgctcgttcaccagcacgcggtcgaagggcaagggtgcgtcagacggcggaggcacccggctctcggagcgcttggcgctgaaggcggatcgcggaggcaccgagcactccccggcaggcccggtgggccccgcgggtcccgcctctcctcgcggcccggggtcccctcgaggtcccggcagtcctgcggggtaagcggggcggcagggtgagagtagcggcggctcagcccgcagcggggcggcgactctaaggtcaccgtacccctccccgcccctgcctgagcttcggccagcgcctcctcccgcacgggtacctcctccaccccttcccgcagggcagatctggggggctggccaagggggctcccgccgcctgggcccctcccccgctcagggctgcaaagcgcggggagtggcgccccctggcgggagacccgagtcccggacaccgggagctggagctgcggccgcgcctgctcggacatcgccaccgatagccgcggcggtgccttcttacccggcctcccgccctcgcctttctctcccggagccccgggcgcgccgtcgcggccgtcgcggccatcgcggcccggcaagccctggctgccatggtggcccggcgtgcctggaaggccggggtgccccgggcagaggctggggatcttgttgtcgtccagtgggggcgagccggccgccaggcccaggagcagcaggacgaggagtggcctcatagcgctggcaccgggagcccggacgccggggtcctctcgcagtctgtggaccaggcaggactggagtcgggacccagaatcctgggacctgcctctctccccaccccggcgcggcccagtcggtccccaccccactgccgtgcccctgaggctgagcgctcgcagggccgagcatccggagagcacaggcaggcgcgagagggtgggagcggccagccctccctcccaccgccggcccgcgccagcctttcccacagtcccctccccagcccctttcccctcctccgccagactcaccccccctcccggctccccgatggcctccttcggggcgctcgctactccggaccctccagttggtggtgctccagcccccgcgcttctccccggccaggcgccccctgccctgccgtcaccccagtcctggttcgctccctgccggctccgctttcctcctcccagactccaagaggaaaccagttgttcaggggccaagagctcccggaccgggaaatagctgggaaataactcgtggtgtcgcccggcggccggccaaagtttagggggagaaaggagggggagagagacttgagctgggcacagagaggcagaacttcgagagacggacacacagggcacctcctgttcccagggccagaggagaggcagggcagtggcagagaccaaggaccagaccccatttcagggagaaatacgcagagagatgagggtggagagttctagaggcagacagccagttggatccctagggcctaggacaggggcctgccacatgaatagatgctcagtacatttttgttgaatcaaggaaaaggtcagaaggcaggcgatggagaagctgaaaaagcagatggaaaggggaagaggcctggatgggaagtggtctcgattgtccggtggcacagtgtggggccagtcagcagcctgggaccggtaaagggacaggaaggagcagggagggtggtagggtcccatgagccccagctgaggacttctcttccccctccctgggagccccagagaaggatgggtagagaccctgctgatgctccttcctttgttcccctgcgtgccagccctgaccggcaaaagaggacgggcaggaagagggcaggggccggcttcagggtcagggctgggcacaagcttccaggtcagctgcctctggcagcctgttgcagttgaagggccagggggtgcccagtagtgccaggccagactggcactggtgctccgcttcctggcagacagagcggcaagggggcagaacactgcctagtggggtgcaacggggcacaagcagcccacacaggagcctccggaaatgctggtagcagggcaggcttgtcaggctctgcggagggagagtggccttcaggcacctgctcccaggctcctcccctcccaggcccgccctccttccctccacccagaagaccttgtaaccgctgaggacctctaccacctcctcctgggtgatcatgcccacccagatgttagggaaggctgtggtgttgtagctcagaccgaggcacatctccacctggacaggctcacaggccagctctgcaggggtggaggggagggccactgtggggactgctcactggctctgtggcctgtggcaagtcaccgaatcgctcggtcctgtgtgtacatgggtccaatgggggtggttgtgaggaagcaagaggataacaaagagacaggctgtacacactctgaggatccctgccatccctgagagcctgctccagcatcgcttgccagccctgggcatcatgcaggcacgtctttaatctcagggaacatggggcacccgcgtttgcagggactgcttgggcatctggaagaaaccccctgctctgtgtaagaggatgccttcatctttggtgtgggctgtggaaaggggctctgggtgacagaagggactggttcttgaagccccaccaatgattcccagattcccatttcccttggggtgacactcagtactattgccaccaccagccgactgtcttccaggactctgtgaagtggtcccagagtcaggatggtgaggccagctggccccgccccctcagggaggttgggatgggacactgtgcagtacggcagtagggttctgtgaggtgggcacccagcctgctcagggtccccaggggcaggcttctcacctgggggtgggaacaaggggccgctgcagttgtcatcgctgccatcggtgcagtctctccacatgtcacacatccactgcacacccttacaccctcctgcctggcaggagagctcactgggcccacaggggtctgcaggcacaaggggcatggcagtgcccggggacatacctacacccccagtacccccagagtgtcctgaccagggtccagagcccttgtctgtccccctggaggtgcctctactgcccccacccacttgcccaggggcacctactctccgtggcat

SEQ ID NO: 914429 - DNA, 4001 bp, Homo sapiens
cacagttggcaaaaccatcacacactgagtcaggtagcaggcagatgagctggtcacagcggaactcatcatgggcacagctccctggatgtgggcaccaggagtcagggaggcccggagtctccacccctttgacaggactgggagtgggtggaggggaagaaagtggacactcaacaggcaggtgggaacacactcaccgcgcccaggggccatagcctggtaccaggcatggaaaccaaatccttccacactgctgtcagagacgaagaccaccaggaggtggctggcattggtgttgagcgtggggggaggcacccttccacaaaccctgcaagaagccaggttgggggtgagggaggctccaagagcagggtcagccagagaggagcttgcctgggccttgcagtcctattttctcaacccccaaactggtgaccatgtggtcaaaaaggctcctctgatgtcccagggagctctgaccttcctagcacctgcacatttatccttgtagcatctactcatggggagataggcaggagatccatgttacagactaggaaacaggtgagagaggggaagtgatcttcctcacggcacacagcaaggtggtggcagagctgggcccagaggtctagtctctcaatttcttcctcggttagcccttctccctgccactccctgattctgctctttagatagtggttcaggacacggtgggatgtcctggggacagagggacctacctgaggagggggccttcaggctcaggggagagttccaagcgatcaaaaaggcaagaggccacactctctatgctgagggcttcgatcttgagctgtattgcatggtctgtggccacctggatatgccacacgcagtgggtgttgggggggtaagggtctgggtagttagggctgctgaagaagccccttgggccagagaggaggcctccacaggctgcagagatggaggttagagttcagaggtcaaaaggagtgaggtcctttattctcaaggtgcctcttcctcaccctcccctcaaccccaccccgtcatcttgggcccttctcccggaagatctgcccccagtactcactggactgtggggaggggctcacgcctgactcctgctgccctttaggggtcccagctgcctgagaggtggtgatggtgggggtggtggtggtcgtggtaaggcctccggcaggcagtgggctatgggacgccccagatgggggtgcagcctgcagctctggaggcgagaagatggagggtggcgttcagaggagctgggtcctgggaggctgggagagcggctcatggagtttcattccaaagccctcgtttcaagctgtccccgggtacttacgggccaggatgatggccaccagcagcccaagcagcaggaggagcaggctggagagcaggaggacacagagccaggagaagcggcagtctggccgtagccctcgaggacgccgacctgcgggttggcaggtggggttttgaaagccccttctgttgggtattcctcatgctgtccttggctcctgggcctctctgtcctcccccaggtcaccccctgggatggttaccatgccagggagctgggacgctgtagctggcatcctctgggaaaactgggggagggcagggtggcccagactcaggctcgaaggcaggattgcagaactcggtctggaagggggagatacttgagggctgagggcagcagtgaccactggtgctgggtcttaggagcacgattctatgtggtccttaccttgctcgattctgttgcctccatgcagaggatgacatctgagaagtccttcatggcacaaggctctgcatggctttctggagtccctgtgacagcccaagacccccaagggcccactcgctgaccacaaactccctgtcagaggggcagcctctactacccgagggaaaaggctgccaggctagaccagttcttgggctgtccttggtagagtggtttggcctatgggctactctgtctctgtgtgggggaagggatggcagccaggaggaattcacaaaggcacgaaatggtcccttaatccaactcagctgaggatgctgaggtcaagcccctggcacagggtggcagttcttaaaggcacaggcggtggctgagaacacccagcagaggaaactaggtgctctgtgcggggatgtgacgaggggagctctccaccccatcacccaaggcactgagtgagcacttagggggtcgctgggaggggagagaagttgcaggcagaagggagccttaggtggtctgagaaagaagcagggtgtagggggtggacaaagccagctgcccacctttcctccccaccagggtgacaggggtattggccaggccgggtctttggaaggcccctggtagatcaccggtgtgaccaggacaagagagaagaacatggcatgagcagggggactggctgctcattcctgggacccctaagcccgcaggagaaaggacagggaagggggagaaggtgcccaggtcttggggagggttggggtgtggagtctagccactggggctgttgcacagtaggaaacctacaccctgcaaacaagattacttcatgcctgtttctccatgggcgaagtcctcttggaaaatcccagcctagccctgctgtcctcagggagaaaggaaagggattggtaatctgttttgtgttagccatgcttaggctgagagtttggcagggagggaagtggggagagagcctcatatttctggctactatttgtagaatgtctgggcaagagggctacatgcagtttctctcctttcataactatgaggtagcgtcaccattttacaaatgctggtgctggcctctgagaggttatgtcactttcccaaggtcacacagctggtaagatacagagatgagagttgagcctaggaatggatagatcttaggctcacgttttctatgatgtacctctttcaccccacattggggctgaggcatgctgggggagcagagggatcagagtgacatgggggcagagtgaggaaccccttggggatggaagcaaagaggacaggctgccctccttgcactcaggaaaggagatgcctccacccacaagtttttctccattcgtccctggagggtcttagtttgcttttgtctagggggtcaagctgtttcctagacccttggaagtctaatggtacatggtctttagggaagagactttttgggagctgtagggacaggtgctcttggagaggatcagacagtccctgaccacaaagtacttctcattctgggtggatcaagacagagcaggattcctgccacactgtgtgttaagagcctggccacaggggcagcttcctggacagagtggccctgcgctgagctttgagaatgatgagctgggagagccacgcccttgggtctgctcctctgaagctgctcgttcgctgtgatcattgagagagaggttgctgtgccggggtctggccaggcactgggctcatggagccgactgagacaaggtgccctcgtctcaaggagcccctgctctgctgtgacagttctcaaagtggggcccggggcctttttttagaggacttgagagcttagaactaggctcataataacactaagacatgatgtgcctttttcacactcattcatgttttccagacgctccgtgacatgtgatatgacattggggtgaatgctgaaggagacgcgagtccagctgccttctattaagccagatgctaaagagatttgcacaaatataaagccacactgccattcttactaattttttttttttgagacggagtttcgctcttgttgcccaggctggagtgcaatggcgagatctcagctcaccacaacctccacctcccgagttcaagggattctcacacctcagcctcctgaatagctgggattacaggcgtgtgccaccatgcccagctaatt

SEQ ID NO: 914430 - DNA, 4001 bp, Homo sapiens
gccccacctggagagcagtgcggacacagaattgaggaaggggcacagaattggctggcaactcttccttgggtcttgagatggaggaaacaaatccatagggttcatttgcttggcaaaccaggggaagccaactcctttgctctggtagctgtctcattcaaaggctaggccaaggaagatggggagatggatgcttgaaacctcaatctccccaccctctgcaagggaggccaatgtccagttgagtcagctatcctggggagttgcttctgaccgagggacaaggtacagggagagttggatgaagaggtgggttcaaggtgtaaactgacagatgccatctggcttttagccagccagctggacagagtaaatagagcaatttcttgtggacatttctgtttccggcatctggggaactagtaaggtaaagcctccaaactcatagtggctggaaatagagaaccctctgagcaaggagctgatggactgtgagagcaaggagagattgctgggtcaggatgggagggagctccagaaaagagagacttctacctcccaccttatctccatctcatgaccacgcttcctgccccacttcctgggaggccagatgcccatggtgcaatgggaggaagtaggctggactggtttgtgactgaccctcaaggggcagttccaagctcatctactggtaggggcactgtcaatctgctctccacctgaacactccccaacccccagtgaaccacaggccagcatggaggagaaggatgtgtttgactgtagcagtgaaattactgtcgggtaggggggtgattcaggctccttggggatctgcctgaccacaccagggatttggggcatgaaatgttaaatgggtgtggtggcatgagaagcaggcaaattccttctgcaggtgcacctgtctcccatgccccaacacaaccagcacccaggcaaggcggaagtgccctcaggcacagggattagcgttgctatgagaacagcaacttgtgcatgggtttggaaccagagtaccttgcccacagaaatggaagtctggggacccagttggatttctacaacctccagccttagcggcacccttttctctgatccgggaggggaagagaagccatagggttccccagtttatgcccaccctcgtctggcctcctagcacgagcagtcagtccctcccctggaaggaaaggctgaagggaccacccaagcgcttggtccaactcaccccgtttctgcaggcctgctcgttcagcgctcgcacccaagcccgctgccagttctcccggaaagacttgaaggcgaagagtgacgccaggaggccccggactcctggctcctcggcggcgccagcccgagtcgcccgcagccgcagcagcgagcgccacacgcccagctcccgcagggaacccgcgggttccccggctaaggcgggtcccgggccccggtccccgcgggcccgcgccagccacaagccccgggcatattgcagcagccaggcgaacaccgtgagcagcgaggcggcgaagaggatcagcaaggccgcccagcccacgtcccgctgcccccagcccggatccatgctccgcgcgggctccgatcccggtcccggctggggctcacccgctgccccgggggagcatggcccgggcgggccgcggggaggaggtgggctcccccggggctgggcgcgcggggtcgggggctctccgcggctgagtgcccaggactagtgggtgccacagggcgaggagaggaggtcctcgggggtcgcgatgccggggtctctgtctccgtggtccgggtctctcctagcttggtcagcagtcggacccgttagtcgccggccagtgcccgactcctcccaccgcgcgggccccgccggaccctggaggggactggtctgcagagacgctggggctcgcgggccggcaccggctccgggagggctgcgtgcgcagagctgacactgacaacaccgccggcgccccgcccccacccgcccttaaaggagccgcacccgcgccgggcggggccaggacagcctggcgctccctcgctggaggagggcgggagggctagcagcgagcggaggaggttccggggttgaaaataggcgggatctttgatcacctcgccccatcttgcaatcgcggtgctcccacactcagctcaaggcaagagtaacttcacttacctaagatgctgcctttgctttcccctatgcttgttagatttccacaggtcggacgcctgtgaggttaagaaggaggtgacccctgtggaaatcaccgcccccttctcccaacacccccagactcagcgacttctagcttcccatttcctgggggaagctaggcccagggtaaggagacgcagagcgtccctcccagatagaagtgtctggcagaggtccagctgatgtcaacagagagaaagcagaacctgaagctgggagaggttgagagtagaacaccgaatttgaattccccccaccatcatcaccctccttcctcttggagcttggacccagaaacagccccattaacctccttgctcgtgtaggtttgttctggagattcccaagcccaggctgtgtgtctgtttttaaaaataatgtatttccatagtaacagctcctgcctatggagcacgtgtagagggggtggtaatgacaagggagctggcaatgtagcactggactatcaatagattcagccacaagaccttgccactctaagtatgtgatatcccaacaagctcccaagaaatggtgctgtaggtacactgcccaacctctggcctcagaagccatcttttcctagactcaaggagttgattcaacctctacaggactggggctcatcaatgcttgctgaggacaggggaaggaaatacctgcaaaaggattcaaaggaatcctgggggaattcacattctcccaagagccccttcttcatacatgtgggaaggtctttggcacacagtccctttcttaaagaggtaggatggaaaggtgttaagtatctttctcccaaacccaagtagttgtctgaggaatgagcacatgagaataagagaataaacaatgccttctgaagtgtgggatggcagggctagacagaaactgacaggtcagcaacaggtttgtctgagccagaggaggtggtggggtagcctgggcctccctagatttccctgtaaggaatgatggggagaggtgggggtgaatgaggtaacctcctgtggccctgcccatgcattgtcactggactgccaaatcagtggagattcctagagtctgggtttctaatctcaaagggaggagaagacatgaaatcaagggaggagagaactcagggccagaaccagggatgcaggaggaagctgtcagtgggaagagcagctagggtttaggggagcaggttatgcaggaagttgtccaggtagaagctttccctatgaagaccctcttcccccaagaatccttcaggaaccctcagaccccctagtgatctccattctctgacttctttgatttattccctcaacttctccactgagtgcttggtcctatgctgccagatactgcttcacaattcagtatctgaactgtgagtctacctagttacatgagtctccctagttagtcctccctctttttttttttttttttctcttttcttgagacagaaagtcactgttgcccaggctggggtgcagtagcgagatcttggctcactgcaacctccacctcccaggtttgagtgattctcctgcctcagcctaccaagtagttgggactataggcatgcgccatcatgcctggctaatttttgttatttttagtagagacagggtttcaccatgttggccaggctgatctcgaactcctgacctcaggtgatcctcccgcctcggcctcccaaagtgctgggattacaggtgagagccactgtgcccagcctagtcct

SEQ ID NO: 914431 - DNA, 4001 bp, Homo sapiens
atctatggtttttaagatatgtaatctttatctaactctcttttaaaaaaatcactaacgataaaacagcaacaactcccttcactcacaaacgatttagactatatcatacaactcagcatttcaatgaagaacgtcttaaattgtaacttttctttcctgccaagatcacacagtcagtgaggacacagactatctaatcttcagattctgccactatttttaacacagtgctgggttcatatatttattggctttagtatttattgggtttcataaagacattaaagtgtaaacaaagcaattaatcatgactttctaaaaaattttcctttaatgaccctgattgtctttcattcatagtaccttttcgggaaaacttaaaggagatttaagaaaccattcctatattatttataccttttttttcctttgacttttctttgaggagtggttatgcctcaaagaagaaaatatatggaatgtatcagatcaggactaattatttggacttctaatgcaaacaccgcctctgccctctatagtggagaaaagacccaccataatccttatggatagtttcaacataaaaattatacacagttgtgtatacatttctacatatggaaatggtatagcaaaaagtgtattctgttctatgctatgttatattatttctactttgactttccgattatcaaccaaacatgcttaactgttttgacacagggagcactagtatgcttcagtctcagatcctcctatctttcctggcaggaaagtcagtatctcaaaactgccttagtaatctttaaacagcttggataagagtaattcccagattgtagcttcagtcctcaacccaatggcctaatgtcctatcactgttcccaatacttcttttctcgctaaactgcctacaatgcaaaaaggcagggtcacccactgtcctttttcccttcgaggcagtcttgtagagattcaatgtcaagtttcctgatctgccctgggttcctaggttgactgttctcactgcagctaacatcccctactcggtgagcttgtgtctccttgagctgctaacctgatgaggactctctgctgcacactctttcatgatctcaggtccttcaggagatcgtcatgcccttacccccactccaatcctatcacacctgtcattccccactcttcccggctctatactctacaattatttttcccaactcctgctcatagtcagcccttcatacttcattcattcaactaacatttaccgagtcctgctttgtactaatccttggtcattcagtaatgtataaaacgtgattcttgcccacaatcacacaacaaatgatataatccctttgccaatttatgtttcttcctgtccctgtggacctcgaaagctacacacacacatacatttcacttcgttatcaaaaccaatcccatcattgtttgttcttctcctctacagtcatcctaccggtaaccttcatctcattaatcgcctgtctgtggcccctaccccagcccctaattcctttctattctctggagggccaattgcccttccttttaaccttctggttccctggctacttccttcttacgtcccttttcttgtttatccagcgggggtgcgggtctccctaaaattccttacaccctgctctcctattacgctttcctcaatctttgatcgctcaggttacctctttttttgcgcccacggctgcccccagacccttggccttttcgttgtttcatgatgagcccgagctcttcttcaccagctcaactccgtctccagcacctaagcagtatcctcccgccatccctccccacggcgcctgcgttccccggcaaccggcgccgctgggcagcctgggaggcaggaaaaagcgactcttcctctaacagtctccggaaaacggtgcgaagagaaggcgccaagacgccttccctccaatacactacaatacccaggacgctttgctacaatacctctccggggttggctggggggcgcctccagctgcgcaagcgcatagggatgcgccctttgtggactccattgcgcagggtgcattgccctgaagagcgctcctccttccggtgaaagtcgtcgggttcccagccgggagtctgcggagttctcatactctgttacccagcttcctttgtatgagtgctgttgcgcacttccggtggaagcgctgaagcgagtgggtggagtttacggagccggtgggcggtaggcggtgctacgggtagctgggtgctgtccaaaggcgacagggcgtcgttaggggagcgagtcgtgaccggttgggccacactcaacgtgggacgaagcttcgcctactgtttgactacgtgcgtgcagcctcccctcgatgtcggccctcgaaaagagcatgcacctcggccgccttccctctcgcccacctctacccggcagcgggggcagtcagagcggagccaagatgcgaatggggtacgtgacccataccccttctccctatgggccaggccccagccgttggagaatggtatctctgggcgttcatagaggcacgggaaaggagtctactgataggagaaaatgttggcggcctggagatatttagatggagtagaaggcagattggggtactaggggaggcgccaagtcaatagaaattggaggaaaaataacgttgttgaagggagaggggaatgaggcaaaggttggggaagctgagagactaacataagggatctgagaatcacttccacaataaaggaggcttagaaaagggagtagaacggtgacaaaggtggaggagaatcggccagggaaggtggagggaagtggggaatgactgagagaaaagttgaggggaattgggccaacaactaaggaaaggtttgggaggagtagatattatcagagttctaatatctgcactgtgagaactagatactagaaaagctgaggggggtagaaaacactcgagacagggctggagaaggaaagaggagaactaggaagcagacgattctagagaattcccagaggtgtaaagacagattcagcgaatgagaggtgagattaggtctcttaagggagaatgagaaagtttagggagtaggcctaaggtaaggtggagaacatagccacgaagattgttaagggtagtaggaatgtgctgagaagctggacaggataagggagagagaagaaggagaggactgaagaatttacagagtgagaagctggacaggataagggagagagaagaaggagagaactgaagaatttacagagtgaccataggctctaaagattgagagatgactataaatacggtttggtgaatggaagtgctgcagttgtaaggtctgggaagcttagaggaagatttgggcaatcagtttttgctgggctagtagatctgagggaagcgacgtactggcctaagactttgaattagtgaagcattgggagttcgagaaatagtttgctggaaaggaaggagagccatgtagaagagataggttttggaattttagatcgttaaatggcttgtgccaggttaggggatacttgggccgaggagaaagaatgaggtgaacatgggagaagtaattgctggaaagtggagagaattgaataggcatttggttttgaggggatatttgtagtttcaaacaggattctgggaattagtgactgtaaagagaaaaggagtaggaaagatacttaggtatgagggctccagagtatatttgggattctagagatgaattggtagatattctttgaaaaaggactacagaagagaaaccttaggttctgaagaagtaatatgtgtaaaaacttatcaaaaaggaggcgagagtaggagatgcagtactgtgacagtaagtcctagggatgaaaagaaaggagaatcctataaaacagtggggtaaaggaatgggaaaaatgggtggaaaaaccagggaaggaa

SEQ ID NO: 914432 - DNA, 4001 bp, Homo sapiens
aaattctgacctcttggagatttcctcactcttccccttcctctttggtcctatgtcacctactaaaggaagccatccctctacatgtggcctcccccggcccatttgtccctttcctggagagcacatgcaccatttgtacttgtagctgactaattgacgttggtctccagagggcacgggccatatctgtctagctggccatgtttcccagtgctcagccagggccaggcacacagtgggcacccaggaagtgtcagctgaatgaacaaatataaaaggggccctgtcacctgcctggtgagtgagaccaaggaatgacagctgggtgggggtctgtcatcccctccctgctcagtcttgtccccatttccctaaactggtcccctgcagccttcttgctcccacttcctcctggaaacactgaggcccccacccgatgcccccccaaccctgtgtccccaccccatgccccccatgccacctccccttcagggaaccagttccttctccaaccctttaccttcaatctcctcgggccgcagctcccggtcctgaagggcacagaggggttaggaattccctgctcctactgatgactgtgcccttccttcttgcttcccggggctccccacccagccccacaatccaacacgcacacgcagggcctgtgtctgtctgattgctcggccctggttcccaccccatcctactcactggcctgggtaaccgggtgcccccttccctgcttctggcctaggtcactccttgggccgtcctcacctactccatcaccctcttctggggcagggggctccctttgctggtggtggatctggggtttgggcagaacctcagacttggtcccgccagcctcaatgtcactgttgatctctcttccatttctagagtcattgctctctcccctctctgcacccccaccccagatctgtgtacctttgctctgatgtccccactcaatcctcttccccctagctccaggagaggcaaagcgaggggcaagggtaggtgggctggagtgcgaggggcaagggcaggtgagctggtgggagaggggcaagggcaggcaggctggcgggcgggtggccgtacatacgagttgggtggcggcaatgctgggccgcaggaagatgcaggcaggccccaccaggctgttgagcaccgagtagccctggacgcctggcgcggggtccccctgctccttggggctggagctggggctggggcaggagccccttggtggggagccgagccactgcaaggggtcctgcagcagagccggccgtgagctggggcagtggccgctgagctctgggcctgatagccctccccactcctctcaccagctgctcctgtctttggagcccggcatgggacagtagggaaggggctggggggtagagagaggaccctcacccgtgaactctttaggcagaaagggtcaatcctctaactgttctgttgggcaaactgaggaccagaaaaggcaagagacttggccaaggccactgagaaagccagcggcagagagggaccttgtgcccagctctgtctcctagatggaggctggctagcagagagcggggacctgcagccgggatggggcagctggacgggcagctgggggacctggagcctggcaggggagacccagaggtcggtgggagccaagatcaggatggccagaggctgtggcttccaggaaaaaaatctccacctggggcagtgggcagcccccaaccccgcccggccctcggagggctctgcccatcccatctgaccctcagggtccattccagcctcctggcctgggtttctcccctgacccctcctaccttagggccccggcgccagggccgcttggcacagttccccatgggccctgaaccatgccaggcctggaaccccgggggtggcccgggtgggcctcggcggatgctgctgcctgaggactcctgccagcccccagctgctcccgatgagagcctgggagtactgccggggattttcctggggttttgtggggaagatcgggggcgggtgggcaggcgggggacttgggcctggggcttgggtcctaatccgggattatctttgagcgtctccgctgctgaggggagccacttgggcccaaggccccctggagagcacagcctccccagactgcctcctgagggtcttccagacgccccttctccagcaccctcccccaacccctgcctctaatctctcccaatcaggggagatttaatgtcttcagaagcagggcctgggtcccaggaggaggaaggcaggcgtgcagtgtgccagggtgggctgggccctccgaatggcacagattccggttggtatggacacgcgggccttcccacacagcctcccagaaagaggcagccacttggctcagcccaggaagcccctgcctctccctgccaggaccccagctgggccctgggctcctcacctcggggtagccccaattgcttgcacttggctccccctgcctggactggtgccccgcccttggatgaggagcagaagggaaccgcctatgtgctgtgggcagtgacagggctcggtgagggtggagattgggaagggaagccaccccggccctgccgacctcagagagtctcccattggactctgcctcctggtcccctccctggactaagtcctgggtctgtcctccggggcccccagttggggtgtggggtccctgctctttgttcctggtcccctcatacccctgcccgcattacctgcccgtaggctgcctgcacctgggcctcgagctcccggagaagctctcgtcgccgggtggctgctgggctgccaggggcctggctggttcctggagtgccctcagaggggctggggtcccccgttgggaggctgccctctgctgggccctggggctgggccatggagatgagggcttggtacctcctcctggctgagggacgctgctccgtccggcctccccagtcctgcgggagagtggtcttgtgggcagccacaggtgtggcctgggtccctgctactcttctttctgtcccttcctccataaactgggagagccccgtgtccccagagtcttgtatcctccctagctccccgtggcccctcgtgtggccctgtcagcctggtgaagcccctcatgctggtcacagactgtgcccggggctccacctgatcatccttgtggccccagtggtcggccctcctgcctgcctttggcctcctcccccgcagtgttctgcctgcatctctctggctcacgcgcacctgatgccccacacacctccttgctcagtttccatctcaccgcctgcccctctgtgccccctctgcctctgtgtctgttttgcctgcagccccgtctccatcccctctgactcgccgccatctctgtcagtctggatccagtggtgtctctgccgtctctgacccactcagcccatctctctgctggctccttccctctgttgctgcaaggtcctttcttgcattggtctttctgtctgtccttccttgctcttcctattctccccaccatcccgctcccaggagagctccagaattctggaaaggccttccccatctccccagcccagagccctagggtccgtctgtgctgcccacctccctgcctccctccctcctccccagggtccctctgtgctgccccctccttccctccctcctccccagggtccctctgtgctagccccctccttccctccctcctccccagggtccctctgtgctagccccctctcctccccagggtccctctgcattgcccacctccctgcgttctgccaggacctccacctggtcctgctgaccttcaacctcttgcttctcaaggaaaaggggtggaggtgggccgggcagcccctgctggcctctcaggcttccttgccatgaccccagcccactccccacccagctgcccgctcttcaactcccagaat

SEQ ID NO: 914433 - DNA, 4001 bp, Homo sapiens
caggctttggagccagatagtgcccggttcaaatcttggccctgctgctgatgtgcgtggcattggctgacttactgccctcccttcctcatcctaggagcagggtgaggagcctactccatggggttcaggttcatggccatgaagtactggagcccagtgggcagcaataaatgccacctccgaacacacccatgtggtccgtgcctcagttctaagatgccatcagtcactcaaagcactcatggtcacccaacagctttggggacagaaaagcatgacaccaaatgtccagctcaattgtaaatcacatccccattttgggaattttaaggaaaaaatgcaggagtcctggaatgaagtgaatatgagatttgtctgaggacaaaccagcgaaggggaaccacacagttcctgccatcagacactgagtcgcaaggcataggtggggtcctctcccatcagggcgaccccaattcaggcagctgccaccagggcacagggctgaggcagggtcacagaaagagagagaaagagagaaggtgccaggtgactagtatcagcggacagcactttatcactgagtcaggggcttctgggccagcgaggcaggaagggctcgggtgaaaggagcaaatgtgtatagtggccatggcaacagacatcccgagccagggtcctcaacctgagccccaaggggctctcctgggtctccgggccgccttgctggcctgccttcccacacagagaggcaggagcttgaacccggtgcccctgcctggaaaccgccaccctccctcactcccactagcaccccgatggactcccaagggccacctcctgccagcccctcgtgaccccctgaactacgcaggctgcccgggcgggcgggctccctgactgactgcgcatcttgatgtgctgcgagacctccaggagctccatctcggtgggcatgtagcccagggtccgcatgcagtcacccagctcccggtggctgatgtagccgtcacggtcagtgtcaaactcctcgaaggcggcctgaagctctgtggaggagggaggtcaagcccaggtggccaggctcagggacagctcccaccccctgccagcagcaagagccactcaccgtctagctcctcggggcccagttcgcggtcctgcagggggagagtccaggatgtccccagggccagccacggctctgtcatccttcctccttcatcccctgctcatgttggcctgggcagggcccagccccatcagagtaggaaaaggaccctgaagcctcgtgggacccaggaggagcaagctcccttttgtgctcctagagcctggagctcccacagagccctggtgtgaattctggctctgcccaccgcccacgctggcccgagacctacccttccccaaaccgcagcaaccctgccccacagcccaggctcagtctggggcagaagaggcagagggcctctcaggggcagggtgagctgagcccaaggggtgtgtctccagccccacccccaggacccccagcccaatccaggtcccacctaaccttcccgaagactcgattgagcaggggcccgtatgtcctctgagcagcgtcgtgcagggagtcaggacgatgtcggtgggactggcgagaagaggccggcccaggggatgcagggggtgcgcccgccggcccctctccagtgctgggagggttattgctgctccccggggcctcggggcctgtctgctccccagagctgccagtgcgctttcgagaccctcggagccccctctccttcttgctcctcttcctggtcaacgggggctcctctgcatcactcttgggagtcacaacccccgcagggggcttctgacggccaatggccagatttgggccctgctgcccccttgcctgctctgtggtcatgggggagggataacagggctcagagacaccacacccctgggcacccttggctttcaggacccataaagctgcttatgcacccccactcttagagctgagagcctaggatcgggctctgagggggattagggtaagtgaggcaggcagccctggccctaatcccagtcctctgccccagggctggccagggcagagccagatgggtccagagaactgtccttggtcagaagcaaggggcaccaggacgtggtggctgccatgagcctcagatgccagatctgctacttattagctgggggatccagcaaattcccctcccagcctcagtttccctatctataaaacatggggaataatgctagagcgcagaagactcagctcatgtgtgacatgggcagaggccttcgttaggcagagaggaccagggaaggcatctcaggtggcaggaggcatgcggacaacggctgggaggtgggaaaggatgagcgagtggcctactggggcccccccatgggtgacatcctggccagagcagagggtgtgtgaaatggaggaagaggccagatcacagatgcctcgaatgccgttttgaggagcacggggggtgatgtgggaggaggtggaccttggggtcttagagtctgctctgggctagagaggccctggggaggagggtctgactgtccaggcccatcagggctgggggagggggtctggctggtcacttggccctactgggccagggttagggtttcccagcaagcagccccataaataattgatgtcctctcagcttgggtttcctgcccacccgccttagcgctgccgggtgccacaaagcaggccccagtgagggccggggggacagctggagtgctgggcaggcaggcacgccctgctcctgctccttccacccatcggcctctgcctcccaggtaagccaggcctcactggtcagggccccagtctcggggtgcctggggctctgatccaatagggaatggagacagcagagggggtcagcctgaggaggaaccctgagggtacggagggcaccaaactaaaggccaagtggctggagccgtgggccgtgggcaggggccagcccttcagggcatccgttccctccccagactataccaccacctgggctctcatcgccctcaaagggaaactccctccccgctgccagcggggaagggcgaggtggggctgcaggcctcttggatcccaggtctgggtgccctccaactcccctcaccctcaccatcccaccaccatcccactgcagagcccctccccctctctttagcagctccaggagacaaacaggggtcacctcctgcctgagctgtgggaagcgggagagggccgcggtggggtggaagatgctggagaggcaccaggggctcctaggatggccctcctgaccccaggctgtggggtcctgaggctcagagacctcatcctgagcccatgagtgacactcgctggaggggagggggttcccactgccccagactccctaccttcgggtcccctgggcccatgggaaccagagccctcccttcttggaatcctaaacactcgaaccccagaggagcaggcataaaggggccttgtgatgagcggaccaaacggtcttcaaactgtgttccctggaaccctggggggtaggggtactcttccctcccttaatttgagcacccccttttagtccatataggagttccactagaatactttttttttttttttttttgagacagagttttgctcttgttactcaggctggagtgcgatggcacgatcttggctcaccacaacctctgcctcccgggttcaagcgattctcctgagtagctgggattacaggcatgcgccaccacggccagccaattttgtatttttagtagagatggggtttctccatgttggtcaggctggtctcgaactcccaacctcaggtgatcctcccaaagtgctgggattacaggtgtgagccaccgtgcccggccttagaatactttacttacagacaaaattccatacctttaacaatgtttgaaagcctccg

SEQ ID NO: 914434 - DNA, 4001 bp, Homo sapiens
agcagagggggtcagcctgaggaggaaccctgagggtacggagggcaccaaactaaaggccaagtggctggagccgtgggccgtgggcaggggccagcccttcagggcatccgttccctccccagactataccaccacctgggctctcatcgccctcaaagggaaactccctccccgctgccagcggggaagggcgaggtggggctgcaggcctcttggatcccaggtctgggtgccctccaactcccctcaccctcaccatcccaccaccatcccactgcagagcccctccccctctctttagcagctccaggagacaaacaggggtcacctcctgcctgagctgtgggaagcgggagagggccgcggtggggtggaagatgctggagaggcaccaggggctcctaggatggccctcctgaccccaggctgtggggtcctgaggctcagagacctcatcctgagcccatgagtgacactcgctggaggggagggggttcccactgccccagactccctaccttcgggtcccctgggcccatgggaaccagagccctcccttcttggaatcctaaacactcgaaccccagaggagcaggcataaaggggccttgtgatgagcggaccaaacggtcttcaaactgtgttccctggaaccctggggggtaggggtactcttccctcccttaatttgagcacccccttttagtccatataggagttccactagaatactttttttttttttttttttgagacagagttttgctcttgttactcaggctggagtgcgatggcacgatcttggctcaccacaacctctgcctcccgggttcaagcgattctcctgagtagctgggattacaggcatgcgccaccacggccagccaattttgtatttttagtagagatggggtttctccatgttggtcaggctggtctcgaactcccaacctcaggtgatcctcccaaagtgctgggattacaggtgtgagccaccgtgcccggccttagaatactttacttacagacaaaattccatacctttaacaatgtttgaaagcctccgggttagtctatccggacccattgggattctacatggcagaagattaagtctgtctggacagtgtctcatgcctgtaatctcaacatttcaggaggccaaggtaggaggatcacttgagctcacgagttcaagaccagcctgggcaacacagtgagaccttgtttctactaaaaatttaaaaagtagtgggtgcacacctgtagtcccagctactagggaggctgagatgggagggtcgctggaacccaggaggtggaagctgcagggactgtgccactgcactcatcctgggcaatagagcaaggccctgtctctcaaaaaaaaaaaaagaaaagaaaagaaaagtctgggttgagccctggcacctcccttcctaccttcactgattctctgaaccttcctgtcctcgcctgtaaagtagattgtatgaggactccatgaggtcatccacttcaagtccttggcataggataattactcaaaaggtgatgacaatggcgcagggagggatggtgacttgcctggagatgcacagcaccgtctctcccatactcggtcattcacaccatcattgattcaccaggcacccactccgtgtccagcaggactctggggaccccaaatggacactaccatggaagctgacctgggtgccactggccacaggccccgcacagagcttgatgatgaggactcctacccccaaggtggctgggacacggtcttcctggtggccctgctgctccttgggctgccagccaatgggttgatggcgtggctggccggctcccaggcccggcatggagctggcacgcgtctggcgctgctcctgctcagcctggccctctctgacttcttgttcctggcagcagcggccttccagatcctagagatccggcatgggggacactggccgctggggacagctgcctgccgcttctactacttcctatggggcgtgtcctactcctccggcctcttcctgctggccgccctcagcctcgaccgctgcctgctggcgctgtgcccacactggtaccctgggcaccgcccagtccgcctgcccctctgggtctgcgccggtgtctgggtgctggccacactcttcagcgtgccctggctggtcttccccgaggctgccgtctggtggtacgacctggtcatctgcctggacttctgggacagcgaggagctgtcgctgaggatgctggaggtcctggggggcttcctgcctttcctcctgctgctcgtctgccacgtgctcacccaggccacagcctgtcgcacctgccaccgccaacagcagcccgcagcctgccggggcttcgcccgtgtggccaggaccattctgtcagcctatgtggtcctgaggctgccctaccagctggcccagctgctctacctggccttcctgtgggacgtctactctggctacctgctctgggaggccctggtctactccgactacctgatcctactcaacagctgcctcagccccttcctctgcctcatggccagtgccgacctccggaccctgctgcgctccgtgctctcgtccttcgcggcagctctctgcgaggagcggccgggcagcttcacgcccactgagccacagacccagctagattctgagggtccaactctgccagagccgatggcagaggcccagtcacagatggatcctgtggcccagcctcaggtgaaccccacactccagccacgatcggatcccacagctcagccacagctgaaccctacggcccagccacagtcggatcccacagcccagccacagctgaacctcatggcccagccacagtcagattctgtggcccagccacaggcagacactaacgtccagacccctgcacctgctgccagttctgtgcccagtccctgtgatgaagcttccccaaccccatcctcgcatcctaccccaggggcccttgaggacccagccacacctcctgcctctgaaggagaaagccccagcagcaccccgccagaggcggccccgggcgcaggccccacgtgagggtccaggaacacgcaggcccaccagagcagtgaaagagcccagggcagacagaggaaccagccagtcagacaggtggggagccgccgacagctttgtccttaaaaaccctgctgagtccgtcaggcctggaaggaggacttgagggaggggaaacaatccagccagaagtctcaggcagttccatgtcagcgacccctgctcccggccatcagccttttctgtggttgctcccaacacacacacagtcgcccgacagcccccaaaccgcagctaatggcatcttgcggggtactgtccctcaacaccccagaccccgctgactattcttccctgggcctcagtcctgctggaggaagacaacagggggcactttccccgggcttgacctgacctccctttggtccttccctccctctcctcctccgggcctggacacaaggacgtgaaacaaaaaagtccctgaagagaagggggcctcccaggagccaccagccccaagcaggagcctaaggccctggtgaaccacaagctggcctggcatggccaagcctggtccactagtccccttcccccaacagtcattgaggctggggcagggcctccctcagcaaggcgccagaagaggcaagagctgcctagcctggattcaaatccagctctgccatgtcccagctgagcgactctggaggagcaacttcaccttccgagctcccgtgtcatcagctgttgagaggatgcaataagaaagtgtgtaaggcattacaagagcctggcgcacgcaggggcctggtgaactagcctttcttctccttcatccacatacaggatgtccctttagaggctggggatggatagaggaggcagtggggagagccaccacctggcccaggcatc

SEQ ID NO: 914435 - DNA, 4001 bp, Homo sapiens
gttgtaaccacaccggcatcggctgaacccaattatctcgtaactcataaattaagaattcacagaggaaaaacacataaacaacatccggagacagtggcatggaggaaaaaaaccctcagcgctggaattgacgctgctgccagacgccccccaataggtttcccaagccgagctcctttgcaagcctattttgggggcaagcagccaacccggcgtcccccaaatctcaagctagcacccccacacatcccccgtctcctacagcgtgtctcctgcggtgtttacataactgtgtgtcctctagcgtgtaaacaaaaggcacagcccaagcggagaggcgcccctgaagcagcaccgtggccccaacgctgtgcccgcccgggcctggggctccgcaggtgggggctgagctctcggcgtcctccgccacttgttgctcccgggtcctgcagctctggagctgcaaggaggggctttgcaggctcagagccctgctgcatcccctcctgcatcgccgctcgcaccccgcggccccgtgccactcggtcccggcgcccgcctggagcctgcagcaggggccagaggacgccgcgcggctgccaagcgcggcgaggtggcgggaagggaggctgggtgcagcacagccggcctctccgctgaggaagagctccggctcccttttgttagcaaaagcaaacactgccctcttctttcccgaccgcgccaacgcgcccggcacacgggcagccacacatcgggctccagccgagtgctcggtgtcttcagggaaggcaccgggcgtgcagagccgcccctgggcaaattcccaagactgctcttcacgcagggagcgcgcggaggcccgcagggtgcccgcctggccgcagaggccgcgacgccccctccgccaccctcgggccgccgaaagaacgggcagccgggaaatcccgtgtccccactcgtggcagaggacgctgtggggcgggcgggctgcgggctcccggcgccttcccgcagaggcggcgacagcggccgccccccccgcggggccgggccggggaactttccccgcctggagccgggccaaaaagacccgcagcagagccgagggggcggagggctgcgaacggccggagggaaacacgagaggcgtgcagtttggggacaggggagaaaggcagagcgcgttgggggaaggggcaggggagatcagacaagtctggggatgtcctggggaccggggagaaatcacgccgcgggcggctgggagtcagccaccaggaggcttcggggatggagaactgggggggccctctggagaggtgggggcgaatggacagccctgggaggtgggaggacctgcaagttacggggagaacggcgagtttagaagggtccggaagggttgaggttgtctttgaaccatccccttcccccatgctttacagcccccgggccccccattctcactccactctgcaccccgcgccaagccggggagagaaggtgtgggtgcagccatccctggggactctcattcacacttagccgggcaggggagaaggggctcacagatgccctcagccccttccctctcagccctgagtttcctctccacactccctccgcttcggatgtaggaagtggggggaggttgtcatggaaacgtttcccccctctgtggccaaggctactggggtgccttcggagatttaggggccaaccggtcggtgcccacacctacctgtggggatcagtgccgcggcggagaagagcaacagcagaagccggagccggagcccgggaggcgccgccgccgccgctgccgccgcacactgggatccgctcggcagcactacactcgccatgtcgggcacctgcctcagactggcggcgttggctgcctccggagcccgagcggacagctaatgagatgctaatgacatgcgctggaggcggagtccgggcagaccaatcacagcgccgcgagcccaacccggctctcggagggcctcgctccctcccccaccccgccccctggcgctggcgttcggcggcgcgcccgcgccacctaggggcggggccaaggggaggggcgtatgcaaatatgtttatgttaaaattcgggttttgctttccccggatcaaggaaaaagtgttctcccgggcgcctggcgtgcaaggactcgggctccagggggcgggtctagcttcttgtacacctttattaggaatgtttatagcaatcgctgtatcagaccgacgactggagaatctcccttaagagggtcctctgtcccgcacaccgagtgcatctggcctagcgaaccagacgttgcaaatttccgtcactcaccttgcaccgaaggaatagatctttgggaacgggggctgtgcgggagtggagagtaagaaggcaggtccccggattgacaaaacaatctgggagaagtgcatgcgtgctttgcacgtccggcggagcgggagagcccgctcaacagcctagcggtagactcggggatagttggagaaggcagccgtagagtcgggttctgagattttccagtcggtctttttgcggcagaatctcgggaaaggtagatcgaggagggtatgctcaggctcctccgcttgtcgagggtctcctccctggttttaatatataggtgtgtgttgaatatatgtgtgaaatatttgtaatattagatatttaagattacacaacaacggaaaaaattagtcaaggcttcaggtgaagagcgggggtggtgggagttggggagagggagtgtggtgaaggcagggtctgccgtgttcctccttcggggctcaaaccctctcactcctcctctgcgcccccagcccttcctaaggaagctggggaccaacaggtgctccgagcttcccctgtctctgggagagcctctcctgctaaagcgacttgcatctccggactcactctccctccccgaaattctctttgctttcttttcagccaggcagccggctctcttgtttgtctgctttttaattacttattttcttcccctctagaagatcgtgtgcgctctgaccctctgttgctcaagcatcaaattgaaggacgagccatattaagtgtaaaggtttataataatttaagtattcatagaatgcagaacaataagatgtaggaaatacaatttgcataataaatatcaatatcacaacagctaaaacaaaccatgacaaattatctgtggctaaatgaccaagagattactgaatgtaaattgctaagtctgagctatagtctagaagagctgcgccaaatgacttccccagccttctgtcctcatcttgctataaaataaataaataatacatatcaaaaaggaagtcatgatctgccaacccaccaaatgagttacacttaaaaacagcctcctattatccattatgcataaactaatttcgagactgcccggtcttcacagccctggatattctgctctgtaattacaggccccgatgcatgaactgcaggcagtccttcagaagtggggaaagctccaacaggagaacagcactacaggagacaggaaaccattgccacgtgggtgccaggataatgcccagtctgcaaagtcctacccgttcttactacctctggcagtgaggtacctgggtcggaccaaatagagagcaaagttccaccaaaattggaataaaaaagttaaggccagccgggcacgctgactgatgcctgtaatcccagcactttgggaggttgaggcagatggatcacctgaggtcaggagttcgagatcaacctggccaacacggcgaaactccgtctctaataaaaatacaaaaattagccaggcgtgatgacacacacctgtaatcccagctactcaggaggctcaggcaggaggatcacttgaacccaggaggcggaggttgcagtgagctgagatcgcatcattgcactccagcctgggcgacaagagtgaaac

SEQ ID NO: 914436 - DNA, 4001 bp, Homo sapiens
cttgtgaaagctaatggttaaattttcaagaattttgcaagctgagtgcagccattattaaaaattaaatgcaaaaacttacagttagtgctgaacctgaaaatagtttcagtttaatagatttatatgtgggtgagaaatagatcaacaggtaaaataccagatttaacaataacaaatttagtggcaaactatttaacagaataggatgcaattcatttttcaaatcatggctgaataggataaataggatggctacacatacaaaagtttggctaaaagcaacaaaagcattttgtgagactcagtgggctatataaaatttataataggccgggcgcggtggctcacggctgtaatctcagcactttgggaggctgaggcaggtggatcacctgaggtcaggagtttgagaccagcctggccaacatggtgaaaccctatctctactaaaaatacaaaaattagccgggcatggtggtgggcgcctgtaatcccggctacttgggaggctgaggcaggagaattgcttgaacccaggagatggaagttgcagtgagccgacacggtgccattgcactccagcatggatgacagagtgagactctgtctcaaaaaaattataatgaagaatattgtctaaatatttatcactacttataaattgtgtaccacacatttttatatcaaaaaattatatatgtgcatgagtacataccttaccccggccccctgtcggtttttaagcattcagtacaccacacttaagaggcatggaattgtctgataccagtgtggttctggcttcaggctgtcttacctgaatggtgctgcatggaggctgcctgcctgcaacaggaccaagatgctgagagccaggaagggggagaacttttggaagcccatgacacctctctgcaagggaagaatgagataaaccacctgcgccagttcgaagttctaggagcccacagaccttggctcctatcctggttttctgtcttgcttctaacgctctggctttgtggcttcagactggtcattatatttctcttcttttttgtttcctcatcagcacagtggacttctgggaggttcagtgggcctgtagcatgcacagtctgatagagctggaggagcgatcctagagggagagctgagtgggggaggtctcagtcctacccttctccccaaagccacacagatacatataaacctgttagccaggtctctgtggaggacatgctcccaggcccctgtcacagaagctgatcccataaggaaacccagagctgtcctcctcttctggggcttttgcatacaccttggtgggaggggtgggatctatccacagagattatctctgcaattggaatctgagaaataaaagaatcaattttagtgctcagcctaagctccgcctgctggcacctcagtcccctgcaggaaccaagttttactcttaaattgggacccaagactttctctctttgctcccagagcctgtgactggggcttgcagtttagggctgcttgtccctcagtcgtcgtgcctatttgccacccatccgctctgttccaggttctgaaccaatttccctgggactgctgggctccagacgccgtccctgatcgcaccgtctgcggaaagtttctcttgcctcaggctctgtgcgcggtccctggggagcctgagtgtcccgagactggcctaagcctgtgtgcagtgcgagagagtaagactggagtccgcagccgagcaggaagagcgagccgggggattgagactgtccgatccaacctagggcacgagcctggtataaatcgcggactaacagagactatctgatgaagagactaacggagagagagggagaggaggaaagggagtgagaaaatgacgaatggagggagagggagggagagacatatacctgagccaggatctcggggctcacctggcgggaggtggcttggatcagaggcggtggcagcggcggcggcggcgtccagccagagccctgtggaagcggcggcgacacttgggctgggcagtgtctctgatgcctcccagcgccagcgactgctcttattcccgccgctgtgggtcgggaaagttccgccagtgcacagcaaccaatgggcggaggggtcctttgcccctgggttgcgtcaccctcatgcttccagaacctggaggatccagcaggaccgtcccacttgtatttgcattgaggtcattgatggaaatggtgggggatggtgggggcaccaacaagtaacgcccttaaagtgagcgggaatttgagggcagtttgacgtcatggtgaatttcacctctcagtccggcctggttttgaaccctcgccccactccacccctggtttcacgatttggcggaaagggtccaggattgtagggactcttccaactctgatcccagacccctgcccaagtgagattttaaaggttaatgcccctaagggtgggttctgggcccaagaaatctgactccagtagctggtattacccacagagggccagggctcgtgggaaacaagagacggagctgggagcaagaactttgttagacaggagttcaattacagttggcccaattcctggttgtgtgatcatgggcaagtaacttcacagaggctcagtgtactcatctttgaaatggggaccacaatctcatcttgaaggaatattgtgagaaacagcccagcgcctgggcctcagataggcagggatctacaagagtttcctggtccgcacaggggattctgtaagatctccatggatactttccgaatctccatctccccggactgtcccggggtactcttcagatccattacatgtgtgaggagggggccgatgacctgctgggcctgaggggtgagttgcaaggtacagatgcggaagcctccatccagacctctggacctcccccttcctaccctgccatccatcacctgcctgagccgtttgcacagctgcccctttgcttccggctgctgtttgccaagatgtcccagagacattctattccggccccgtacccccacccccgcacttcagtcctctactaaagagcaggcaggtgtgacagtgctgtgtggtccctgcctagatcaagctcacactcgcttccggtcacactcatttacacacacccaaacccattactgtctcccaacatgtgcccactctgaatcacagacactaaaaaacagatactggccagaagagtatcctgaggtgttcactcaaacgtgtcccaagcctgcctccgagtctctcgggcggtcgcatccacacactcgcacgacgatgacctgcttgcatcaaacctgcacacatcacgaacaggcgccctccatcacacccaattacgcgtgacctcaacagctctcacatcccgcagaaccgggtttcagttccactgtgcctgagcgttcagctcagcagaggtagggactaaggcgcttgccgcccacagcgtccagagtggcaagaaagaagcttttcagcgtctccaccatctcccggtggaacgcgcagcgcgcgatctgctgcagccggtccgggcgctgcctgtgcggtgagcgcagcagcggcatcccggggctgtgggcggaggcaaggactctagcttgaggttctttgaggcagagcagaaattagcccctaggtgtgccgtccgtggcgcgagtcacggaactccaggtaccccggggtcgtgtccgcacctttgtcctcagtccccagaagcgtcgaaatttcttagcacgacacccctgcctcgcgctacatctcttccccctagggggttggtggcctccgtgctcaaaggaggcagcgggaacgcctaacttctaagatgcccttaattgatctcctccttcttaactacagcgagggaataacaactcggggctggggactgggtatctaagactcgctctccgcagggtccgccggcagggcggccacag

SEQ ID NO: 914437 - DNA, 4001 bp, Homo sapiens
tgggtctattcctgacttcacccttaccagtcttaactcatccaatgctaggagatctcccagtactgcaagagcaatttccacagtgaacgattccacacctccccatttcattttctatcagttttcacaaattgagttttttctatgtctagaaaaagcttctacatctatgttctaacagctttcagaaacggagctttttattgtgtctaaccacacacagtccctccaggtgcactgggacctctgtctcccttggaacttgagaaagggagcctgctggacaaatcagcttgctggaccccttgccagtgtgttctctcctgcctcttgggatccaccttcctgtgtatgctgcggggagaggagtccctgtgctgggcgcttggggaacctcacctggagccctgtgtctcctgctcctgcttcagctcactggccttcatctgcacatagtcctgcaccagtgcagccagcaggaggcgcgcgtcctctttactgagtgtggccgggtctgggctgctctccagggcagacctgtggaagggaagcaaactccttgcaggctgtgagcccctgactgaccctccccaggataggcagccaggcttcctggtctctgcttcttcccctggggatgtggccaccgcgactcccaggggacgggcatgaggccagggtccacctgtgggcactgattcaccaggagccacgcgtgacttcagaggcacagagctgtctggtcctaggggcagtgggagcagaaggcgcctctggctccaggctgtctcacctgaatggcgccgcctggaggctgcccgcctggtacaggaccaagatactgagagccaggaagggggagaacttccggaaacccatgccgcctctctgtaaaggaaggatgacgttactactgcaccagcacagatctaggttccagtcctgcctctgccacaactgccatgtgaccttaggcacgttacttcagctgcctgagcctctgttcccttcatttgcaggaagggctgctgtgaatctcaagagacacattgcagtgagtgaatggcttgatagagcggaaaaaggtgtcctaggggaagggtggagagaaaggatgaattttggttctgttttgttgaaggccagggagaagccacacgcgcccgtgcacacaaacagacacttctgccctgatttatgcctaaaccaggcgtggacgcaccttgctgtagacctgctctccccttctcgccttctcctctgctgggcttcgcgccaacgcatgcgaggggaaggtgggaagggtggattggaaaggagcgctcatttctcagtcttggaactgggaaaaatttttaacgtgccagttacgggtgtctcaggactcgcccgcaaagccagccctctgccggagcgcgttttagcagcagatgctgagcagcagctccgcgaggtgagcgcccagggttctagtccgctaacaacactgccttagatccggaccggaatcccgggaaggctcaccagggaggcgcctcagaggaaagctcagggttccgacctcccgggaacgaaacatgctcccgaaggacaaagacggcgcagggcgctcccggacccaactctgcagaatcctgcgctcagccaggccccaacgccagggctgcagacccgcctacctccgctcgctgcgcttccagcgcccacgctgagccatggggatgcttgggctcctctcgcactggtaggagaaactgccaggacaaccctaaccgctcgccttctacggggcctggaagagagctaggaccaccgctgtaaggtaggaccagatggcggcggagaggcagacaggcagatggagcaaactggatgaactagtcgaagaagcaggttattcgagtgagcggaatggggaatgggaagttcctcacctggcgactagagtttcagggcagcgcgagcggccggtcgacccgggatgaacaccacacctgctgtgggcgccttccccgcggagaccccgctcttattacagagatagctggagggggggggtccccaccagcccgcgcggccaatccaaagtggccaggactagccaatcaaaggaccgaccgagctccgattgcgtcatagctcgcactgccggcactggtactctggagcgggggcagtccgccccgctgtcatttttttcattgaggtcattgcttgggaagctggagagcctgggagaggacagagatttttcaactaagagtcggggcaagtcgaggagagtttggcgtcacctacagtgaggggccagagctgctctcacctccttggctcctaaattcctgcctcgcactccctcctgtcacgccagtgagggacccgaatccagccacccgaacccccagcgaggttgagcagtagtagtcctgggttctaaagggaccacagctgaaagagcccacggcagggaaggagggggggggagggaaaaggggagggaggggtcctcaaaatttgatctttttggaccacctggggtgcttccctggatatcctccgacccctcgagccctggcaacctgggcacccaaagaaggctgttttggtgccagtctggcagccagcccttctccacctcactcctctgggacgggcaggagccgaagagaggttggggagagggctaaactgacatagcctgcatacaaggctcagcatccacctcctccctcttcccctatatccccaaatcctcgaccgcgggtccagcatcccccacgccaagccaggaccctccactgctgcgccgaagttggcttacacagctgccctgcaactctgccacctgtttgccaagctgcctggcggagatggtctatgcccgggtctctatctctctcgttccacacccctaccccacttcgctgaagcgcctgagagctgagcgcgctggggtccagctgccacccacggaggggagcaggtgctgcagcgcgagagtcagcctgagaattttcacacaagttccactcgcgactacagaccagccagtgcgcgcatcatcactcacatggcaggacccccaccacacgctctgccttctgcattcacagacagtccatcagacagccagcactcactggaacagatgcgccctcaccagctgctccgaaaagggagcgtgcgcaggaacccaaactaaccacacccatacccgaaagcaaccccgtgtgtttctgtttccaaaaacaggcgtgttttatgcaattgggggtacatactgtcccctaaacatgcacaccgacacatgcacgtccacgcacacaaactcggcctatccatcttttctgaaggaaagccgggttctgggagtcggcactgccagctcttcttgctcccgggttccaggagaagatcccagctttggcagaataggctaggaaggagctgggggtaggggcgatggcaagaaagaaaggggcgcctctcaccacagcccccagccccgggcctccggttcgctctctgacgcttggcagcagcgaccctaaataagtccgccggcgcccactgcactcctggagagcattcgggaaaacttgctggaggctgccgggcaggaagcaaagccagaggctggcggaacccctgcaggtgatgctcactgtttctgcgggtcagaaaaaagttcaggggatatctgtctaggccctctgggtccttttcttgtggcaggacccagctggtgggactagggcgggttggcctccagcacccgtgcaatggaaactccaggtaacacccacgaagaatcgggaccgctgactcgggtgactgccgcccggcctgcaactcagatgcgcagcgtgcactgaggcagggtgacctgcagtcgccccctcccctgggaaggcagtcagaactgttctagaagtagctccggcctgtggcggactcgaagtaaggcaggaggacttccaggacctttgtagtaccac

SEQ ID NO: 914438 - DNA, 4001 bp, Homo sapiens
gacgccctgggggcctacccagtgctccctggcagatgtctgtgcgggtagctccatccacaatgaactgggggtttgacagcagttcctacgagagacccagagtcctgttcctcggccagcccctcccagaaattggcaccaggccaccccagaccccattccccaccagggacatggagtcccatccctactcctcatccaggatctggcttagccgagtcccacccaggatggcccctctcaccgtgggacgcttccacttgatgccataggtcttggaggaattgggacccaggtccttgtaacccaggctctggggtaccggggggaaggcctcatcacggaagagggtcccactctgcaggcatcgcacccgcagctgctcataatcctggcccaggtacttgatggcattctcatggcggcccaggcccagctccctggcccgctgcttctgcacttgggctgacaccccagtgcagtacaccggcgtgatgatctcctccgacatcctgccggacagatgggcctgctcagaacccaggccttcccaagactagaacctgggctcctgcctgcaagctctgctctcctgcccctgcttatccatccccaaacctagggtttccctgcctcactgctcccctcacagaagtagggttctcagccacctcccggtgctcccagtgaatccaggaaagggatttcccagttcccaggcgtgccggccacctctcctttcccggatcccattgtcaggggcttgcagctctgtagtgagccagcaggtcaggtggggcagggcggagcctccagacagcacaaggaactgggcaggtgggacacagcagggaaggcctctttgatcctgttcacaggcctgcaaccccctccccaaactaaccaagctcctggtgcaccggccccttgccgtgggctgaaaaccccagacggtcggggtccccctcctcaggcccccgcagcaggctcgatatcagagctggtgggccctagcccagcccctggggacagcggtgagccaggctgggacaggcgcctgggctgtgccgctccgccagcccccacccctgctccaggaacgcagaggcccccgagaagggaccgtgctggggcagcccctcagcccaggagcagtggccagggtcaaggaatcccggctcggctacccagcttcttacctgggggaggggtgtttgggggtcgctgcagtccctgaggctggcttcccggtggcagctcagggcagggcccaaccaggaagagcgctcctccccgccctcctcccgccgcccctccgccctccgccctccctctctccttctcctcctcctcctcctggggctcctaccccgcttcctctcggctctcccttatctctccggcacggtctctgactatctcttactcacggtgtctccccgcccctccctccgcaggccgggggccaattccgcgagaggacaaattagtaaaaggcagagcagtccccggggaggggccagcgcggggggggatgggggggctggggcgcggcggaagggcaccgcggggaacggagggggagggccgggcagggggtatttttaaccaggggcagcagctcgagttgcagggccggacggccgcaccccacgcgcgccctggcgggcattccggggcgattgtgcggcggcgccgcctcccgcagccccgggcccgcccggtccccagctcccctcgctccgcgcgaccgcagctgctcccgccgttcccagccagccccggcgcggggccgagattacctcgggctgcggcagctgctctgaggaggggccgggctggcagcgagcagacccctgccggacactcagcaaacggcagcctcaccccgcagggccgcgccactccccttccccaccccaccgccgcgtcccggctcagcgctccccggggaacgcagggggaccgggctcgctgcgtgaccttgggtaagtccctgccccgttcggcccgactttccgcatgcgtgcatcctatgggatggggttgggcaattgtgggagcccatctttctctaacgttctggggtttcttgaacctggaaacttagagaggtggacatccctgttctctcccccaggctctcagcccacccacctggaagcgcccatgtgtcaccttacccaggagagggcggcagaggctgcgagcaggacggcagccccctctccccacccccaggaccctgagatcctgcttcacgggctgcaagaagttggggggccaggattcggcgcggaggccgggggtgtgggtggggagactgcagagactcccgagacccccccaagtcagggcttttcgctggtctcgcagccccagcccagcagctgctgcagtcttgcatgttgtggatgcaagcattttgctgaggaaactgcatagcgttcccaggactctagggcccacgacccctcaaaagttaagagccgctgatctaatctaaccccactttcaccctcagttaacaaaagaggaaaactgaggcctgagagggtgtgacttgcctgaaatacctaacctggtgagtgatgggtggaaccagctcctaggctttctgcgcaggtgtccagggacagagaagggtggtttaaactagagaggtggcaggcagaagtagatggatttgataactatttaggatacaccatcaaaatttaactcaaactggattacacacctaaatataaatggccaaaccataaaacttttttttttaaaaatggagacaatcttaacaatattgggtttgaaaagatttcttttttcttttctaaaggcagggtcttgctttcattgaccaggcaggagtgcagtgccctgatcacagctcactgtaactttaaactcctgggctcaagagatcctctcacctcagcctcctgagtagctgagactacaggcacgtgccacgacacacagctaatttttaaattttttgtagaaatggggtcctgctgtgttactcaggctggtcatgaactcctgggctcaagcagtcctcctgcctgagcctcccaaagtgctgggattacaggtgtgagctttggcacctggccagatttcttaaatatgacacaaaaagtgtaaatgatagaagaaatcaataaattgaacttcatcaaaataaaacgcttttgtttctcaaaatgcacgaaactattaaaaatgaaaagataagccatagactaggacgaatatttgtaaaaattctatctgatgtaggacttgtataaagaacttttacaattgaataaaaatccaataaaaatggacaaaacatttgtttgttttctggtgtttgtttttgtttttgagatggagtcccgctccatcacccaggttggaatgcagtggcgcgatcctggctcactgcaacctccacctcctgggttcaagcaattctcctgcctcagcctccccagtagctgggattacaggcgcccgccaccacaccaggctaatttttgtatttttagtagagacagggtttcaccatgttagccaagctggtctcaaactcctgacctcaagtgatctgcacgcctctgcctcccaaggtgctgggattacagggtgagccaccgcgcctgtcaaaaaatggacaaaacatttgaacagacacttcatccaaaaagatctctggatggcaaataggcacattaaaaaacactgagtgcattactcttagggaaatgcaaattaaagccactagaaggactgcttctaaaagaacacctactagaatggctaaaagttaagatcaaccataccaagtgttgttatgttgtcaaggatatagaagaactggagctgtcatacaccaagagagggtaaaatgatcaccaccactttggaagacagtttggcaatttctttaaaatttagcgatacaaagaaatcagccatcaagctacaaaaagacatagcataacctt

SEQ ID NO: 914439 - DNA, 4001 bp, Homo sapiens
ggtgtggccctaactgcaggtattgtgggtcatccttccgcatctcccccagtgcctgctgcccctcctccccaggggagccctcacctggaaatggaagatgccggcatagccattctggaagctctggccgtgcggaaccactcggtgcaggagggtgtcgttgagagtgagggaggcgatggccgccaagagccagcagtcccctggggcaggagggatgcacattagcctgctctaccaacctgccccggggggggaagcgggtgctagggagaatctggggttccttggccagggtgccacttaactcccctcagcttgcagaaaagacccaggaatctgggcaaaccagccccagcgctgatagccagatcctgcctgggcttgcaagagggaggggttggggcagagcctgaaggagcgggaatggggaactactgtggaaaaaatacccgggacccgacgccctgggggcctacccagtgctccctggcagatgtctgtgcgggtagctccatccacaatgaactgggggtttgacagcagttcctacgagagacccagagtcctgttcctcggccagcccctcccagaaattggcaccaggccaccccagaccccattccccaccagggacatggagtcccatccctactcctcatccaggatctggcttagccgagtcccacccaggatggcccctctcaccgtgggacgcttccacttgatgccataggtcttggaggaattgggacccaggtccttgtaacccaggctctggggtaccggggggaaggcctcatcacggaagagggtcccactctgcaggcatcgcacccgcagctgctcataatcctggcccaggtacttgatggcattctcatggcggcccaggcccagctccctggcccgctgcttctgcacttgggctgacaccccagtgcagtacaccggcgtgatgatctcctccgacatcctgccggacagatgggcctgctcagaacccaggccttcccaagactagaacctgggctcctgcctgcaagctctgctctcctgcccctgcttatccatccccaaacctagggtttccctgcctcactgctcccctcacagaagtagggttctcagccacctcccggtgctcccagtgaatccaggaaagggatttcccagttcccaggcgtgccggccacctctcctttcccggatcccattgtcaggggcttgcagctctgtagtgagccagcaggtcaggtggggcagggcggagcctccagacagcacaaggaactgggcaggtgggacacagcagggaaggcctctttgatcctgttcacaggcctgcaaccccctccccaaactaaccaagctcctggtgcaccggccccttgccgtgggctgaaaaccccagacggtcggggtccccctcctcaggcccccgcagcaggctcgatatcagagctggtgggccctagcccagcccctggggacagcggtgagccaggctgggacaggcgcctgggctgtgccgctccgccagcccccacccctgctccaggaacgcagaggcccccgagaagggaccgtgctggggcagcccctcagcccaggagcagtggccagggtcaaggaatcccggctcggctacccagcttcttacctgggggaggggtgtttgggggtcgctgcagtccctgaggctggcttcccggtggcagctcagggcagggcccaaccaggaagagcgctcctccccgccctcctcccgccgcccctccgccctccgccctccctctctccttctcctcctcctcctcctggggctcctaccccgcttcctctcggctctcccttatctctccggcacggtctctgactatctcttactcacggtgtctccccgcccctccctccgcaggccgggggccaattccgcgagaggacaaattagtaaaaggcagagcagtccccggggaggggccagcgcggggggggatgggggggctggggcgcggcggaagggcaccgcggggaacggagggggagggccgggcagggggtatttttaaccaggggcagcagctcgagttgcagggccggacggccgcaccccacgcgcgccctggcgggcattccggggcgattgtgcggcggcgccgcctcccgcagccccgggcccgcccggtccccagctcccctcgctccgcgcgaccgcagctgctcccgccgttcccagccagccccggcgcggggccgagattacctcgggctgcggcagctgctctgaggaggggccgggctggcagcgagcagacccctgccggacactcagcaaacggcagcctcaccccgcagggccgcgccactccccttccccaccccaccgccgcgtcccggctcagcgctccccggggaacgcagggggaccgggctcgctgcgtgaccttgggtaagtccctgccccgttcggcccgactttccgcatgcgtgcatcctatgggatggggttgggcaattgtgggagcccatctttctctaacgttctggggtttcttgaacctggaaacttagagaggtggacatccctgttctctcccccaggctctcagcccacccacctggaagcgcccatgtgtcaccttacccaggagagggcggcagaggctgcgagcaggacggcagccccctctccccacccccaggaccctgagatcctgcttcacgggctgcaagaagttggggggccaggattcggcgcggaggccgggggtgtgggtggggagactgcagagactcccgagacccccccaagtcagggcttttcgctggtctcgcagccccagcccagcagctgctgcagtcttgcatgttgtggatgcaagcattttgctgaggaaactgcatagcgttcccaggactctagggcccacgacccctcaaaagttaagagccgctgatctaatctaaccccactttcaccctcagttaacaaaagaggaaaactgaggcctgagagggtgtgacttgcctgaaatacctaacctggtgagtgatgggtggaaccagctcctaggctttctgcgcaggtgtccagggacagagaagggtggtttaaactagagaggtggcaggcagaagtagatggatttgataactatttaggatacaccatcaaaatttaactcaaactggattacacacctaaatataaatggccaaaccataaaacttttttttttaaaaatggagacaatcttaacaatattgggtttgaaaagatttcttttttcttttctaaaggcagggtcttgctttcattgaccaggcaggagtgcagtgccctgatcacagctcactgtaactttaaactcctgggctcaagagatcctctcacctcagcctcctgagtagctgagactacaggcacgtgccacgacacacagctaatttttaaattttttgtagaaatggggtcctgctgtgttactcaggctggtcatgaactcctgggctcaagcagtcctcctgcctgagcctcccaaagtgctgggattacaggtgtgagctttggcacctggccagatttcttaaatatgacacaaaaagtgtaaatgatagaagaaatcaataaattgaacttcatcaaaataaaacgcttttgtttctcaaaatgcacgaaactattaaaaatgaaaagataagccatagactaggacgaatatttgtaaaaattctatctgatgtaggacttgtataaagaacttttacaattgaataaaaatccaataaaaatggacaaaacatttgtttgttttctggtgtttgtttttgtttttgagatggagtcccgctccatcacccaggttggaatgcagtggcgcgatcctggctcactgcaacctccacctcctgggttcaagcaattctcctgcctcagcctccccagtagctgggattacaggcgcccgccaccacaccaggctaatttttgtatt

SEQ ID NO: 914440 - DNA, 4001 bp, Homo sapiens
ttctgttctttcaagcactttccacctgatacatacaaccacctaggaaaactgccagccgaaatacctgcccagcccagtcacttcacacatgacagacccgagatggcactgagaggtcaaatacctgctagagggagggctggccccacagggtgtggccctaactgcaggtattgtgggtcatccttccgcatctcccccagtgcctgctgcccctcctccccaggggagccctcacctggaaatggaagatgccggcatagccattctggaagctctggccgtgcggaaccactcggtgcaggagggtgtcgttgagagtgagggaggcgatggccgccaagagccagcagtcccctggggcaggagggatgcacattagcctgctctaccaacctgccccggggggggaagcgggtgctagggagaatctggggttccttggccagggtgccacttaactcccctcagcttgcagaaaagacccaggaatctgggcaaaccagccccagcgctgatagccagatcctgcctgggcttgcaagagggaggggttggggcagagcctgaaggagcgggaatggggaactactgtggaaaaaatacccgggacccgacgccctgggggcctacccagtgctccctggcagatgtctgtgcgggtagctccatccacaatgaactgggggtttgacagcagttcctacgagagacccagagtcctgttcctcggccagcccctcccagaaattggcaccaggccaccccagaccccattccccaccagggacatggagtcccatccctactcctcatccaggatctggcttagccgagtcccacccaggatggcccctctcaccgtgggacgcttccacttgatgccataggtcttggaggaattgggacccaggtccttgtaacccaggctctggggtaccggggggaaggcctcatcacggaagagggtcccactctgcaggcatcgcacccgcagctgctcataatcctggcccaggtacttgatggcattctcatggcggcccaggcccagctccctggcccgctgcttctgcacttgggctgacaccccagtgcagtacaccggcgtgatgatctcctccgacatcctgccggacagatgggcctgctcagaacccaggccttcccaagactagaacctgggctcctgcctgcaagctctgctctcctgcccctgcttatccatccccaaacctagggtttccctgcctcactgctcccctcacagaagtagggttctcagccacctcccggtgctcccagtgaatccaggaaagggatttcccagttcccaggcgtgccggccacctctcctttcccggatcccattgtcaggggcttgcagctctgtagtgagccagcaggtcaggtggggcagggcggagcctccagacagcacaaggaactgggcaggtgggacacagcagggaaggcctctttgatcctgttcacaggcctgcaaccccctccccaaactaaccaagctcctggtgcaccggccccttgccgtgggctgaaaaccccagacggtcggggtccccctcctcaggcccccgcagcaggctcgatatcagagctggtgggccctagcccagcccctggggacagcggtgagccaggctgggacaggcgcctgggctgtgccgctccgccagcccccacccctgctccaggaacgcagaggcccccgagaagggaccgtgctggggcagcccctcagcccaggagcagtggccagggtcaaggaatcccggctcggctacccagcttcttacctgggggaggggtgtttgggggtcgctgcagtccctgaggctggcttcccggtggcagctcagggcagggcccaaccaggaagagcgctcctccccgccctcctcccgccgcccctccgccctccgccctccctctctccttctcctcctcctcctcctggggctcctaccccgcttcctctcggctctcccttatctctccggcacggtctctgactatctcttactcacggtgtctccccgcccctccctccgcaggccgggggccaattccgcgagaggacaaattagtaaaaggcagagcagtccccggggaggggccagcgcggggggggatgggggggctggggcgcggcggaagggcaccgcggggaacggagggggagggccgggcagggggtatttttaaccaggggcagcagctcgagttgcagggccggacggccgcaccccacgcgcgccctggcgggcattccggggcgattgtgcggcggcgccgcctcccgcagccccgggcccgcccggtccccagctcccctcgctccgcgcgaccgcagctgctcccgccgttcccagccagccccggcgcggggccgagattacctcgggctgcggcagctgctctgaggaggggccgggctggcagcgagcagacccctgccggacactcagcaaacggcagcctcaccccgcagggccgcgccactccccttccccaccccaccgccgcgtcccggctcagcgctccccggggaacgcagggggaccgggctcgctgcgtgaccttgggtaagtccctgccccgttcggcccgactttccgcatgcgtgcatcctatgggatggggttgggcaattgtgggagcccatctttctctaacgttctggggtttcttgaacctggaaacttagagaggtggacatccctgttctctcccccaggctctcagcccacccacctggaagcgcccatgtgtcaccttacccaggagagggcggcagaggctgcgagcaggacggcagccccctctccccacccccaggaccctgagatcctgcttcacgggctgcaagaagttggggggccaggattcggcgcggaggccgggggtgtgggtggggagactgcagagactcccgagacccccccaagtcagggcttttcgctggtctcgcagccccagcccagcagctgctgcagtcttgcatgttgtggatgcaagcattttgctgaggaaactgcatagcgttcccaggactctagggcccacgacccctcaaaagttaagagccgctgatctaatctaaccccactttcaccctcagttaacaaaagaggaaaactgaggcctgagagggtgtgacttgcctgaaatacctaacctggtgagtgatgggtggaaccagctcctaggctttctgcgcaggtgtccagggacagagaagggtggtttaaactagagaggtggcaggcagaagtagatggatttgataactatttaggatacaccatcaaaatttaactcaaactggattacacacctaaatataaatggccaaaccataaaacttttttttttaaaaatggagacaatcttaacaatattgggtttgaaaagatttcttttttcttttctaaaggcagggtcttgctttcattgaccaggcaggagtgcagtgccctgatcacagctcactgtaactttaaactcctgggctcaagagatcctctcacctcagcctcctgagtagctgagactacaggcacgtgccacgacacacagctaatttttaaattttttgtagaaatggggtcctgctgtgttactcaggctggtcatgaactcctgggctcaagcagtcctcctgcctgagcctcccaaagtgctgggattacaggtgtgagctttggcacctggccagatttcttaaatatgacacaaaaagtgtaaatgatagaagaaatcaataaattgaacttcatcaaaataaaacgcttttgtttctcaaaatgcacgaaactattaaaaatgaaaagataagccatagactaggacgaatatttgtaaaaattctatctgatgtaggacttgtataaagaacttttacaattgaataaaaatccaataaaaatggacaaaacatttgtttgttttctggtgtttgtttttgtttttgagat

SEQ ID NO: 914441 - DNA, 4001 bp, Homo sapiens
tgtcacccacaaaaacccacaggcatctcacaaccaccctgtccaacagtcaacttactcccaacctgctccacccccaatggtggtccccatctcacagaggcagccccacctaccttcccccagcactgggaccctgtgtagccccttagcccctgggcacctcctgcccccagcacccctgctctgggaaactttatcagggtccctcctcccctgccaagcctagccctgggtggggagcagaggagagcagaagggagggccctctccctgctttggcctcctccttatagccctcagtggaagcccacccactactgcagccaaaggtggcccttcttggacacacatctgacctatctaatccgcaatccaccccaccagcattcattttcacactgccaggcctttactcatgctgttccttggggctgcaatgacctgccttttcttttctgcttggtggatttcaagacccagccccaacgaatctgcaagtgaactcatccccagctcccgggcacccatcagtccctgtcttgtgctcccagcactgggtacaactctggacagggccttatctgtggacccactgcctgtcttgtcagaagagaggctcctcagggcaaagaccccgcctgagcacctctgtgtgctggcaactagcctgacctggcctgcagcagcagctgggcccaccataccctgcccaggaggcaaaggcagccacaccaccccacccccagaccctggggacaggagcaaggaccagcccgaggaccctgggaggtgtcaatccttgcaaaacacagtggttcccccagcaggcctcagactcattgagttggctgagcctcacccgtaagcccctctcttccaagaagtctgcccagatctctctttcccctgagtcctgggatagtcgccctcagtacttttctctctaaaccacaggtgtagggagaagattctgggatgagagccaggcggacccgggttcaaattctggctcagcaatcctgagagggcagctgacttcgcttctctgtgccccactcttctgatctgtatggaacttgggggtgaatcccaccacatgaaatgactgggagagagaacgtcgcacctgttaatgatcttttgtcctatttcgcctctggtcccctaggccagtcttccgagacccccaacgcaaaggaacagaggtgggaactctgaggtctgagaaacaaagatccattccctcccagaccactcccccacactcccgcaacacacacacacacacacacacacacacacacacacacgtgcgcccgccctgcagtcaaggagaaaagccccctttcaacctggggagtagtgccaagaagcggataggctggggcagtaggagcctcggccctgccccttccccaggcctgggtggtggagcacccagaaggggttggtggattgcagggatgaaaggggggttaagcagggaagagaaggggggaactgtaaggaagatgagaggaagtgacagtctagccccgggtgttaggcgcttccagcgcgtccgcactaggaaaacgactcggagacacccagagggaggtgaaaaaaagactcctcgccgggggtgggggtggggacgagccgagggggcccaggcggatgctccaggaccccgccccccagccagcgctcacttcctttccccccgggcccgcgggaggtgcagccccctccactgattcgtggtcccggagcaatcactggcccgcgctgcacccgcacacacccccccgaaacacacacacacacacacacagaagcacacgcctccctccgcccgcctcctaccggccgagccgccgcgggtccagccgggctcccgggatgcagggcacggcgcgggcgctggagcggaggctgcagccgcccggcgcagcagcctcgggctctggccggagatccagctgggactggcctgcggcgggggctggcgctcgcattccccgggttcggccagctgggcccggctccgccccgccccgcccgcggcctccgcccatttgcccgttgcgagccggaggcgtggtctcccgtggggcggggtgggcggcccggtggccgggtgcgcccatgcgcactggtgcggtgggcggccgctcagaggagcggtctcattccagcccctgtgttgaacgcggacttggggcccctagcggcacccaccgcctctaccggctcggtcgggccctcgttctctctccttcccagcctatctgtctgcggttggtgcgcatccccatgggcagcctcccaagggctggctgcaccgtgagggatcgggccggggctggggttcagcccccacagggcgggccggggccgcggctgacttggggccggcgtgtagtaccgaggacccgcaagggccagggtgcctgccagaaccaggacttggtgggcggcgcccctccctttccgggctccaccttcacatccatcccaagtgttcggatggagaagtgggagcccaggcccctgtgagcagcagagggcctctgtcagatgggaaaactgaccccggcccgtgttgaggacttaatcccgtgctgccatgggctcccgggctcgggctcatgtttgactctctgtccgtgactggctaccggaatgccctgggatggcacggagcctgcatttcctgatctgtaaaacggggactataatctctacccaccccaggccgcttggggaatccgatagagaaggtttaggagtgactagttcttgcctacagtaggagctcaggggtgccaccaccccccgccctgaggcagcaggacagacgcccatctgatctgatgagcccatcggcccactcgctggtggagcgtctcaggcccgttcattctccgcctccaatttgtttcgaagtctcagttaatgatttcgtcaacctcttgtgttaccgaaacaaacttgggtccgcccacccagtgcagcaaagccaaacactgacaccaggatttgcagcggcagaaagggaggcatttattgcagggtgccaagcaaggagaataggtcggctaatgcttaagacccgtactccccaatggtttacatgtaaggctttttaaaggtggggagacagaggttataggcaaagtcataaataaatactctggagctatacattggcttggcccaaaaaggtgagacattttgaggcagggtcataggtggattcagagattctgtgatttgcaattggcttaggaagcaagactgtctaaaaacctggggtccacagataggagagttaagcattggcttatgggtgtgactctttacagaacccttgggaagaaatttaaagaacagccctcagtttccccttatctgaggcctaagtgacagctgtgaaaaacaattcagggacataggtcaagatgttatctttagtttctatagggaaccagacatcttgtggctctaacttatttgggtggcccttgtttgaagcttcaattaccttcttgcttgtcaaggtgctcatttacttctcaaagctagctagctgcctgaaattccccctgaaaagactcatgattttcctttatttccactaagaggagtctctgcctcacctcactctcagtcacctggacttctctagcttctccccaacctccctgcctctgtcccaggccacccagatgcttctcccttaagagtagccccagccccctcaggagcctcctatccaaccaaagaagactttcacatatgcagctgagacccgccacccatagaagagtgttctaagactgcaccccatctgactcccccatctcccctaaccttattccatgccctgtactgggagcagcagcttcaccagcccttcaaaagtcacttcaggggctctactctccccacctgaaaccatgcccgtgctgatctgtggccgtctgaaggactcttccttcctccctgtgctg

SEQ ID NO: 914442 - DNA, 4001 bp, Homo sapiens
atgaagatatacctcagtagtttgatctacaaggactaaatattgaatccaaaaaatcgtgggtgtggctcgattttttttttttttagaggggggcctaaggaggccagtcggggcggctgcctggtctctgccctccccctctgctttcgctttgtgctcacaatgcagctccagtaaagcgcttccctctccccgcagccgccgccatgttagacgctctctccatgtgccccgagtcccagccatcctctccagtctccccaggacccagcccccaacgaatctaaatcgtggcagtcccccgccccttcacagtcccctaggaacaaaaagtcgctgcagaaaatcatctcgcgattgagctgagcctgaggctcggggggacacctaaacaattgaaacaaagagggaaacgcaggggagcccatcgcatgggcgcgggggtagcaaatcgaagacccattcaaaatgggcctgccggaaaggcagttctaccttaagattctaaacacacttctctcctacggaagaagaggggacgctcgacaggtctcgagtgcatggtaaccgagcggacagaccccaaggctgcaggacgcaggccgccccaactccacgaggcggtcggttgaacccggagccccccgcgcagggacctcttcattttgggccctcgtcagagaaatcgggcctcagagacggaaagaagggcaccatacagtgaagtcctgacgacaggcccccaccctcacatgtcccactcctaaaggccaaaaagccggacccacagcggaagagtaataaagaggcctggggtacagtgccgcgtccgagtcaggtgacaagtgcctcttccaagagcccgttttctgggcacgaagctcccgctgaacgtggagacggggcgtgtgggccagggggtgggaggaggggacctagtaacgctcccgagacgaaaagaagcgaaggctccagcgaccagggtcggaggggccgcagagcccggccgcagccacccctcccttccccgccaactcctggcacctttttcttctccaggttccgaagtttcttgtcgatcaccccgagaatctgcttcatggcctcggtctggacagcgccggtgccggttgcggggtgctgagaagccggcgcggcggccccggctcccgcggccgcctcactcccggaggaacccgacggcggtggcggtccggacgacttgctgccgctcccgctgtggctggtggccgagggcatcttcagaccgcaaggagagagaagaaaaagcgggaggaaggacaagagcggccagtcaggagacggacggggcgagacgcgggacaaaacgcgcagcgagcggtagcctacgcgagcgggtgggggagggggcgcggcgcgcctcgagggcaggaagagtgcgcgggcgcgcgcgcgacccgccagcggggcgcccggctgggcctcgcaccgccccccgacccgcccctcccccgcggagccgccggctcggcctaccagcccgggggctccgaggctcgcgccggaggcggggcatcgccgcgccggccgccaacggccactgcaacggtccctaccggggagggccggcttttgccggcttccggagaagggaggaaagagagaggtcggggcttgggggcagagaagggcatgggaaatgaccggggtggggtggggggacttgggggcaagcccctcggaagctccagcgggtccggagataaaggacacccgggcgcagcggccctcttcccctgcagcggctcggtcccgggtggcgctcaccgtgcgcgcgcggaggccgctggaaatcacgagtgggcagctgagggggcaagggtggtggtcccttccgggcagtgtcgcgcgctccgtgggcgcaggccgcttcgccctgtcccgctgcaccgagagccgctcctagtgaggcgagagccgggagcgggagggacttagccagccagcagccctctgggtcgcgaggggcgggagaagcggagagcgggggccttcgcggccgctcgggctgcccggcgcgaacgcctgcccggaagaggccgcccgctagcttctccgccgtcccccggccccggcgctgtggggcgcctcctggacgcaggtggggatggccccggcaaggccgaaggaaaggccccttgagttttgagagcaatcgacgctagggtccttcaggcgaaatcgtttgacgcccaaacggggacaataggtgtcaagcagctggctctggagctggcaactgccccttgaagagcccttatttggggtgggggtgggggttggggggcaaaggtttctgcaagtaaggggtgcgtggggtgggtggtgcgatcccagcttctagaattccttctgtatgcagagcgagcaaactccataccccaaaacgtcttttgaaaaaaagacaactcgccgcttccccaccaaacaatcacccagtaacctaggagttctctgtagaacgtgtcggacacggtcatggttggtggctttttaaatcctaaagctctggcctcacaaagagtcttcagctaccctatgatgttatacatccagtaggcctgagtattacgaattattagacttttgtttcctttttttttaggtttacctaacactgtaaagagaacgttcaatgaaatacaaagaaaaagatgatttttttgctccaagagaattattccagccttggggtggagtgggtgtggacagtgagcagaaaaacaagaaaccaagttctgggaggaaataaaatgaatataatcagtggaaaattcagcaacgcaatattgtgtgacaacagtaaatgaccaatttataatttaaattctatgaaaaagagatttagaagagagttctaccaaacccactgttccctagggaataaaatgagtaacgctgactggcaacagtgcatcctgagggagcctggagaaacaacagcagcctccgacctcaagatatcctggttagctgcaaagtctgttatatattcattcaaatatttattaagcaccttactgtgtgctgggaactcttaagtgctagggattatgaacaaaacatatttacatggagcttacaatctaagtaaggggaagacaagtaaatacatgtcagatagtgaaatggtagagaaaagaaaaaacggtggtcagggaaagccttactgacatttgagctagtactgaaggaagtgaggaagaaggctaagcagctaccttggaggaggaattttccaggtagaggaaacaccaagtactaagatctgagacggagtgtgctttttgggttcaaggaacagcacggaaaccatagtggcaagagcagagagtaggagatgaggtcaaacatattaaagggggctggtcttgtagggcctgaaagaccacggtaaggactttggcttttgctgcattagatggggagtcatagtttcaaaatttagtcacctaaaccatccttagcactacgctgagcaattatgccaggcctagaggctagaaacggagatgataatcctttagctccttgcaactcaaagtttattcagcccaacctctctcactaccactatcactactatcttggactgcatagcagacttaactgaatctacattttaacaagatcttcaggagatttgtgtgtacattaaagtttcagaaatcactgttttgttcctcggaattgaccaatgtctaaagttttattgggagacatccaatccatctatgcacatccattctatgactgcctctctgccatagcacagcagagttgagtacttgggtgtgcaacagacagtagggtgtgcaaaacctagaatactatctcttcttttacaaaaaaagtgtttgccaatccctggtttaaaactacaaaggggccaggtgaaggggctcatgcctgtaattccaacactttgggaagccaaggctggcagatcacttgag

SEQ ID NO: 914443 - DNA, 4001 bp, Homo sapiens
ggaacagtttctgcaaaaacagaatagattaaaaaagaaaattatatgatcagtctatgggaattctccatagccccttcaagcagagctcattccactaaattaatgttaaagaagatggggttcaaagaatgctcttcattgaaaaacaacattacctgggaaggaagaaaatagtaattgggagtcttgtgtactaagctaatttccaggtatcggacctataaaaagatgaagaacattgaaatagccacttatcatctctggaaaactttacagcaatgcataagccactcctcactgcaaattcctcccacaaccctgactaaatgacaataaataatgttcaagtgcaccaaaactcccatcctcaccatgctgtaggttcaagggattataagaatgggcaagctcatttcctgagcactgtatcaggccctaggagggctgcagatgatggaagtccaggcctcccagtatgatctgcagcttggcaacagacaagcagatcttactcaaaagaaaatgcatgggggcaacgggaggaaagagccctgttgaaatctttactattctgtaatcattgaatgtatttcctgaacgtatcatcgtcacttaaatatactttattcttctctgagggcaaaagtttgaaaagaatttataaaaagtatttgaatacagaccctaaagctcatgtcaaacaactacataagggcttagggacaccctggacacaaaataataaatcaatcaataaatatcgtgccttgccaggaacactggaacatattgtatgaagctttctagatagttctcatgaccttaaggaaattagctaccatgtactcagaacagaaaatgaactttaatcagaagagggcactgaggatgaaggaacacaaaaaagagtcaagggacatgcaatagggcctctgctacagaaatatggcccaaaggcagagataagaagatattctgcagattaacatgactagtaaagaaatcaaatgttaggcacgaagacaggccctaggtgaacttgagtgtgagtcactgacccttacctgctgagagtcccagcgtctctgccaggtaactgtcttcttcacaaatgtatgtgatgcaaatttggcatgcctgtgcccctttcggaataacggagtcaatcaaagctcgggtcttatccataactgtagcattttcacgttttactttctccatctcttcctggttcagcacccttgtctgtaataattcatccagtaagccatttattgtaccttcacccatggaatggataaacagctttctcttctccttcaggaccttgtctgtttggagcacaaggatttctcacatcatgaaaacagcctcatattcctctcacgtcatcaacagaaagtgacctcatttagatttcatcagtgaaatgtccccctcctcacagttgggtaatccctcttcttactgtattgctgtcctacttgtttccctcagtagtccccatatatgtgcatggagtgacctgaagactgagtttaccatttccacatcagtccctggaaagcagagatcatcctcttgtgtcccatgtttatttaactctgaataataaagtaatgaagcagaaatagcccatttcatttaggaaccactgctgctagtactcctcctgtgccaattctgtaccctctgtcagacttacgacaggtaagcaagggtttaattaagattgcaaaatgacagcaggctacccctaaagtctctgttcctttctgggcttgccttttctttctaaagcctgcaaaaatcttctagttccttctctcctcccactcctccctctccctcacttctgctcacctaaacttccacagatactaattatggcttccagaagagccagccctttccacaactctttcttcccagggacctgttcttggaacagtaaaagactcaccggccatggcttttctctcctacccttcttgtgtgggctgaaactgaaagtatgtttcgccttcctttttggcagggcgtgtacacatattgggaaacacccactgcacattcatatgcatatctttatttttcttcccagagaaagaatcagaactgtagcctgcatcagagagtgtatccaagggaattcttttttctccagcccttggatagatcagggtaggaggggaatggggcttagagaataagccccaggattgagaaagtatgtgtacagttaaattcacacagtgaagagtttcccattcattcgaaaacttgaccgaaaaaattaacacaacctttggagaatgtgaaccactgttcccttgaccccacctcacagctttggggaaagtttgtgggaaatatatgtccctgtgaagcaattttgctttaagaaatgtaaacatttttcaccaatattaaagcttttcttatttaatgttcttcctttcctgatggcttttttgttttgttttgtcttctgatacatgatgtcactctgttgcccaggttggagtgcagtggcatgaccacggctcactgcagcctccacttccctaggctgagatgattctcccacttcagtttcctgagtagttaaaattacaggcaaatcccatcagggctggttaatttttgtattttttgttgagacgggctctccctatgtttccttggctgattttgaattccagcgctcaagcgatccgcccatcttggcctcccaaagagctgggattacaggcatgagccatgagccactcactcatcttggatggctttcttttgagggacattgcatcacagaggcccaaagcatagactctgaactcagaatgttgaacctagcaagttaaactcaccttcctgggcaagatattaaacttctttatacattggttcctctgtctgtaaaataatattattaatagtacatacacatctacacagttttgagcagtattgagataaaaatgtgaaaaatgaatggaacattgcctggcaaatggtaagcagataatgagggatattactataattaatagaaatatttcagtttagaaaaataatcaaggatgattatttgcagattttttagctaagtttatcttttgttagaatcctcaagcagtgcctccagtcattcatttagcaaatatatgtggacaacatggttctcggtgtcaggggttccatcaaaacatatattatgatcctttccctcttgctcgcacattcaagagggaaagatacacatgaaacctggtatgtaatatgtaactggaatatttagaatgtgaaaatatgccaagcgatgagaagaataagaaattaattggagaagtgggagacaaagtattgcaggactcatgaaaattgtacacagaggagccagggaaggccagaagaggtctctgcctttgtcagtacatgctgaattgattatcccagaaataaactcaatgtggctaatttatttcatgaataaacttgatggaagatggactaatagcaaaatgcacacggtacatttcatttatcatttttttttttttttaccaaaaattttcttgggctgttacgttattacctttggaggataatgaccagatttacaaaaatatttacggtttgacatgtgggctaccagttttacttcctgtgctccaggctaagagttaaatgtcattggttaagtagaacggactgtgtaggaggacaatgacgtggcttttaatctaaggtgtttttcatggtgtttttatctttactctgccaatgacctaatccgattgcagcaaaatcttgagctccttgccgctggaaggatttgtagcatggaagaaagcagaaattgtctgtgcaccacttctctttagtttatttacttttaaatttatgtactgactcatttattttttctgctgcttaagggtttcacatgagggtttctccccaccagccagagccaagaaccacggagttta

SEQ ID NO: 914444 - DNA, 4001 bp, Homo sapiens
aagaaggacattgaaatagtcacttatcatctctggaaaactttaccctaatgcttacaacactccccactaaagattcctcccacaaccctgactgaacgacattaaataacgttcaaaatgttctttaatttagagagtcgtgggggtataaaatgaaagagacattgtcagaaaaatatgacatttattacacatagatgaaaacataaacttctcccatgtctgcttagacaggcgtaagcttcctctaacccttagaaaacaaaacaaaacaaaaaaagccttttactttgaaagaacatctgcctctgaagtggcattggaaagtaccacagagaccagtaactaggagtccaccagaactctcatcctcaccatgtggtaggtccaagggatcacaggaatgggccaactcatttcctgtgcactgtatcaggtcacaaggtggccacaaatggaggcagtccagggctcacagcatgatccacagcctgataacaggcaagtgggtgatcttactcaaaagaaaatgcaaggaggcaacgggaggaaaaagccaacttgaaatccttacttttctataatcattcagtgtattctctgagtatatcaccacttttgaaatataacttattcttcttggagggcaatattttggagagaagttataaaacgtatttaattacagaccttaaaccttcatgacagacaactacataagtgcctgggtacaccctggactcaaaaatactaaatcaatcaataaatattgtgcctcgcctggaacagtggaacatatagtgtgaagctttttagatagttctcataaccttcaggaaatcagctaccgcttactcagaacaggaaatgtgctttaatcagaagagggccactgaggatgagtaaacagaaacgaaggagagtcaagggacatgcagtagggcccgtgttacagaaatattgcctgaagccagagagaaggaagttttctgcaacttaacatgactagtaaagacatcacatggtagtcacaatgacaggccctaggcgaacttgagtatgagtcactgacccttacctgctgagagtcccagcgtccctgccaggtgactgtcttcttcacaaatgtatgtgatgcaaatttggcatgctggagcccctttccgaataacagagtcaagcaaagctcgggccttatccataactgtagcattttcacattttactatctctatctcttcctggctcagcacccttgtctccaataattcacccagtaagccatttattgtaccttcgcccactgaacggataaactgctttctcttctccttcaggaccttgtctgtttggagcacaaggatttctcacatcatgaaaacagcctcatattcctctcatgtcatcaccagaaggcaacctcatttagatttcatcagtgaaatgtccccctcctcacagttgggtaatccctcttcttactttatcgctgtactacttgtttccctcaatagtctccatacatgtgcatggagtggcctgaagactcagtttaccatttccacattagtccctggaaagcagaaatcatcctcttatgtcacatgattatttaactctgaataataaagtaatgaaacagaaatagcccatttcatttaggaaccactgctgctagtactcctcctgtgccaattctgtagcctctgccacacttacaacatgtaagagtttaaataagattgcaaaatgacagcaagctactcctaaagcctcagttcctttctgggctttcctttcctttctaaaggctgcaagagtcatctaatttcttctctcctcactctcctccctgtccctcacttttgctcacataaacctccacagatactgatgatagcttccagaagagcaagcgccttccacaactttttcctcccaggggcctgtttttgggacagtaaaagactcaccggccatggcttttctctcctcccttcttgtgtaagctgaaactgaaagcatgcaccacctttctttttaccttccttttatacattttggcagggcatgtacacatattgggaaaccactgcacatgcatatgcatgtctttttttattttttcatttttttaatagagtaagattcagattcctgaactgtaggctgcaacagagagtgtatctttgggaaattttcttcaccagccctttgaacaagtcagggtaggaggggaatggggcttggagaataagacaagaatgacaaagtatgtgtacaattaaactcatagtgaagaatttctcattcgttagaaagcttgatggagaaaagtaacacaacctttagagaatttgaaccactgctctcctgggcccatttcacagtctagggaaagtcatgggaaatgtatgtccctgtgaaacaattttacttcaagaaatgaacacatttttcacaaaaattaaagcttttcctatttaatgtccttccttttcagatttttttttctgatacagaattttattctgtcacacaggctggagtgcagtggcactaacagggctcacagcagcctccacctccctaggctcagatgatcctctcagctctgcctcccaagtagctgggaacacaagcacatgctaccacggctggataatatttttatgtttgtaaagacaaggtctccctatgtttcctaggctgtttttgatattctgcactcaagcaattcactcacgttggcctcccaaactgctgggattacagctgtgagccacccacccatcctggatggctttcttttgaggaacattacctcatagaggcctggagcacaggctctggactcagaatgttgaacttagcatcttaaacttcatttcttgggcaagaaattgaacttccctatgcattagttcctctgcctgtgaaataattttaataatagtacatacctacacattgagcattaagtgagacaaaatgtacaaaatgcatgcaacattgcctggcaaatggtaagcagataatgagtgatattactataattaatacaaatattttacattagaaaaatcaaggataattatttgcagattatccagctaagtttatctttcgttagactcttcaagcagtgcatctagtcattcactcaacaaatatatatggacgatatggttctaggagccaggggttcagtcaaaacatatcatggtcatttcccccttgctctcacatacaagaggggaagacaaacatgaagcctggtatgtagtatgtaactggaatattcagaatgtgcaaatatggcaagtgatgagaagaataagaaattagttggagaaatgggagacaaaatattttaggactcatgaaaactgtagaatgagaagccagagaaggccagaagaggtctctgtctttgcaagcacatgttcaattgataattccagaaataaactcaatgcggccaatttattttatgaacctctttgatgcaagttggactaataaaaaaaatgcagacagtacttcacatttatcaatttctttaaaaaaaactttcttgtgtcattaccttgttatctttggagaataaggaccaggagtcacaaaaacatccaccttttgacatgtgggccaccaatgttacttcctgtgctctaagcgatgagttaaacgtgtttaggttagactagaatgcactgtgtagaaggaaaataatgtggcttttaacctaagggctttctcatgatttttttttatctttactttgtcaatgacctagtcagattgcagcaaaatcttgagctccttgacagtgggaggatttggagcatggaagaaagcagaaattacctgtgcatcacttctcttccattcatttacttttacatttatgtactgattcttttattttctctattaacttaaggatttcacacatagttttctcccccaggcagagccatgaatcagtgagttca

SEQ ID NO: 914445 - DNA, 4001 bp, Homo sapiens
ttcattttattcccatcacagcagactctcagtgctaaaagcaccaaagtaagctgtacatgtctctacaggattgcaaaggaactaaacagaaaggaagggaaagggagggactttcttaattacattacaatcatcatgaccttcattattattgatgaattatcctctgttggtatgaggagagaaagaataagaagaaagtaatatgagagaatgaaagatttattggaaattgatgaaattaatcaggtttgaaaaaagcactgttgttttgttttgtttttttctttcacgagaatatcttctcccttggaagaagctctgggaagtctctgaagtgctccagagttccatcttctctctgtggagggagaaaagtggtattggaatgggccagctcagatacaagagcctgcatcagggctcttaggaggcctagaaatacaaagggataggctacagagaatggtctgtagactagccccatgcaagtagaccatattacacaaaagaaaaggcaaaggagatgacttccaacgagaatccatatataatttcatgcaaatataattatttagtgcatatttaattttatatacacactcaatttattctttgacaattccatcatcattgtatattctgaaaagtacttaatagggagatggggtaagagcagggtggtaggtacaaaaagagcttataccttctcttctaataaatacatgggcttcttaggctcaagagggagtgatattgtacattgctccccaggaccattaaaagattcaggataaaacatctaggctctttaaatgaactacagtaatgatctaccacctacatagaattagagatgagctgtggtcagcagggagtactgagagaacaggtacaagggacacaaaaacgtagacagaagagacataagctagagccatgcataaaggaatggagtctgaggctaaaatgataggaaccctattatcaactgacaagacaagtgaagaaaatcataactgaattcaagatacagggcctatttggacattaggttgaatcattccaccttaccttagtgcaaacccatctttgaggcaagttgagggtcttcttcacagagatgcttgataaatttgcagcaagacttgggtccttttccagtaacaaggtcaatcaagactcgagccttatccatgacagtgtcattttcatctctcactttgttcatgtcttcctggctaataacttcatcctctaataggcaatccagcaaggcatttattgtgcctgcacccactgaatggataaaaattcttctctttttacgcaagagttggtctgttggaagcacaaagattcctcaaataatgaacatgacacaatttccctctcaatttaccaacagggtaacaatcatttaaacatttctctccacaagtacagtaatcccaaggaacggtcttatacctttgcatttactccacgtacttccttctgattctagcattacctacatatgctcactgagtgacctgggaaacttgacttcatgatttttctgtgaatctcctaaaaatcagaagtcattctattctgacacatcccagtttcttgaattttgaagggaattgacagtttcatgaattttgaagggaattgactgtttcctttgagaacaacagctactgatacccatcctgtgcccattctcatcctgaactacataactcttcaaatgtggacaacactagcaaaattatagcagataccagtaggatcccagattcttcctggcctttatctgttccttcaaaaacgctgtgcaagtctgggcatcttcccaccctgcctctcccttcttctttctctctccaccccaaggctgcccacacaaaccttcacaaagcctaatgagaaaggcagtcctttcccaaactaattcctccctaagacctatcctcttactggggaagactcaccagccatggctcctcacgttggcacttgcaatgtgtgttacacttgcaatgacaggcaaggtagctctatccttttaggcagggcgtgtacacagatcaatgaacaatacttacacctacacatgtgtatttataattattgcccaagaagctgttaactattgtcatttcccaaggtatttttacacaattgaatctcagattgtagcatgaactgtgcccataagaaaattgctttaccattccttggtgggtgagaaacaagaataggagagaattgagaaggcacacacagagctaaacacatgcagtaaacaatctttaattcactgagatttaaatggaaagtaaaatcacagtatagggtagttgtgccacctaaatcaagtactaagagttccttttttaaattgtggtaaaatacacataatataaaatttaccatcttagccattttacagtatccagttcagtggcattaagtacattcacattgctgtgtagccatcaatatcatccaactgtagttgttttcattttgggaaattgaaactctatactccttaaacagtaactctctatcctttccttccatcagtccctggcaactaacattgtactttctgtctttatgaatttgacttctctaggtatctcatgtaagtagaattatacagtattcattttttgatgcctgacttatttcacttagtgtaatgtcctcggtgtttattcatgttgtggcatgggtcacaatttcctttctttctgaagttgaataatactccattctatgtatgtaccacattttagtttacccattcttcattgagcacaaatttcttcccttttgctattgtaaataacactgctatgaacatggtatacaaatatgtttttgagattctgctgtcaattatttgaatatatacccagaagtggaactgacaaatcatagagtaattctatttcattttgttttgtgaaatcggtatgctgttttccatagcagctgcactgtattacattcccacatataaagcagaagcgttccagtttttccatgtcctcaccaatacatattatttttctgttcttttgataatagccatcctaatgggtgtgagatggactaagacttcttaccttcctttcattgttttttacctaagctctaggcagtctccagacgcagaaatggtgtatgaagcagttttgctatttggaataaaagtgctttgttacgtaaggctctttttcttcagatggcaccattttaagtaacactgtattacaaagattaagggcacagactctgaagccagaatggttggatccatattttaactgctgatcttaggaaaggaaattaaccaagctttagtcttcccatctgccagataggtttgatgataattcctaccttgcagttttattgcaagtatttaatgaacaaatataagtcattaaaatagcccctggcataaaggaagcacctcaattattatatatgtccatgtaaaatcccctattcatctcatcaattcattcaacataaatattcagcatagttatttactgagacccaagtctatgtgccatacattattatagatgctggggatgtagtaatgaccaaaaacagacaaaaattcctaccctattagaagttgtatgatagtaggagagacacatatactcattaaatgtatacaaaatattttaagagttctttaaagaaaaatattctcagaagattgggggaatcacatctttggtaaaatatttgtattagcttatatatgtgacataatttgataaatatttaaaatctgggcaaggtgctacagcttatgtgcccatgggcccaggaatacaccaaatgaggtgaattggagaggggaggctgtgcctatctggtaagggtagtcctctctgaaggggcagggctcctcagacccaactaattttggctaagagaatgaaaattcagtttactttttcattttaagggta

SEQ ID NO: 914446 - DNA, 4001 bp, Homo sapiens
cctgtgcggggcacctggccgcggtcctgagtctccggaaggccagcttgctgcagacagctctgcaggaggctgtagtagtagacagtccaagcccgggcctcggccccctcgggggatcccttgcagtccaggcccacgtcctggcgccaggagccagggaagcagcctgtgggcggcaggccagagccccctccccaggggccctcttcctccaggtccttggagcccagtgggcaatcccactcgggacccgatggatccagggagagctgagagggcagaagtggtaggtcttgggcagggtgggccagtgggcacattaagtcacccaagggtgtaagccccccactctcccagcctgggctatgttcagggctgacaccgtcccggggactaggagaggaaaggcttgtgttgggggcgaaggcttgttaatgggaacgcaaccgtgggagtgctttgtaaactgttctgtgtggtgcccctggggggagggcaggaagcaatgtcttgccagccagcccctcccgcccctgccatgctgggctccgccttagcttgcttcacagcagcagagttttctgcttgttttgttcatggaggcaaccccagcacctaaagcgtgcctggcacacagccacttctcagtaagtgtttgttgactgaagagtagatgaatgaacgaacccagccatcactctgaggtggcttatttctgtctcatgacccggcatggagtgtgctgacacctaaatgtgattccactgtcatccccacgtaggtcttgaagccctactgtgtgcccagccctgggctaaacattaggaggctagacagtatcccccctgcagatattttgagtcacggaaatgctttctttggatgaaacctaacgtccctcccctctctgaggctggcgcccccccaatatggggctgctgggaggcttcgtgtgaatggaattcttgttctttgcagtccccaggcctggacaggcctggcagctgagtctgtcctccaggggacaggctcggccaccttgagcaagtcgtgaggtctctttggaccttgttgcctggtgcctgccctctcccatcccctgggggctgatgaggctgggacgaagagaatctcttggttgttgggagatggtgtgctgtggcccagacggcagaggactgggcctcatgcctgggctcgaatcccagtttgccagggccagagcctctgtgccgtctcctagaaggtgagctccctgaggggccatggaatgaatgaatgtcacagggcactaagagtgcccacctcccaggatgcagccgcagggtgggggtgggggagctggtcgtgggtctaagctgtctgcagggggcaactcccaggcttaggtcctaggtgctgcctgctgtcctctgggcccactctctgcccagggacttgggccttgtgggggagggaccacagaagactcaccatctcgtgggtggagtggctgagagactgatggcagagacagagggacagagagacgaaggagtcagggcagccaagtccctgcctggccttccagcccctagactttgggagtggagaggtggccgacacctgtccctgcagagagaggccaaggcagccccacccccaccccgaaggtagggagggatttctgctgcccagaccgagtggctcctgccccagtgcggctcacaggtccttcctgccctggggtccgggcttggctctgcccctccagcgcgggggggagttgggggcaccgggtcccgggggtggggggcgtagcgtcgagggtcccgccgcggggagcgggcgcccggggtcctcgtccccgcgactcctgccccggccgcccccctccctggctctccccggggcggggccggagctggggtacctggcggcggcagcggctcggcgggcgtggcgggcggactcggaccgggcgggatgcagcggcggcggcggtggcagtggcacagcgcccggcccaagcggcgccgctttatatagaaacgcctggggcatgcccagtgcccagcgggggcggcgcggggcggacggaccgacagggaccgatagggacccgccggggacgcgcccccccccccccccgcccgtcagccacgaaaacgtcccagacctgggggcgtgtggcgggacacggacccagcaggaggagggcacggagcaggcagggagagacgggggtcttcagagacacagaggaagtcccgacagagggccaggtacagatggacagggactgtcgtcgagggtcacagacgtagggctgccatgaagaaagagggaggcccaccatggagaagagatggaaaggaggggcggggagagccggagcaggcagagactggtactagggcccgcccttaggggtggggtgcccgggagagcagcctggagcacacagccctgagccctacctttggatggaggccggaggtcccagccctgcagctttctgtcccagctgccagcgctttgccctattgcacgttctcccagagaggccctcctgggccagggtctccacacatctgtgcagccccctcctcacttctggacccagtggacttgcacacaggggccaggatgtctataagatccagcctctcctggtgcggtggctgcctataatcccagcactttgggagcctgaggcaggagaattgcttgaacccaggagtttgtgaccagcctgggcaacatagcaagaccctgtctctataaaaaaaaaaaatttaaactagctggttgaggtggtgtgggcctgtaatcccagctacttgggaggctgaggtgggaagatcacatgagccccgggggtcgagactgcagtgagtcctggttgtgccactgcactccagcctgggcaatacagtgagagcctatctctctcgctcgctccgctttttttttttttttttttttttttgagacagagtttcagtgtgtcggcccaggctggagtgcagtggtgtgatctcagctcactgcaacctctacctcccaggttcaagtgattctcctgcctcagcctcctgagtggctgggattacaggcacacgccaccacgcctggctaatttttgtgtgtttagtagagacagggtttcgccgtgttggccaggcttgtcttgaactcctgacctcaggtgctcctcctgcttcggcctcccaatgtcctgagaatacaggtgtaagccactgtacccagccgagaccctatctctctctcttttttttttttttttttttgaccctatcccttttttttttttttttttttttaagacagagtcttactctgtcaccaggctggagtgcagtggcacaatcttggctcactgcaacctccgcctccccgggtccagtgattctcctgcctcagcctcccaagtagctgggactacaggtgcgagccaccatgcccagctacttttgttttgttttgttttgttttgtttttgagatggagtttcgctcttgttgcccaggctggagtagctgggattataggcatgcgccaccatgacagctaattttgtatttttagtagagacagggtttctccatgttggtcaggctagtctcgaactcccgacctcaggtgatctgcccgcctcagcctcccaaagtattaggattacaggcatgagctaccgcgcccagcccacccagctaatttttgtatttttagtggagacggggtttcatgatgttggccaggatggtcgcaatctcctgacctcatgatctggtcaccttggcctcccaaagtgctaggattacaggtgtgagccactgcacctggcccccctatctctttaaaaaaaaaaaaaaagaaagaaaaaagaagagaaaagaaaggaaaagaaatctgctctgcttatcaacacccacccaggtcaacttcacacccggagttgaagctataatctccccaagacatacatactcaca

SEQ ID NO: 914447 - DNA, 4001 bp, Homo sapiens
tttatttcctgttctcatctttgagagtgtgtgtgtgatgggaggaggcgatagtaaaggcaggtgggccatgccctggggcagaagaacactggctggagatgctgtgcgcaggctgaggactgggcaatctgcctgctgccctgacagcccggagagggcaatcccaacctatatggcaagctccaaaaagaaggcaattcttacaaggctctgaaaacctaaaattctaaagctatttttaaaaacaagatacaaaacactactaatacgtcatttacgttcacaaatgaacaaaaacacatttttagtttgaaaacaaacaggccctaactttcagcacagacacagcacttaattgagtgccaggcactgttctacgtccttcccatctattaattcatttacactccatgctccaaggtaggagccattacgcatggtttgctgtggggcgggaggcagagttggaaccctggcccttccagggtggttccagagttggggctgttaactatgatgctgttttacaggaatctgggtgacttctgagggccgcttggctctgggacgggtggagatggtgctggaatccaggcacacaggtagggtggtaggcggcgtgcctggaaggtgaccacctcctgccacttggcacaagagtgtagccctgtcatctgggtgtccccatgccgccagattactcgggttgtcataactacctatctataacccaataaaccctcaggggcaaagggcaccaccagatgctaaggaaatcttggtacgatctaaactgagggtgggggctggaggtgtcttacaagaacttgcatctaatttttgccagccaaaagaattaaaaactagatactgagaatgtttcctttggaaaggctgctccagactgttaggaatctgggctttctgattcagtctcttgcctttccagcacctaaaatcttgctggagggacagtgagagaagaacccactggtctctcaaggtctacccgctggtgacatgagtgactgggggagctgacacagctgtgtccctggggaacctcccgggttggcaataaaatggggcagtaatgctctgacaatcagcttgcagtggactgcctgcggaactggagatgaaagccttcgtaaagccccaagcccttttactgtgtgtacgcgtacccctggcgtcctctgccccatttccctaaataccaacctcaggtgccctccgcccacctcccggaagctgccaggtctgggcagaaaaccaaaacaacccttgggcctttgtctcccccctaaaggccagctggggcaagagggagcgagggcccgcccaggcaccggctggggaaaggctgtttgatgtagggccacctcccggggtgaggatgcaaggggacctcggcaggaaccaagtgaggaaactgaggctgggtggtctgggcagcgccccgctcgggctcgggtccccgcggggtctgtgctccagccacgggtctggcagaccctcacgcaggagtcccaggggtcccagtggccgtccctcggagccgggcacccgttgtccttcggatcctaggacgtgccacccctcgaacctcaggacccgccgtccctcagaccccgggcactgacacccctcagaccccgagcacccccgcccctcggacccaaggacgtgccgtccctcagaccccgcgcactgacacccctcagacctcgggcactgccgcccctcagaccacggacacagctgcccctcagaacccatgcacccgggcccctcagacataaggactcgctgcccttcgagccgagcacccagcgcccagtcaggcccccagccgccctcagcctggcccggccgcgccgctcaccctgctgcccggaggaatctgccatggctgggaatcccggacccgcagctgcggctacagacacttcctagaatctgatgcaaccgccgccccggaagtcgcgccccacgccgggcccgtcttccgggacacgcccggtcgctaggcaactaccaggggctccggatgtcgccggcccggagcatgctgggagctgtagttcaacccaatggcgacccgcgctccggagcatcgcgcggccaagcgttcagtggccgtgctgggagtagtcagcccagccgcggggagacaagcactaaagactgagcgtcctgtaataggtgtttaagtcatgattgcgctaagcgccgtggggaccaggcccagcctggaggtcagaggcggcctcgggacagggtgtgctggcgagacgggatggttcccaggaggccgacctggagcagggcctggggatgggcgggaagagcgctccaggcctagggaccgccctgccaatgaccctgcggaaagcaagccactatgaagtgttgcgtgaacaggcttctccatctccttctcagaccccattctggagccatccccaacccccttagggctcctgccttctgtgtgcatgatgtcacctcccaaggatatcccacccaaggttcgtgcacccatccaaaatgagaggaaatgctatttaagaaacagaattttaatatgtcaagaaaaattattagccaggattagtggctcatgcctgtaatcccagcaccttgaaaggacaaggcaggaggatcatttgagtccaggagtttgaagctgcagtgagctacgactgtgccactgcattccagcctaggcgacagagtgagaccctttctcaaaaaataaaaagtaaaaaatcttctagttactttttggaacctcatgtctaatttcataataaattctaaggccgggcacggtggctcacacctgtaatcccagcactttgggaggccgaggtgggcggattatgagggcaagagatcgagaccatcctggccaacatggtgaaaccctgtctctgctaaaaatgcaaaaattagctggacatggtggcgcttgcctgtagtcccagctactcaggaggctgaggcaggagaatcgcttgaaccagggaggtggaggttgcaatgagccgagattgcgccattgcactccagcctggcaacagagtgagactccgtctcaaataaataaataaataaataaataaataaaataataaataaataaattctaaattctactggtggctggaaaaaaaaaagaagaaagagtttgtttacatttctgcaaagatcctgtagcatgtgctgtaacttgcccaggatgtgggaggctctgtgagaccccaactaatcccaaaggagggaccaagtccaggacttaggggacgaagttctggccaggtcctaccatgactctcacagtgcctgtttctcactcatcactctaggaccatgagtcacccaagcccagctcggccacatgccttcctgggagaaggaaccggaggcgcccaggagagtcagaagcctcttagagataaacattcggctaaggcttgccctgcccttcctttcttgcactaagaaagcctcctgacatcaggtcaggcaagccagagtttggctgtaagacctggggtgagtttaacttctctgagcttccagatgtcttgtttttaaatctgcaaagtggggccgggcactgtggctcacgcctgtaatcccagcactttgggagaccaaggcggccaggtcatttgaggtcaggagtgcaaaaccagcctggccaacatagtgaaacttcatctctactgggaaaaaaaaaaagggtctgcagagcggaactgggaaatgatcacctgctcaggtggccgagctgtgtctaagagtgctgcagtgtctagcagcagtgggtcccgcctccccagtcctgctgcgtcccagccctaccaccagggcaaggacactctctgaacctcagcatccccctggtgttgtagttctttgggacagcacattgggttacaggttgttatgggttgcattgtgtctctcccaaaagatgtggaaat

SEQ ID NO: 914448 - DNA, 4001 bp, Homo sapiens
acttatcatctctggaaaactttaccccaatctgtaaaacactccccactaaaaatttctcccataacactgactgactgactgacattaaataatgttaaagatgttctttaatttagagagtggtgggaggtagaaaatgaaagaggcattggtagaaaaatacgtgtttattacacatagatgaaaacagaaacatctgcaatgtctgcttagacaggcataagctttccctaacccttagaacagaaggcttttgctttcaaagaacatctccctctgaagtggctttaggaagtgccacagacatcaatgactgggaatccaccagaactctcatcctcaccacgtggtaggtccaagtggtcatgagatttggccagctcagttcctgagccctgtattgggcctgaggagggttgcaagtggaggatttccaggcctcacagcatgacccacagcctggtaacaggcaaccaggtgatcttactcaaagaaaatacaaggaggcaactggaggaatgagcccattagaaatcttcacttttctatacgttcaatgtgttctctgagtgtatcgccatcattgaaatatattttattcttttgggagggtaaaattttggagaaaagttataaaaagtatttgattataaaccttaaagcttcatgtgactttacaactacataagtgcctacagaccccttgcactcagcaaaaataaatccacaggtaaatattttgccttgccaggaacactggaaaacacagcatgaagcttttcagatggttctcaagagcttcagtaaaggagctaccacatactcagaacaggaaatgagctttaatcagaagagtgccactgaggattaaggaaaagaatcaaaggagagtcaagggacatgcaatagggaccctgctacagaaatatggccctgaagccagaaataagaaagttttcttccaattaacatgactagtaaagaaatcaaatgttaggcacgaagacaggccctaggtgaacttgagtgtaagtcactgacccttacctgctgagagtcccagcgtccctgccaggtaactgtcttcttcacaaatgtatgtgatgcaaatttggcatgcctgtgcccctttcggaataacggagtcaatcaaagctcgggtcttatccataactgtagcattttcacgttttactttctccatctcttccttgttcagcacccttgtctgtaataattcatccagtaagccatttattgtaccttcacccatggaacggataaacagctttctcttctccttcaggaccttgtctgtttagagcacaaggatttctcacatcatgaaaacagcctcatattcctctcatgtaatcaacagaaagtgacctcatttagatttcatcagtgaaatgtccccctcctcacagttgggtaatccctcttcttactgtattgctgtcctacttgtttccctcaatagtctccatacatgtgcatggagtgacctgaagactgagtttaccatttccacatcagtccctggaaagcagagatcatcctcttatgtcgcatgtttatttaactctggttaataaagtaatgaagcagaaatagcccatttcatttaggaaccactgctgctagtactcctcctgtgccaattctgtaccctctgtcagactttcaacatgtaagtaagagtttaattaagattgcaaaatgacatcaggcttcccctaaagcctcagttcctttctgggcttgcctttcctttctaaagtctgcaagaatcttctagttccttctctcctccctctccccccttttccttgcttctactcaagtaaacttccacagatgctaattatggcttccagaagagccagccccttccaaaactctttcttcccagggacctgttcttggaacagtaaaagactcaccggccatggcttttctctcctcccttcttgtgtgactgaaactgaaagtatgcttcgccttcctttttggcagggcctgtacatgtattgggaaatactcactgtgcatgcatatgcatgtctttatttttcttcccattaaagaatcagaactgtagcctgcatcaggtagtgtatccatgggaaattttcttcaccagcccttggatagatcagggtaggaggggaatggggcttggagagtaagacaggattgaaaaagtatgtgtacaattaaattcacacagtgaagagtttctcaatcattagaaagcttgacggagaaaagtaacacaacctttggagtatgtgaaccactgttcccctgaccccacctcatagctcttgggaaagttgtgggtaatgtatgtccctgtgaaacatttttgctttaagaaatagaaacatttttcaccagaattaaagcttttcttatttaatgtccttcttttcacattgcttttttctttctgtttttttttttttctgatacagggtatcattctgtcgtgcaggccggaatgcagttatttgaccttggctcactgcagcctccacttcccaggctcagatgattcttccaactcagcctcccgagtagctgcaattactggcacatgccaccatggccagctaatatttgtatctcttgtaaagacagggtctccttgtgtttcctaggcttgtcttcagctcccaggctcaagcaatgtgcccaccttggtctcccaaattgctaggattacaggcatgagccacccacccatcctggagggtttatttttgagggaaattgcattgtagaggcccagagcataggctctggaatgagaatgtcgaacttagcattttaaacttcccttccttggcaagataatgaacttccctatgcattggttcctctgtatgtgaaataattttattaatagtatgtacctacacagttttgagcattaagtgagagaaaatgtggaaaatgcatggaacatagcctggcaaatggtaagcaaataatgagtgatattattataattaatacaaatgtttaaggttagaaaaataatcaaggatgattatttgcagattatttagctaagtttatcttttgttagaatcctcaagcagtgcatctagtcattcatttagcaaacatatacggacgacattgctctaggtgccagaggttcagtcaaaacatatcatggtcctttcccctttggtctcacattcaagagggaaagacaaacatgaaggctggtgatatggtctgtctctgtttccctactcaaatctcaccttgaattgtaataatcctcatgtgttatgggaggtatctggtgggatgtaattgaatcatgggtgctgttttttttccatgctgttctcttgataatgaatgtctcatgagatccgatggttttataaaagggaattcctctgctcataccctcttgcctgcacccatgtaagacgtgtccttgctcctcttttgccttttgctatgattctgaggcctccccagccatgtggaactgtgagtctattaaatatcttttttgttctatataattacccagccttgagtatgtctttattagcagtgtgagaaatgactaatgcagtaaatttatactgagtaatggagtgctgctgtaaagatctccaaaaatgtggaagcgatgttggaactgggtaaaatgcagaggttggaacagttcttagggcttagagaaagataggaaaatagaatctggaactttctagagacttgttgaatggctttgactaaatgctgctcatctcgaatgaagataggaacttgttgggaagtggaataaaagtgactgttgctgcgttttagtgaagagagtggtggcatcttgcccctgccctagagatctgtggaactttgaacttgagagagatgatttagggcatctggcagaagaaatttctaagcagcaaagcattccagaagtgatttgggtgctgttaaaagcattcatttttatg

SEQ ID NO: 914449 - DNA, 4001 bp, Homo sapiens
gggatgatcaaggtattttgtgacattaaataagatagacaggaggtcaggcccagtgactcatgcctgtaatcccagcactttgggaggctgagacaggaggatcacctgagatcagcagtttgagaccagtctgggcaacatggtgaaaccctgtgtctactaaaaaataaataaataaataaataaataaataaataaataaataaataaataaataaaattagccaggcatggtggaggatgcccataaaatcagctacttaggaggatgagacagaagaattgcttgaactggggaggtggagattgcaatgagttaagattgcaccattgcactccatccagcctggatgacaacagcaagcaaaatactctgtcttaaaaaaaaaagaaaaaaaaaaaaagattggtgaagaaggtcctaagatgggcatagtttattctccacttggagaaaggaaaaataaagaagacaaaaactgaataagaagagtagagaaagaataagaatgaattactagctgttagccccacaatactcacctgaactcagctgttttttggaattccacaggtgttccctaaatattttgcctgcaatttgagctgtctcagtgatatcatcaaccaggttttcagcattgctcaccacaaactttagacattttcctataaggtgtatctcatctgtatttaacacattattttccatcaaatcatcaaaaatgccatctagaaaggtcttgatcagcaacttcaccatgtggaccagaacaccgttggatggtttctcatctgtgaaaatgatagaatcttagatatggacagaactttagatccccattctagggtagtggttcccaaattttaacgtgcataagaatcacctagaaagcttagtaagcagagcttcctgcatcctagtccaaataatttttatttgataggtgagaatgggcccatgaattttcatttataacaatttctcaggtgatgccaaagcctctggtgcaaggaccacacgtggagaagctcctgtcttgttcaattctctccattttcatagatggtgaaatagattcagggaagcaaagtgaattcactaaggaacttagtgacagctgactcagtttagtctttacatctcctacgatctcttcattttctttcacttttatcaataactagtttgaaaagacattacattcaatatgtgtagcataaatgcattcatctgtaaaataacaccttttttgtttcccttatcaaggctggcagggaagctcggtatgcgcagattgagcacacatgttgtagctgacccatttgctgctgtaattgaaagttcacacagagagcagaaatgtggaggaaatgcaagttacctgttcaaccgcctggcttctcaccctcaccgtaacagaacacttataaaatgggtgagaatttcgggtcagtatgagttaaaagaagagtctaaaatcaaaggaaaagtttaagaacagaaatccaggtgtttctacatttctctttcatttgagaagttgtaacatattaatgaagacacttggtttgcatttttagtgctgtgccggaagctgacatatctccctccatacccagagtaaaatagttagcttttgggagaccccctccactctgccttcttctttcccttgaatataacgttctcaaaggacagccataaacaacagaaaaactgaagccactcaccagccatggcttctcctgctccccggacaggaaaaagctgtgaaagcaaaaacaatttcaacaggcttgctctcctctcagtggaccagcttgttgatattaccctgaatggaaaattcccagtcctcaaattctctttttctttgccaagataaaattagactctgatctcgtgtataactgctttcctttggaaaataggaagcagaaggtgttttcttctttttgacataacaaagtgaacagaatgaaatcatgtacacttgcatgagaacccgtctctgtgttctgttttcctgtctatttttaacactgttaataaattaagttaaatctctgtttgtctgtctgatgccatcagcctctaaatggtcaggagtctttacttcactgatacttactcaaccccggaagtgtgattttggaagttaagggaaagaggctaactgaagactgccaaatggtgatactcccttcactatttgagaaactcacataagtgatctcttttcttctctttcctgatccactcatttttaaattgggatgttgtttttccacaagatcaatgtatttttgttcattaaatgaacaagaggctctttcacttatttttgaaacagatatatgtgtgccattaaaatcaaacaacagaaaagtttataaaatggaaaaatgtagattatttaatttcacatggcaaggtaatcacaacgatacgtttagcttgtatctgtgtgtaatattttaaataattttacaaaacacttaatgcaatactgatcttatccatggctctaatcaatggcctcctagcattttttggcctttactttattctgaactggccttataggttggttttggccagcatgatggagcagagggatctgaaggagtttccagtctgagttttacaaatccttgtgcccttcttcctcttgaacacctgaagctaaatgaggataagcctgggctagattgctagctgaatagagacctcatgtggagaagagcccagtcatcccagccaaggccaacctaggccagcctccagccaagtgttttcccaacctatggggtatcccagccttgtcagcagagatgcctaccctacacacagatgatctcagacacaatcctagcagtgacaaaaagaaacattcagctgactggccaccttgtaataataataaatgcttcttgtgtgaagccactgtattttggggtgttttgatactcaacaatagataactaacagacacataattacctacagattgttttttgttttttctatagtggcagtatcttaaaattatattattgataatttgctttatttaacttcacaatgtgtgacaaacattttaaaaaatcaacacatgaaacactatctgatttttgatggctgtatactatttaaaatgtggatagattacaatttttaaaagttttgtcagtagtacagaaaacactacaataaaaatcagatttttatgcttttcatctttggtcccacaaactaggtgtaatttctctgttatttgctttattttttgctaacaatctttggaacacccagtgatgcctgttttatctatttcatgatacaaaaattacaaacaatgctattaactgtctcatatgaaaaatgagatgtagctcattcacactgcgaattctctctcctattctatcttatatttgataatagtgtgatttccaattatttccttgattcattttgaaataataatatacctaactctcacttcttctttcatcaattttgcatagtagcttaattctcctctgtgtaagttgatcagagtttcctgggtgcaatttactccatctcttctcacctccaattaataccattttttcccaatttcctattgtggtaaaaatacatacccccggccaggcacagtggctcacgcctgtaatcccagcactttgggagaccaaggtgggcagatcacgaggtcaggagatggagaccatcctggctaacacggtgaaaacccgtctctactaaaaatacaaaaagattagctgggtgtagtggcaggtgcctgtagtcccagcttatcgggaggctgaggcaggagaatggcttgaacctgggaggcagagcttgcagtgagattgggccactgtactccagcctgggtgacagagggagactctgtctccaaaaaaaaaaaaaaaacccaaaacaaaaacatacccccaaattgaccatcttaacattttta

SEQ ID NO: 914450 - DNA, 4001 bp, Homo sapiens
tggtcttttggcagagagcagtaaggaaaaaagcacaaaggcttgagggtgtctcgtgtaaccagaaaactgggagagctgggctttagaaggaatagaaatgtgaggccaggactgaagtggcagtgatcagagacagggcaagtatttgaagatgtttgcagaaagttagattaatggcagagtttgagagtcatgccaacctgagaccactcctctcaacagacttttgacctaaagcatattttggaggcattctctaagtatccccttcaactacaatatggaaataatagcacaactgtattgattgatgttaaatattaaatcagagagagtgcatgaattagctatcatatggtaagtattttttaaagaaatggttactatagattattttttgttattataataatcactgaatgaaagctgcagtgataataaaaatggcaggaatcaattagaggaaaaaacttatcaggaccacagttttggttccaggcaaagtgatgtaatgcttaaacacattacaggatacaattcctcaagagtttaaggtaataatagctgtctacatttggttgtttataattatcaaaccacgacttgtttttgactagtggctttcaatttaccctatctttatctaatgatcccttgattccagagcttaagttaaatgttgtgaagttagacataaaccccggagagaattgttctatagggagaatcaaaggagtaaagaaacaacaacaaggtaatatgagtgaagtaaatacagtatttttttatgaagttgaaatcatgctttacaaagattaatggaaaaactggatacacatgtttcaaaaggtagaaaaaattgtctgaaagttcagatagtaaaaaagagaaaaggcaatagggagccactgtatgtccctgagcaaagttaattacattaatagatcactagcagataagcagagagtgttaactaactggtcaactttcctaatagaacaaacctatgtcaagtcagtttcataagaattatgtgacgatcttcaaaggtaataaatgcctgcagggtatttaagattgagctattcgcggtgaggaagggggtagtcatctgactttttttatatgactacagattgctgcgatatgttataaggtttagaattcactgatctagtccaatttcttccttttcctgtgaggagaatgaagccaaagaagcgttatgacctgctggaatactagctgcctaagtaactctatcccttaggctttttcagcttctgtgtataagacaggtgacctaaaagttgtgtgcagaatggattggagagttaagtcctggagggaaggataccagttaaaaacaataacaacggcaaaacaaaacaactgtgatattaacccatgaaatattatattaaagtagtcagtatcaggaccaacgagaaagaggaaaaaattgaatcactttaaacagaccaagaatgtaattcacaataagagatgtcgaagaagataacaattcagaggctctcagatctgattctgcgaaaaaggtttgtgatctgggcaattaatttggaatcaaaagaaagatttcagagtgcatttcgaaacttctagaattgtctcacacaaataacttcctctggctttctttaccctccctttgattaccagaagctgaaagaaaggaattaacttctttctggctcaaagacatctggaaaacatatgacctccgtcaatatctctaacaccaggtcccatgattcaaactacacacaatcagtaagaaaaggaattcaacatgtgtgctatcggctcacttcctttcttgtgtttatttcagagcaataaatcaagtgttttctaagttcctactcccaaactcctagtcagaaaaggactcacctgccatagggaacagcctctgtccttttttacagcgttggaaagagcctcagagtcaaaaatgaaagtaaactatgtatttccttattgcaaagggcggaaacgtgtaattacagattgtgaaactgctgctcagaattccagactcattatcaggaagtgccttgtcatcagcaaattggcatccaattactggaatttagtttctgacttgggggaaaaaaatgaaaatgacaaaatattatcctgtgggttgacacctcagcttgtttcttttcttgtttcctgtggccacccaaacttcttctatccatctgtctcttctcttcctgatctctcagtttttctttctctgattacaaagaacgacaatgactgaagaagtttaatctaacaactctttttcatttcctgataagaattaacccaatagttcatatttccagctttttgggcaggcactgagctgcaggagtttttacatagtccagcagctcccggaactctagtgaggcaggagtcccgtccactcccatggaaagggggctgaagccagggagcaaaatggccttgcagcaggtccattctcacagaagcctgcaagcttagatccgctggattagaatccccactagccagcatagcagcctggagtacgccagagatgaccgagttccccaggggaggggcgactgccattactgcagctctagtcagcggtttttccctaccagtgctagggaggctgggcagattggactgggcagcagtcttcacagtgcagcacagccgctgtggcagatcatggccagactgcttctttaggtgggaccgggatccatccctcctctcccggcaagaaatgcttgcaggaatttcagcaactccacctagagtttacagacagagctctcatttccctggtacagagcacctgcggagaggggcagctgcggtctcaggttcagccaacttaatctttcctgcctgctggctctgaagagtatcagcgatccagacaagggggattcccccagcccagtgcaccatctctgctaagggatagccagactctttccttaagtgagttcctgatcctgggcctcctgactgggttagaccattcaacaggggttgccagacacctcatacaggagagttccaacaggcgtcaggtcagtgatcctctgggaagaagcttccggaggaaggaggaggcagcactctttgctgttctgcagcctccattggtgatacataggtgaacagtgtctggagtagatcctcagcacactgcagcagacctgcagaggaagggcctgaatgttggaagaaaaacaaaaaaaaataaaacaacaataacacagcatcaacaaaaaagaccctacaaaaatcccatccaaaggtcaacagctttaaagattaaaggtagataaatccacaaagatgacgaaaaaccaacgcaaaaccgctgaaaattccaaaagctggaatgccttttctcctcaaatgatttcaacacttctccagcaagggcacaaaacagggctgaagctgagatggatgaactgacagaagtaggtatcagaaagtgtgtaatgacaaactttgctgagctaaaggattatattctaacccaaggcaaagaagctaagaaccgtgataaaagattacaggaactgttaattagaataaccagtttagagaggaatacaaatgacatgatggagctgagaaacacagcgtgagagcttcatgattcaaacacaagtatcaatagccaaatcaaccaggcagaagaaagagtatcagagcttgaagactatcttgctaaaataaggcaggtagaaaagattacagaaaaaaataaaaagcaatgaacaataccttccagaactatgggactatgtaaaaagaccaaacctatgactgattgaagtacctgaaagagatgtggagaatggagccaagtcaaaaaacacacttcaggatatcatccaggagaacatccccaacctagcaagacaggtcaacattcaaattcaggaaattcagacagtcccagtaagatactccacaag

SEQ ID NO: 914451 - DNA, 4001 bp, Homo sapiens
aaacagatttagggaaaattgagacattcattgtaaaaaatccagtcttaccttttttattgggggatatttggtctatgttaaaaaaggtttgaagaagcatttgtcctgccatacgttgcttctcttgcatagagtctgccatgacccgaactttgtcttcagttttagcatcgtaatatttctttttttcctcttccttccagttcagtacattttgttccaccaagttatccaaaacaccagtgaggaaatctttgcccagggattccaacaccttaagtggcttttttctgtggttgccttctgttagaaatagaaagattcctttaactatgggcacagcttaaagagtttcaccctcactttagatatagttctataatgtgaaatacttctgaaagtatgtcctacttcaccatctgtcttcttgtacctatagagttctgtcattcatcatattcctaccaggttgtttaacaatttattgccactaaatactttttattttcttttttgttcttttttcttttcttttcttttagcttctcaacttccttctgtggcattggacctaatgcaaacttcctggtcatccactgtattcatttttctcttttactggttcacggcccatagtgataatgatctgcctaaaatatatattcccgggaaagtcaatgctcttgtctagaatataaattcttcctactagatttttacttcctatatgatttttactcttttctgtatttagttttcttggtgaaagaactatatctttgaatttgcatttttttaacttacatcctatacccacatctttgtattcaaaatgtttaaaagtacttaatatgcttgctaaatacataaattaaagaataaatggatgagtgcatccatatttataattctttcaaatcttgttctcaatgaaaatttaaaattgaaagtaacctgattcctaatcttccagtgtggtggattagtttaatttgacaccatgttaatgtattactccttagagtaatttgaatatttataaggaaatatagataccaaagtaatacatcctttgtttcaatacaacagatatgatttcggcagattgtacacagaaatgctggatatcttatcaattctcaatcaatgctacaaagataattatacaatccatgtagatgtaaggatagtgctgacagaaaatgacatctaaagaaatcatgtcaggacattgcacaaaagctttggcacagaagcaccagcctcattgtctgggttatcttgaattaatattttcatacgtgcttattgggcagctattatgagaaaaacattagacattacaaaccaggaaaaaagttacataatataaattaacttagtaaagggtaatatctcccatgtacttattataaataaaaaatgaatgcatataaaacaatttaaatcattattataatcatcattatcatttacatatcactgtaccaaaggttttacaaatgttaatatactggaccctcacaataagccagtggggtagttattatattccctattttatattcaccatttaaataataacttatgtcacatcacatgaattaggattcaaatcttgtttttttcaccatagtctatatagttaatcatgatatggttcagttaaaatagttaatattcattgagccctcatcatgccaagtgcattactgaaatttcacaaaaattccatataaaacatatattaacctctcttatatggaaaatggaagataataagtaattgactcaaataatgtaaaagaacaccgagtatatagtaactgggaacaagaattgaaatctaggggttcagaatccagagcccccattcttaattcatcaaactacattacctgacagttggtgaagagcttcttaaaagaatgtagacaagatatttaaggggctcagaaaacattagtgcattccaacaggtgagatcacaaaggcttctgagaagaggtagcaaaaatgttagtcttgcaacatcaggtacagatgttgcaacacagtgtgatttgcaaacagtacacagattagtgtgtgggatatccaaactacctgagttctgggcttctgttttatttatttgtgtgctcagtaaactaatatagtgttgactgaataaatgatatgtgaagaaatataataagcaataaaattgaagagtttttaacaaaaaaagtcacatatgacaaacacacagctaacatcatactcaatggtgaaaagttgaaaaccctttctctaagatcaggaagaagacaaagatattcacatttaccacttccattcaacgtagttctgaccagagcaattcgccaacaaaaagaaataaaaggcatcaaaattggaaaggaagaagtttaattgtgcctgtttaaagatgaaatggtcttatatacggaaaaccctaaaggatccaccaaaaatcttttagaacaaataaacagattcaagaaaattgcaggataaaaaaaatcaacatacaaaaatctgtagtgtttctgtataacaataaaccatctttaaaaaataaataaatttccatttaaaattgctgcaaaaatacttagaaatcaatttaaccgagtaggtaaaaaacaagtacacgtaaaagtataaaacttcaacccgatcaacatggtgagactatgtctctacaagaaatttaaaaagttggctggccatagtagcatgtgtctatagtccttgcttcttggaagtctgaggtaggaggattgcttaagcccaggaatttgagattatagtgagctataattgtgacactatactccagtcttggctacagaatgagatcctgtctcaaaaataacagcaataataacaaatctcaaaactataaaatattgatagggaaaactgaagaagacaaaaataagtagaaatgtattttgagttgatggactggaaaattactattattaaaatgtccctaatacccaaagaaatctaaagatacaatgcaattcctatcaaaattctaatggcagcttttacaaaaatagaaacaaatcctaaaatttatatggaatcacacacaaaaaaacaaaccctgaataggcaaagcaattttgagtaaagggaacaaagctgcaggcatcgcactatctgagttcaaaatagactacaaagtactacagtcatcaaaatagcacaatagttgcataaaaatagaaacagagagcaaatgaacaggacagaaaacccagaaataaacccaattatttacattaatttgacttttcaacaaaggtttcatgaacacacaactgggaaagaacaaattcttcaataaatgatattgggaaaattgtaaaaccacatgcagaagaataaaaatctctaaacatatacaaaaataaactcaaaatgagttaaatatgtaaatgtaagaaccaaaactgtgaaactactagaagaaaacagaggggaacagcttcataacattggtctagacagtgatttttggatatgacagaaaaggacaggaaacaaaagctaaaatatgcaaatgaaattacatcaaactaaaaagcttttacacagtcaaagaaacaatcaaaagattaaagagataatcaacagtatggtagagaagatttgcaaaccatacatctgataaagaattaatatgcaaaatacaaagaacacaaacaattcaatagaaagaaaataaactgatttagaaataagcaaaggaccagaataaacacttttcaaaagaagacatacagagaatatgtatatgaaaaatgatcaacctctctagccaccagggaaattgaagtcacaatgaaatatcactttgcacctgttggaatggctattaccaaaaagacaaaagataacaaatggtggagaggatgtagaaaaaaagaaactcttgtacactgttggtaaaacgtaaattaggccctgcgcagtggctc

SEQ ID NO: 914452 - DNA, 4001 bp, Homo sapiens
taaagacttaaaagttagacctaaaaccataaaaaccctagaagaaaacctagacattaccattcaggacataggcatgggcaaggacttcatgtctaaaacaccaaaagcaatggcaacagaagccaaaattgacaaatgggatctaattaaactaaagagcttctacacagcaaaagaaactaccgtcagagtgaacaggcaacctacaaaatgggagaaaattttcgcaacctactcgtctgacaaagggctaatatccagaatctacaatgaactcaaacaaatttacaagaaaaaaacaaacaaccccatcaaaaagtgggcgaaggacatgaacagacacttctcaaaagaagacatttatgcagccaaaaaacacatgaaaaagtgctcaccatcactggccatcagagaaatgcaaatcaaaaccacaatgagataccatctcacacgagttagaatggcaatcattaaaaagtcaggaaacaacaggtgctggagaggatgtggaaaaataggaacacttttacactgttggtgggactgtaaactagttcaaccattgtggaagtcagtgtggcgattccacagggatctagaactagaaataccatttgacccagccatccctttactgggtatatacccaaaggactataaatcatgctgctataaagacacatgcacacgtatgtttattgtggcattattcacaatagcaaagacttggaaccaacccaaatgtccaacaatgatagactggattaagaaaatgtggcacatatacaccatggaatattatgcagccataaaaaatgatgagttcatgtcctttgtagggacatggatgaaattggaaatcatcattctcagtaaactatcacaagaacaaaaaaccaaacaccgcatattctcactcataggtgggaactgaacaatgagaacacatggacacaggaaggggaacatcacactctggagcctgttgtggggtggggggaggggggagggatagcattgggaggtatacctaatgctagatgacgagttagtgggtgcagcccaccagcatgtcacatgtatacatatgtaactaacctgcacattgtgcacatgtaccctaaaacttaaagtataataataataaataaataaattaaagaaaaaaaaagactgcagattattcatatatgttataaggtttagaaagcactgatctattccagtttcttcctttttccagtgaggagaatgaaaccaaagacgcaatatgacctgctggaatacgagctgcttaagtagcccaggactccaactcataggcttttttagcttctgtgtataagacagttggcctgaaagtagtgtgcagtatggactgaagggttaagtttttgggagtgggaagacagttaaaagtctatgatagcaacctaagatatattacattataagagttagtaccaggactacatagaaaggtggaaaaatgcaatcactttaaacagaccaataagataattcaagataagagatgacaacacgttgagaacacagaggctctcagatctgattgtggggagaaggttcatagtctggaggattaatttggaatcaagaggaagcagagaagatttcagagtgcatttagaaatttccggagttttctcacacaaataacttactctgtctttccttactctctctttgattaccagaagctgaaagaaaggaattaacctttttctggcttgaaaacatctagagaacatactctccttcagtgtctctacacagtctcaggattcaaactacataccaccaataagagaaagattcagcatgcacactattggttgatttcccttttggtatttctgcctgtcacatagcaataaatcaagatttttctaagacctgagtacccagctgctagtcagaaaagggcccagactcaccagccatagctaacagcctctgtctctttgtacagcactggaaagtgcctcagactcagagataaaatacactaggtacttccttattgcagggagtggggacaagtgattacagattatgggaagttgcttctgggaacctatagtttcatcattgggaagtgccctgtagtaagcaaattggctttctattcttgaactctagattcttccctggggaaaaaaaatgcaaatgacaaaacattgttttgtgggttgaaacctcagcctggttttctttttccttttctctctccatagccccacatcttcttttattcatccctctcttctgatctgtcagtttttctacctctgctcgtctaaaaacacatgtcctgaatgagtaaaatctaactagtttccttgcatcttcccataagaattaaccaaatattttgtatatcttgggtttctttatttttcatttcaatttttatttgagtttcaggggtacatatgcaggtttgttacaagagtatattaggtgatgcagaggtttgtagtacaatttaacctattacctaggtagtgagaatagcacccagtacatagtttttcggctcttgccttcttccttcattcctccctctggtatttccctgtgtctgttattcccgtctttatgtccatgtgtacacaatatttagctagaacttacaagtgagattatgtgatatttggttttctgtttctgcattaatttgcttagaataatggcctccagttgcatccatgttgctgcaaagggcagggtttcatttttatggctgtgtaacattccatagtagcagtgtaccacatttttttaaatccaatccaccattgatggacacctgggttgattctattattttggctacagtgaatagtgctgcgacaaacatttgaaagcacatgtctttttgatagaacagtacattttcctttgaggattcagtcagtaatgggatgcttggacaaatgatagttctttttttagttatttggtaaatctccaaactgcttttcaaaaagatggatgcatcacattactggacttcaagctatgctagaagtctacagtaaccacaacagcaaggtattcgtacaaaaaaaacagacacaaagcccaatggaacagaatagagaaccccaaaataaagccacacacctataaccaactgatactcaacaaagtcaacaacaacagcaaaaagaaacaaggaaaggattgtttattcaataaatgtatttcttgtttaaactgtgctgaggaatcatgatggagtcttctcctccccatctccctgtcatcttacgctttgattggagacagttctgaaggaatcctcttatctacttcctggaatgctgttcttcaactgactaaaactgctttaacagttaatttttacttagggtggcaattcacttctcctttttgatattctctgagcaaagactgatcacagatgtagtctcaggttgtagtagagtatgcatgataacacagaagagatatgcccagagaaacagttaataaaaggtaaaaaaaaaaaaaaagagagagagagagagactgtaatgtgttcaactatgaaggtgtttaagaagtcagaaattaactctcatttaatctgttaaatattagaaaaaaacatatttgcaagtaaggggtagttcttcgaatcctccctaaatcttaacatccctgagtgcatgatttcaccccaaactcgttttctctgcaccatgccaggacttcactgtgcacaccatgcatcctagagtttcttcagggtgtcaggcaccatctgccaagcgcttcattttggatggctgtcttatcttttcaagaagtctgtgaactactgagggttgattcaaaacttactttgtcttaaatacttttgcaaagggtagaaacatgcaagttcatggatttgtcagtagcaaactgtgggatttgggaaaagttctttatcacactacactgtcgctgtcataactagctgtctt

SEQ ID NO: 914453 - DNA, 4001 bp, Homo sapiens
caacagttcatgattctcccaaacaaggaagaaggcagctagtctcagaataaaggggagtcctttaaaaatgaaaatattacacctgtaatctcggtactttgggaggccaaggcgggcagatctcctgaggtcaggagttccagtccagcctggccaacatggtgaaaccccatctctactaaaaatacaaaaattagctgggtgtggtggtggacacctgtaatcccagctactcgggaggctgaggcaggagaattgcttgaatccgggaggcggagtttgcagtgagtggagatcataccactgcactccagcctgggcaacagagcaagactccgtctcaaaaaaaaaaaaagaaaagaaaagaaaaagaaaaagaaaatattttgttttgtaaaaatctcactactttgtccacacttttctcaattcaccgagtattcatgaaaacttcagtgtgaaccaggatttgcacccactgggtaaggaaagagtcttgggtccaagaagctgaattctaaccttgtctctgccactaagtagtggcacatcctttactaagactctacctctctctggtttactttaagagctcatgaaccaacctaatggtatataacaaagaacagggccaagaggggagattttccaggcccttggaggagaatggcagccttttcccaaacagggaaccattaaagcaatccatgagcacttagcattaataccccagttcacgaacctgagttttgagcaagagcactaggcagaatagggaaaacagggctgcagtcctctgtctaccattaaccagcagccagggaacagggcaagacctttagactccctgggccaatctgccaacagtagactcagaccagatgtggtctcatctaatccaacctcctcatagatgccctctgagactctgcagccgtgggcacaggccaggaatgcctcccccaccaccaagttaaaatcctactcatttaaaaaaattcctgttcaaatgtcacctgctttgtccggcccacctggtcactccctctacattctacagataacctctattagagccctcaccacgctggagtgtaatcatctgtttatgtgtctcgtctcccagactagactctcagcttctcaagggtgttgttcttgccgcactggaatttgtacaccttgccccgaacagtgcctagcacctacaggtgctcaaagaatagaataaacgcattaatcaatccctaatgtcaccccccagctctaaaatgctaggcttgacattttgaagtgcaaatgagacaatgaatgtaaaagttcttttatttagtcgtttaataatgtgcatagtacgtaccagtcactgtgactggtgctggagacctcaagattgtaaaacacaatccctgccctgctgggaccccacaactatgaaagcgtgtaaacagtatttcaagaagggcaccattagagcctggttccacttctcccctcactgacttccttgcagctgcagctctctgcctctttccccatgagccctcaatctgtcctcaagctgcgacctctgtcccagttggcaaaagtgcaaaattctgaagcaaccacccgagcctgtcgcggacaacaaagcctgcagtcccgcgccccactacccggacccccctcccctgcttcggcgaatgtaaaagtccgtctgcaccgaaggggatcccccctgcccagtgagccgcggtacagtccctccaagcgccgccccgggggaagccgggcctttacttgccgacgcccccgctttctaaacggaccttcgggcccgctcggggagcacagagtgtacctgcgcggcccgctgctccttccagtgctgcatctggtcgctggcgggatcccggctgtcagccatagcgtgcggtttgctgtgcagaacactgcaggaggcctcggctcgtgggtctccaccctcagcaggcaaatctgcctgttgccccgagtccgtggcgacttcaggctcagccaatcagcaccaccccctcgtcccgccccctcgggaggactgccttctgattggctgctcggcgctaggcaggccaagattggaagcccaatgggctcggagcagggctctccgaaggaggcctgaagaccggagatacccaggagggtgcggaaaggaagggtcccgctctggcccagcaattggagagcctcgccccgccggcccggggtgcccgggatagccgaacccagggcggggctcccggttatcagcatccttcaggccgccctgggacgcggccgttggtggcctgccagttttgcagacggaatacttagaccctgctgggtggggccttgcgctccatagctatgctttctcagctcttaaaaagtcagcaatcctgggttaaattactctgtacaaaattaaattttgccatacgctaatgtaagtattatttgcaaccaaaggatggatggatgcttttctttttctttcttagctcttcttaacttattcgtggattatcacttactagactagtatactaattatttaatataaaaacactctgaaacgtttatctccgtacagatgggtgttgatttcctcctttaccagagaaaaacaacttaacttagatgggaaaaatgtattcccttgtgatgggaaaaatgtattcaactctggtacactgccaaattggcttctttaaacactggagaaatctgcttccccaaattttacccccaggtaagcaggaattttgaaaagctttgtgtctttaaaaagctatgttgaagagtaaaatacttagtaatatatagtacaatatttagtaagttactgactagtttgtcattgtaatcaaagagtttgaatgatttctacacctcctcaggtgctaggatttatctttaagcaccttaatatatatacatagtatataccatcatcttcaaattaaaagttatcagcttttaattttttccagtacaactacatataatgggtggatatataatagtggaaacttcacatgttgttcttgatcttacaaaagtatgataagaatcttgggcataaaagtggaactttagcagttcattggaaaagaaagccacaaattgatctttagcaccctatacttttcctatattaaaaacaattataaagatgctgttggctgtgtaatttggtgtctttttctacctgcccgatccatactgccaagactgtaaactccatgtgggtcaggatcctcccatccataatttattgagcacttactatataccagggactattctcagctttttgtatatttgcttagttaaccctcccaacaaccctatgagttagatactaatattatcttcattttacagattaggaaacagaggtatagggaggttaaataacttgcccaaagttacacagctattaagggatagtcaggattctagcttcagctgttcatctccaaagtccacagtttgttgaataaataaatgttgaaataatcgagcaaatcatcttcttaactaaccaacacaaatatcaacaaaataaataagagacctggagtcatttcttaacctttattcattatataaaaaaaagcatgtttttttttcctttgtttttgttactatggatttgaattcctaaagaattatttctagagaaagaaatggagaaacaagactggtttctgatcttgtcatatcttgtattttaaaataaagggcaggcttacaagtaatgacaataaatttataatgttacataggaggctgggtgcgggggctcacgcctgtaatcccagcaccttgggaggccgaggcaggcggatcacttgtggccagaagttcgagaccagtctggccaacatggtaaaaccccacctctgctaaaaatacaaaaattagctgggcgtggtggcacacgcctgtagtctcagctactcaggtggctgaggcgagagaatcac

SEQ ID NO: 914454 - DNA, 4001 bp, Homo sapiens
gatccacccacctcggcctcccaaagtgctgagattacaggcgtgagtcaccgcgcctggcctgttgtcatgtttattgaactactaggaagaaagtttggtggcgtatgagctaaaggccatggtccctccttgccctccaataaggccctcattcaggcattagttcctaatctctgttctcaagcagctcacaggtgagtgggagaaatctggacagatagaatccaccatggtaaatgttctgagggcaggccccgagcacaggatgatctgtggtcagctaagtgaccactcctagttttgggcccctcgagggcagcgactgtgttgaatttttccccatgctgccatggcccaggcaggccacacacccacattggatgagtatcaatgtttgactggtagacatatgaataaataaggcagtgactgaatgaacaaacacctcatggcctaaagaggtacataattcaaggaataaaagatgggaccatgaacagtcaggagagtgaatagccagtgggggacctgtgcaggagggtcgggccttacgatctgcggaaggacagtgcggggccgagatcaggtctggatcctgcgccaggcagcaggagttggcatggggggcccagcaaagactcacttttgcgtttctgaaattgcccttcttctttgccccagtcttctgaatgtttggtggagatatcctgggtatggacttttttggacatctgggtgacacgtgagcggattgtgctggaggaccgagtcatgctgtgagccgagccccgtgggtgtgctacgtgataggggaagactcctgtacgagaagcagcagggccgggggcatcgtgaatcaggctccgggatgtgtgtgggatagagagttgggaagtgctctggacgtagtcgccatggaggtaactggaatgatacgcgccgtggtggtcttggtgctgatggtagtctcggtgccggtgggtctggtggtagtggtgctgtgtgtggtggggatggtcgccatggtggtactcactggggtggtgatcaccttggtggtactcgctgtgatagtcagatatcccacgctggtaggaccccacagaggaatgaggggaaatggtctctccgtgatgaggagactttccatgctggtgggcttcatgatgacgggacctgccatggtggtggacttggtgatggtggggccagccacggtgggggacttggtgatgctgggactcatcgtgttggagcccgctaaggtgggaagcctcgctgtggtggaaggactcactgtagggattgggtccatgggggaggtaggacccaccatggtgggaagcctcaccgtggtggggcacgccagaggaatagtgggataaattctcaccgagatattggggtctgccatggtgagaccccctatggtaatgggagtcactctgctgatggaacccaccgtattgggacccatcatgatgcctcctgccatcacgttggagctcatcatggtagtcctcaccgtaggaacggtgggaggggacggcgccttgagagggagccagaccaaagcctgtggggccatgggctctgccgtgattccgtgcctcgctgtggtggtgagattggtggacatgggaggacaaggcttggtcgtggaagtcttggaactccggagggtggtgagattcaccacgttggtggggcacgccgtgatggtgcaactcgtaatggtggagagctctgctgtggcctggcctgtggtgtgggggtgatgagtgagagcgaaagaacctatctgcgttattggtgtctgcctcattctgagccttttcaggcactgagttttgatccatgactgtgctgggaactctggagccaaaagagctcaagacctgggcccaacaggccccgcctggatttcccttctttcctgagccaagctcaatgcagactgtggcactgggcttccagaaaggcctgactattctcgtggaactctcccctctatgatgtcaccagcaggccagggcctcattcccaaatgcctcttcctgggctatagttcggaatcaagaattattgtgtcaaactccttcattgtaaatgaggaaaccgaggtcaagaaaagggaaggactagaccaaggtgacctcacaggtcactggcaaagctggacaaagaagtccatgggggcgccatggcttcatcagctactttagccctgttgttggaaagaaaatggtccaagtggtccagtcttcagtcccatctagagatcagctggctctggggtgaagactgcctgactccctcataagtaggtgtgtgaccttgggcttgttgctgaactttcccgtgcctcagtttcttcctctgtaaaatgggaataataatacctagcccacaggatcaaaaaagttaagatatgtaagccttatattaacagcataatacatggtttttgttgttgttgttgttgtttgtttctttgtttgtttttgagatggagtctcgctctgtcgcccaggctggagtgcagtggcacgatcttgactcactgcaacctccacctcccagcttcatgccattttcctgcctcagcctcccaagtagctgggactacaggcgcccaccaccacgcccggctaactttttctatttttagtagagacggggtttcaccatgttagccagaatggtcttgatctcctgacctcgtgatccgcctgccttgcccttccaaagtgttgggattacaggtgtgagccactgcgcccagcccatgtttttttgtttttgtttttgttttttgagacagtctcactgtcacccaggctggagtgcagcggcatgatctccactcatggcaatctctgcctcccaggttcaagtgagcctcctgccttagccccctgagtagctgggattacagccacccaccaccataccccaccccggctaatttttttttttttttttttgagacagagtcttactctgtcactaggctggagtgccggggtgcaatcttggctcactgcaatctctgcctcctgggttcaggcaattctcctgcctcagctttcctagtagctgcgactacaggtgcacaccacacccagctaatttttgtatttttagtagagacggggtttcaccatgttgacgaggctgctcttgaactcctgacctcaaatgatccacccacctcgcactccctaagtgctgggatttcaggtgtgagccaccatgcctggccaatacatgttaattggcattattattctcttcttgatcttggaacccccctttagggttattaccaaaattaaactatcagccatcatttattgaggattgcttcatacacattttgttttctttctttctttttttttttttgagacacagtcttgctctgtcacctagggtggagtgcagtggcatggtctcagctcacagcaacctccacctcctgaattcaagcaattctcctgcctcagtctcccaagtagctgaaagtacaggcgtgcaccactacgcccagctaacttcttttgtattttagtagagatggggtttcaccctgttggtcaggctggtctcgaactcctgatctcaaacgatctgcccgcctcgacaacccaaagtgctgggattacaggcatgcgccaccgtgcccggcccatacacattaaatttaatcctcacaatagccccacatggtagatattgtttatccccatttgacagacaaaggtgctatggctcagagaatataaatgagttgcttgatgaatgaaaacttaccgtcagtgctatctcactccaagtctgtatctgtaaccttcatgctgtcctgtcttcctcctggaatccactgcagagcttgccctgtatgctgaattcatatgtgcacagcgcagctcttctggaagcttatgggtctcagcttcttgagtgcttggtcagagccatgtccatagtggctg

SEQ ID NO: 914455 - DNA, 4001 bp, Homo sapiens
agtattttttctatgccagagtaaaatttgtagtccttaacgataaatccctaaaaagcaaactaacaaactttagcatttgaatatcttcgatgtgttttttttaaaggagtcgacacatttaaagtttcctttacacacctaaactttctgtaaggattttattataatttctaacaataaaattagtactacaccaccaatataatcaacacacgaatacttgtgtcattaattacaataccaattatttaacatgagaaaagccagccctaaaaaggtggctatgaaaccactggcatgcactactggagtgttaattcacacacaggacttattaagcatttaaattgcacattacattggctaagtgcttcataatcattttattagcggtttctagtccaaagcaacccatgaagaactttacagaagaggaaccgaggcccagggaggaaccaaagaaaaccaaattttaccctggaggaaataacaccattctcttaaaacgtgccagatacttctaatcacttttcatacgcaatatgaattttgtcaaagtaattaattaaagaatatgaaaaataccaagaaaacgtattgaattctgacaaagcgtccgactgcttaaacagttaaatacttgagactgactacatttcatcatatagacacaactataaggaagtaaaattctcccaaatgacaaacttagtggctaaatataaaggagttatttttgttcgcacttgcaaaaagcaaacaaacaaaaaagcgtaatcaaagaagctcaacgaacaagtttaaagtcaggacctgtaataaggagtcagaaccgttaccagaaaaaaagaacccagctcaagcgatgtagtagggaggaagttattaagaagtcagaatctgctgctgcttaacaggctcagccagtccatctttcagaagataatagttctaaccagaacttgtggtttaatcagtgcatatctcagcaccagcaatggatcacatccagtgtttctgagggtaacaaaaaacttgagccggcgctagatggggaggaaagttctttccttgcctcacttaaacatcaatatgtcttttatcttcgtgttacatcttaatgagaaaggactatactctcacccagagcacagcttccctgagagctgtcctgaccccagccaggttcctcagtcagagcccatgaacctaattccctagtcagatctcacccagccaagagccccagccggtacatcactcttcctcaccccctccctgctaacctcccaggccaattccgtgacctacatccctacaccctgcacagagccccaaactccgcacccctcattgtacttccgccccactgacttcccagttaaccttcgccccagcccccactccatctttgtctggctaccccaaacgcggcaccccagcgttccccgactcccaacggcagcccctcccccacgccgccccccaccctcccggcctcgtccctgcccccacgcccccggccggtcaccccggctccgcgcctccccggcttcaccagacccgtcccctcccccgcttcctccgtccgctcgttcccctccccgcggccctccgcccacgcccaccctgcaacagcgggcgctcagccggcctttcaccttgtccatgagcttccagcacttctccaccatcttcttgtccaccgtccccggcgggtgggggctgaggtggtggtggtggtggtggtgcggctggaaggcgtccttcatgagcccaatcaggccacccgaacccgagcccccggagccgctgccgcccccggccccagagctcttcttcacgttgccggccatggcctgggcagggtcggagcccaggcgggtccgccggctcggctcgactgcgagcgagggagagaagcagggcgtgaaggaggggcctctcccggccgccgccgccgccgccgccgccgccgccgccggctatccgggcggagggaggagcggccgtggggaggggagtgggcggcgccgggagtgcgcgggacgcgccccttcagagcgcgcgagcccggggcgggcggggcgcgtcccggaggcggaccggcttactggtaagctcggggaagcggccggccgcggccggactgggcagcgacgatccccgggccaccggcttcgagcagctcgcgtgcccacagctcccggaaagccgcggccaggtttctgtgcccgtcttccccgcccctacgccggggcggggcggggccaggctggggcggggtcggcggaacctttgggcctgcgccctctgctggagaaacggggaaaggagcggcggggggttggggagtaggtccaaggtggagtctgcgcagtagccagaaaccaagacttccatgctccttgtgggcgggaggttggcgcttctggggtgggtcatgggaatgtttaaattaagacaggtggcgatggaatggaagagtcctgatgtcaagtctttccccacccctgacaaatgaggaaatcgagcttagagttatttgtttatttacactgtgggaggatggtgggagaaaaaggaaagttatttctccaccccttattattttcaattcttcattaagacacgaccaaggacaggaatatgaatgctgcggcccattccagccggattaggccccagaaagccttgagacactcaagccaggacctcttcttccaggccctttgacctcttgaaaagaaatcacttcctttttttattttttatttttatttttttggcttgtgaagactagttacgtttctgggaattgaatctcaaacatgtatttaagattctcctactcagagcattgcaccacaggtcggcgccgccagcatgagggccccctcagaagctgacctgctgctggctccgcccgagggggttctctctcccgcccagggaacagaaatgctgttcctggtcacttccacttctcagtcaattacacttctctaatgtaaaagttccgttggaagaactttgaaaataggaacttcccttccaaagagggaagtgccctgccctaatttactaattctgagcctcagttttgggagtttgcagacccaggtgtgtcagtatcagttccgccttcgatccccctccaggctcttccacaaagcccttgacagattagggagttaaatttatccggtgctcctgtaaaggggaaaatatctttgaatgcagggaccattcagacaggcatcctgggtttgcaatttaatcgcctttatctagaattgattttggagtcaacattataatttactatcagaagaatttccttttatcattttccatccaggaagagaagaatctacaaagggaaaatctaggcaaagctccatcccttagtgccaacacctagttgcaggtcctccgtttcttttccctggactattgaatattgaaaccttttcctgtgccttcaattcatcctgccaccataggcttcctaaagtatagttcagacagcatcgcaaaaaaactttaaacacctcccattgcctcgggaataaaattgacaagttgctctaactccaagctaaacaaccttgtagttttatactactccctggtacacatgtcttatgctagctgactcaccaagtcatcaaatacaattatttcttttttatttatttatttattttattttattttgagacagagtctgtcacccaggctggagtgcagtggcacaatcttggctcactgcaacttctgccccccgagtagctgggattacaagtgcccgccaccacacctgactaatttttgtatttttagtaaagatgagatttcaccatgttggccaagctggtcttcaactcctgacctgaggggatctgccctcctcagcctcccaaagtgctgagatcatgggtgtgagccaccgcacctggccaattctttcttttctcatcaccgttactcagact

SEQ ID NO: 914456 - DNA, 4001 bp, Homo sapiens
ggtactctaccatccctattttccataatcctgtcagcaaccattctcctactaagctttccactccaatcgatctaatctacccttagaatcctgaaccttgcttacttcttactctcctcattctccttaataggagaatcattcccttcccttctccgatcaaattcttcattacactttcctgggtcacatcaacccaacgtcatagcttcttgattgagcattatattcttagaacttagatagagataccacctagactcttaaaatcctttttggaaataggcagggtaggaataaatcaatgaatatacatacatatgtgcaaacataaataaaatgaatatagtatattgcattactttaacatttaaacacatctcatttctcttctgagatcaagtacactgagggaacatatctcatccttttttcatccatgttcagcaccttgtctacacatacagaagacattttgtgcctttcataaatacttcatgagtgtctatattgattaggcagtatttaagataaaagtgggaatgtgatgataaatgacatttgttctctacgctcaaggagctcacactgcatcaggaaaagatatataaacaatctactataacacaatgtggtaagtgccaagttaaatttgaacaaatagctaaggggcacagtttggtgaaagactatcagaaaccatggaatttctagttagactttctcagattatcagagttcatctctttctcctttattctattactccattttgcctgaatcctcattacaaaatttatcataaaccttaagcaaccaattaatgttacttgaagtatgccaactatcatccatactaagttgcagtgtctggaagatgtagatagtgcttatgtcttgggcataacaagcaatcaagagtctgaagtaaactgatatacagatatatatctatataacctgttccatgtagattatgctctatatattatagtaggtgagtaataaatatttgattatgccaactaaagctgcagtcaagttttggcaaatacttgttctataatcctaatgcaagagcataaactatttatggcagaatagaaacagcatcctcggactgttcatctttaagcacccaggattagagaaggctaataaaaagggtggtggggaaccccaccatatttggatcaaactgacactcacatatgctgggatttccgaactacctggtgaggcaggttccacccatgccccaactggtactatagcctcgttcctctcagccagcactgccaacacgtccttgctcttcagggggtttaaagccaggggcaaccttgaggtatttcgaggtttctttcgggccatacttcccagcatctgtgactcctgattaggagaaagaaaaagcttaaaatcttcaaatgactgcattaaaagttcaacctcctaacacatgagccacaggcccgtgaaaaggagagaagccctggaggcagaagcctggcatgaagtggaaacacacggattctagagaaaaaggaagaaaagaagggaagagaaatgggaagaaataaagaggcaaagaaaggtttttaagttgccttctagaagaaatggcgatgagagggaagagaaaggatgggaatgagagaacgaagactgtcctcagctgtgggcgcagcgaggcgggaagggaggaatgacagctgcaacccggagaaagagggaggggcggggacctgtgtctgcagccgagagtcccaataatcggtataggttatgggaagacgcgctgaacggctgggagcctcgggccagataaaagcctgcttctgaggccccgaggcctgctccggctgagatggcactggccaggaatcggcccgcagctcgccacagactcagtctactcggagtactaaggtaaccgcctcaagtagaccgccactttgcggtgggctgctccgtcccgcccatccgtagccttatgcccgccctttccggagcccgcgtcccctcccggagctgggaaggcgtgagaggtggagtttcgagcgcccgaggtatcgtcatttcctcttcctgtccggctgagggggcggggacgtgtgggtaagcggagtcgctgggtaatgcgccatgtgaggcgcggtgggactgtcgttcctggaccaacgccgagacttcctaaatccctccggaaagggatgcgttgggcctgtgatctggcgactaggagggtcaggagtcccagtagagggaatcacgggaaaagaatgaaagagggaggcgagcctggcacggcttcctggagaaacaaactaagctaacaaatttttcggatcctttgtgcagctaattttacagtactgtttcatacatcttattatatttggacatcacggcctgttgagtggtctccctctctgctgcaagctctgctgtaatccagagacactcaattatctctgtaggataatttattcattcgattaacatacattactactaactttttataaaccagtactgttccaagcaccggagatacatagctatgaacgaaacaaatatccctgctcagggaattcacaatagagtgaggggaaataagcgaataaacaatgagtaagtaaatgtgtgtgatgtggagtaaaagcaaagaaagcggatagggagtgtggtgggcagggtggggattggagggatgaaatattagaacgtccagagaagctgcactgagatacttttcagcaaagacttaaatgagttaatggaagaagccactgtgctcttcaacggaggctttataaacatgttccagatataacagcaagtataaacgccccaaggtggaagcattgcctggttgagaaaaagtcaggaggatagtgtgactggagcagagggagagtggaagaatgctgagacagtaggtcaagcaggcaatccgatcaaacatcgtaagccaccataggtgttgagatggggagccactggagcaaggtttggagcaaaggaacaccataatgtgacaaaattaaaaaaataataattccgaatgctgtagtgagaatagactgtaaagaagaccaattaggtggctattgcaataattcagttaagggattgtgatgtcttggatcaaggaggtagtggtggagatgatgataagtggttggattctgtatctatttgggaggcaaaactttcaggatctgttgaaggtttggatatggattgtgtgagggagagatgtcaaggaaaactaggggtttcatcctgagcagctgtcaggatgaaattactatttactgagatagtgaagatggtggaaggagtagatttggaaaggggaagatcaggagttcagtttggggcagataaagttttatctaatcaacatccgagaagatagtatgagaaaaagtgtctggagctcagagaagggttctgggctacaaatataaatctaagagtcgttagcctgtagatttaaagccatgagactggatggagtcatcaaggggttgaatatagacagataaaagaataaatcctaaaacagccccagggtatgtcagtattacagaggctgagaaaaagaggaggagaatgctaagagattgagaaggattaatcagtaaaccaaggaagaaaactatgagggtgtgataccttgaaagccaggtgaaaaagaaatgttccattgagggcagacaatctgtgttaaatcctactgacagatcaaataaggtaaggactgaaaattgactattggatttgaccatgtggaagtgattgataacttttaaaagagcagtgtctttagagtagttggagagcaaaagcctgatgggctaggcaagaaagagtaggagaaggaattggagacagcaattttagacaattctttccatgaattttgttgtgaagggacacagcgaaagaggtggctgaacgtagaggtaggatcattggagagttct

SEQ ID NO: 914457 - DNA, 4001 bp, Homo sapiens
cctccgtagagctgtgagcagtcccagagccgccgtcaggactggctgggtcccactaaatcagcccccatgaacgtgatggactttgcccacctctagaaatctggtggtggggtgtccagcctcttactctctctctgggttttgttgtttttgttttttatccctagagtctcacaggctcctcattattaagaagtaaaaactccctctatgttcttttcggatagcctggcatggtggctcatgcctgtaatcccaatattttgggaggcttaggtgggagaattgcttgaggccaggagtttgagacctgcctgggcaacagagtgagaccttgtctctataaaataaatagggccaggcgcggtggctcacgcctgtaatcccagcacttcgggaggccaaggctggtgggacacaaggtcaagagttcgagaccagcctggccaacatggtgaaaacccgtctctactaagaatacaaaaattagccaggtgtggtggccacgtgcctgtaatcccagctactcgggaggctgaggcaggagaatcgcttgaacctgggaggcagaggttgcagtgagccgagatcacaccactgcactccagcctgggcgacagagcacaagactctgtctcaaaaaaaaaaaaaaaaaaaaaaaaaaaaaataaataaataaagtagccaggcatggtggtgtgcacctgtaataccagctactcgggaggctgaggcgggaagattgttgcggcccaggagttagagattacagtggactatgaccataccactgcactccagcccgggcaatagagcaaaattctgtcaaaaaaaccaaaaaaaacaaaaaacaaacaaacaaaaaaaacaccttcctttatcaactctcactgcccaccctctctcatcatctttttccactaggggatggttagggtcaacttaaccccccaccatacctccaactctccaatcccccaggatacagaaatgccccatttcacttcccctgttgcccacccatgccagcttctaccctccttacccaagtggtctcggagcagctccttctccagcaccaccagcctgtgcctggactcggccaccacatctgcacctgcggtggcaagtggcagagcctcagctcttcatgatctcagcattcctcactctgctcacatcctcaccccacaccctgcacttttgccacagcagacctgaggaccactaaatgaggtatccacagtggcagagtctactgaagtcagcaccgtgtcctcaccgaccagcacataacagatatgcaaaatacacatgacaaatatattaggaaggcacagagctagatggggcttaaaggagagcgtgggtgaccatttccccacttcctcagctccctggatctggctgtgaggacatgaaagaggtaggtcaagagagctccatcctgtcctgcagaaggctgaattctctctggaggagctctgcgtggtcttcatggcagaacatggagaagcagggggcacctccacccaccatgactcaccccagttctttttcttcttctgtgccccagatttcttccctttttctttgtttttaggtggcatctccttgctgtcctgggagaaggaggggaccttatgtttaggtctggacacagggatgctttcctgagctttagactgaaccaggagactctcctgagtccaaatttgtctctcatatccttcagaaaagtcagttcacagtctctttggaacctcagacagggttggggtcagtggggaggatggagttttttctctcaaccaggctgactctgtacagaagtcattccttgcaactctcttttagagaaacgaaatccctgtacctgctcccctccctcttcccatcatcctcaaccctcacttcctacctgtaggatcctctcctgccagcgttggggctccccgtggagtgacccactcgtggggagtggcagagagaaggcccaactagcgaggagcctgaggcggggcctgggtcctgggagccaatccttggtggcaaatttctcttgagggcaggactgagggctggaaggttgggtttccagaggctgtatgttgtccaggcaactgggaaacatggagttcacaggaaggtggaatgggctaaatcagctcacaaagtttaaaatatcaaggtctcaaagggtcagttctttccttatcccaaaatcctaagtatagtttgaaaagaaagggctttggaggtcgattagttatgattcattgccatgtagacatggcctgcaatttggagacttccaaattcagatgtacacatctgagataatatgtggtgctgatacagaggaaaaggactgacagtagccatgttggacaactgacatcccgaggtcccaccagcaaaatgacattagtaggcttaaaactgaagatctaagctggggcggtggctcgtgcctataatcccagcattttgagaagctgaggcaggaggattacttgaggccaggagttcgagaccagcctggacaacacagtgagacctcatttctacaaaaaaattaaaaaattagcctggtgtggtggtgcacacctgtagtctcagctacttgggaggctgaagcaggagaatcacttgagcctgggaggttgaggcagcagtgagctatgattgcaccactgcactccagcctggatgacagagggagaccctgtctcaaacaaacaaaactcccagaccaccgaagatcctcttcagtacactgtagaatgagggtaataagtgcaggaataggtagtccagggagtttcccacttcagagaaatgagacgcagaggaatagtggacccatggactctagggtactgacctagagggatgcaagtgtggaggaaagagctcaggttagagacaagacatgtgagtttgagtcccaactgtggatatgtaaactgaggcgagccatttgactttgctcagcatcagtttcctgatctttaattgtttgattttgcagctcttgaaaagcctgtgttttagctgcgtgtttacatggctatcttctctcctagtgacttaatctattgctacatttccccattcccttgtgtggttgattttcagacaggtgttgagacattgctttgtgaggctccctgtagcatagagttggttggggctccctctagtggacttgtttgaccttctcctgagtttcctacatttttgcttttaaattatttactgggcaacagtgggggtgactccctttggggatacttcttagcgtcctgtttgagccaggagtggctggaagaattaacattggggagagagtatgatgggtggccctcccttgtcaggcagccctcactttccctccagctctgtgctatcctggaggcttgccatttatctgccacttggatctctgggcaccatactggttagagtgaaaatagcaaaaacttcaggacttttctccttttggattaggggacctgcagaccctttcttttctttaggtttctttttttttttcccgtgtctctctctgtcacctaggctggagtgcggtggcatgatcacggctcactacagcctcagtctccctgggctctggtgatcttcccacctcaacttcctgagtagctgggactacaggcgcatgccaccacacctggccaatttttgtattttttgtagagatggggttttaccatgttgtccagcatggtctcaaactcctggcctcaagcgatccacctgccttggcctcccaaggttcttggattacaggcgtgagccactgcaccagcctatctttttttttttttttcttcagacagagtctcgctcttgttgcccaggctggagtacagtgacgtgatctcggctcactgcaacctccacctcccaggttcaagcaattctctgcctcagcctcccaagtagctgggaatacaggtgcccaccaccac

SEQ ID NO: 914458 - DNA, 4001 bp, Homo sapiens
ttttatgccaccattgtgtggcgtctacaagtagcagatacctaggagatcaaactagaatgcttttaagataatgaaatacagtaatagaatagaaaggatatgaataacaataacttttttatccacttccagtgaagtatcaattggtacaattgctttgaaaaccaactttttaaaaaatccactgataacagaatataaacttgaacaattgctttgaaaacagtgtggcactactttctaacaataaaaaatttgcttttcctatgattcaaccattacactcctgcctaaataatcaaatggcattcttgtgcatggggcaagaagatgtgtactagaatgtttgcaatagtactattcattttaggaaaatgtaaaaataacacaatgtccataaacaagagaaaggattaatgaactgtgatatgttccatgacaaaatattgaacagcagtgaaaataaagaaactatatacagcaatgtagataaatcttaggaaataatattgagaaaaaagagtaaatcatacactaaattttgtgtgatcctatgtttataaagttcaaaaccaagcaaaagcaaatagtgcacttatagagacacctatgtaacaaactattaaagaagaggaagagattgatgtagctaaaattcaagatggaggtcacctctgggagagaccttaggaggtagaatagaaaagcattccctagctggattcagaaatacctaatattttaatccttaaatgggaggcatattgtaatttataaattatatctgccacatctatttttgtatatgtgtcaaatgttacattaaaaaataacataagccatttagtttaccctagttaagacccattccaatagtagtcattagatcccagagtcccaagaaatatactgaagtgtctacttaatacaagttctattatgttagggaccactacataaaggaacaagttacaagcacaatgtttaaacaaccagaacctagttctttatttaaacattacctgccgctcagtgacctctgaaggatgatgttgtcttggtccttcctatataataaacaaaattaaaacacattcacacaaaaaagtcattaaaaacagtaaattaattattataataggaagcctatgctacttttaaatttatgtattatatgaatcatttcaactataagaagcaggttaaaaaaacaaaaagaaaaaagtcaagttcagaataaaaacatctaagataaaaattgtggtggaagatggagacgatattatgataaaaaagaaccagctgtgaaccaccttacagataaaaggcagagtatagagatatattcgggagggaaagaatgtacgagaaatcgaaaaatgcatgtttctgcttctacaggacttcagtggtgctattgagcaatctagtcttcaatctggtttcaaagcctaggagtaattggtgatgtgattgagatcgtatggttttctgaagcacagggagcttggctgttagttttcgagattctcaccacttcctctatttcttgattgtaccttaaataactcctccttcactcgttttgatccaatcttttaaccagaagacccaagagcaatctgttccacatctggcaattgagaactttatcctgctccctacttctgtaatttccactccacctcctagggcaggccaatggggcagtcaacatacaggtgatgtacctgacccctaagcacacagtgggtggagctttttcttgtttcagaggggtccagcagtcaggatgtagtctgtctacatcacctggaatttcccaacccccagcaccaaaccacatttacaagagttagaagcaccatggccaaggccacagtggcctggagctcaaggcacaggacagagtggcagagttgaggttgtaggccccagcagactcacagggttgacttgggaaggctcgatgtcccagcaatacaggcacatgccgtggagccttagggcgccccctgacgcctactgcctgtcctggaccaaatgattatggggccccacacccacagccttcaagccctgccccacccagttccatcactattctctttattcttctccctgctatgggccccaccctttccccagttgtattccagtccagtgcagggaaggcaaggcctcaagttgtctgcagtgtctttgagttatggaagtcagtttaccataattccttatatcctatccttcttcctcagaaaattgcagaataccaatttcccaccttttctacccttcatctctctagtctctctctttataaagcccctttcatttgttaacatatctagcttagtctccatgttctcttacttcagactgtctatctattgttagggttctcaattccaccacctcattgttgttccttcacagcttctagttgggctgacccaactgtctgccttcttcccatctatctataccagatgaagtgaggagaagcttgaagatggctggaatacatatttgtgaccccagatctatttatttatttattttcttttttctttttttttttggccaagtctctctgtcgcccaggctggagtgcagtgctacaatcttagctcactgctacctccacctcactgctacctacacctcgagggttcaagcaattctcccatctcagcctcccgagtagctgggactgcaggcgcatgccacaatgcctggctaatgattttgtagttttagtagagacagggttttaccatattggaggctgttctcaaactcctgacctcaggtgatccacccgtcttgccctcccaaagtgctgaaattacaggcgtgagccaccaggcccggccgtgacccccaatttaaactgggtcctcaaagctgcttaagacttttatgttgcaccagctttttttgtgctctgcagtattcccttcaaattgtcttctattaaaatctctgaatccaccaacactcaggcacttccagtagaagtgggacaatccgtgcttcacactctgatgctggtgaacatgtatagagcttactatgctcagcactgttacatgaatttatatgtgttaactgatcaagtctttagaccactcaaggtgggtaagggcatgattataatcactgggaaacaaggcgctagcatgttaaattgctttcttgaagttacgctattagtaagagggtgagctggaatttaaatccagggttggcccttagatcatgtgctcctaattatgtgctatgctaccattgcttttgaagccctcactggggctacctcaataccacctaaaatcctataaccttgtcaatatccacattatccttttccctgtaaccctgtcgaaatggaaaaaaaaattggtatcccttctgttgcctcaaataaatctatccatttgcatttgcatgccatttccctcctaggagcctcctcagatctagctctacagattgttcctctccttgttaacttctctatattgcctctttcctttaaacatttcattactgtaagttcaaatctccccctctccaaactaataaaggaaactccttagaacaacaaccaattgtatctattgcccatcccctctatataaagtaaatattcatgagagtggtctgtacctctgcctcttctttatgttcagtgtaagatttggcttactgaaacctgtttcaactcccactgttccactggtgcttttctcaaaatggttaatcaaatgatctttctcctgaattcaatggacagtttctatcatatgatttttgtatcacgttagaaactgctgaaaagtctttctgatgagttaggcttagaaaaagtaaacagttttgcccaactgtaatgttcaaaatcattatccatgctcttcttgaaactcccctctgggagcaataagttgtagaaaaatcatataaacttccccattatcacaaaccaggaattg

SEQ ID NO: 914459 - DNA, 4001 bp, Homo sapiens
agacgtacatacgttcacctcctcccctggcaggctccacttagtcagggctttggctcttggaaactaatgcaaggtttcagtagctgagctatagttccgatggtcatttattccgcaggtcactaacttgtgtccagattgcttagtccagttgattatgctcagaaagtatttcctaaagccttcaaatttactttaaatacctttgagaccaactcagtcctgaagaatacctacaaaggcccagatgaaaacaatttactgaaaccctaactctaccattaaattttactatcaggttgatcagaggaggcctgtttcttgttgctacaaccagcctggatgagtggcttgcttggttactctttctgatctccattcccaccaatgtacttacttttacttctcattcgtaactaattcactcctgtaaccatgtatacgggttacttcatatgggttccatattccattcactcatgctggatatgaacaccctgtactgaagggggaatcttgctatttacacataaagcatgagttctctggcctgtatttcttagagctcctgtactgtgccttacacagcttgacaatcataaacttgtaaatgatttccgaagaaaacgtaatgagtctatcccagaatagacctgcattactgggcctgtctcagaaatattccttcagggattggccctttgctcctacttctgtatacccaatactaggcatgcagtttaggaaagagaacatgatctgtctatcttcgtagtagacccaggtctgctaataactaggtgcatgcctttgagtcactttttgcattctgagccatggttttattatctgtaaaataagtggattgatttaggcttcaattcatgagagtagagaccagtatcttgtttacggtccccagtacgtagactaatatgtggcaaacaatgtttgctgagtgagtaacagtagaaataaacaaattaagacagttttaataaccccattggtcctaacattgatacaatgacatccattcctctgtgcatgctcagatcctctctaaccacgtctccacatgctgaggttgacattgctaatctctgtgcttcagcactttatgttataaaaagtgacctgtttactacaacctacttcactagcaatcagtatgttttcagaataaccaaccacaggtactactaaggtgcagtaaaccacgttctggtgttcaggtttgggataagagttctgcagtgcacaatctggcttttgaggattcatagaacgcctgaaatggtagcagagttttgtgtgtttgagactatgtacatttttctgggaagtgagactgcagcaatcataatatctcaggaaaaaaggattaagagccataggaaatctatggtcatttgcaagaatttgcacagggctctttatgtgcaaaaaaaaccacggcacctcagtctgcaagtgcctgctctgcctttggggcggagggcaggaggatgttagaagggggtacttaagagggtctaaggaatcttgaaaagggctgaatcggccgggcggcctcgggtttacctggcgcacccctgtaactccattcctctcaggctcgccactttggcctctgaatcatgggcatcttcatccacgtcttcctcatcatccacgtcttcctcatcctccccgtcaccgtcgtcctcgtcaaactggaagctctggtggccaaggggagacaacagcgacctggtggaattgctgcagctcagcggcagcggcggcgacggcgagcgcaccacctccagcccctgcccacgtgcgcccgtcatagggactgagcaggagtccgaggagggccgagacctgggtctgcagtcagcagagaaaccggcgtaggaagagggaaaagtaggcccccagcgccccgccgcccacatctggcccgccaagttcaaactggcggagccgcggcggggacgcgctttcccagcgggccctgcgcgcgccaggccggccaatcccggccagcacagaccccgcgttgccatggcgacgcgtggaggccgggaggactttgtcagggcctgcagagcttggcttcctccgccccggcctcccttagccagcccttcctcctcagtggcaggaaggtgcctgctgtttgcaagcttgtttagtacggtgtctccccacgccactggcggggtcctggctccctaccgacaactttgagggcctgtcccttgtttgccgtggtgttgcagttcattttgtacatgaaatatgttacctgccactgaatcagggaaagacgcagaaaccaaaaccaccccctatataattacgaggtcagaattgtgagcatcggtcgtgatttctttcagcacaagtcgatatattttgaggagaggggagggaacttgatccaagtttacaggtgtatcccagaacgcacttttaggacagtcattgcgtgttttggtagcacttcgtttgcctggcatcttaagggacctaatttgtctacacatgtgaatttttgacctctttgaagcctctagtgtattgtagggtctgcgtaaagcacaagggatagatgattaaaagtctcgcccttaagttcctcatcctgttgtcgtgaaaaatgatctcagtaaatatgctgatatgcattttatgtgggatctgaggggcactctcgggaatggggataaaggcagtaaaggaaaggtagatgctttattcatgctgacaaaactgtacatttgtaaataaatagggcttttgtccagttcataatgtatattaccggtagaaataccataaacgaaaattgaccatggctaacacatcacacaaaactttttagtgaccagagtgatacaaaaactttgatgaaatctagatctgcaaaatttaacacaggagaattagctatggtagaagtaatagcaaccaaaggcaattcagaaggcagagctataattaataaaatatgacatgattaaatctatttaaattgaatattttctttaaaatttcggtgaaaacaaaatgaaagaaaattggagcactccaaatgagtaataaagttgatcaaggaataaaactgacctaatggagttttcgttctcgaccctagttattcaatattggcatttaaaaaccttttatcagaacatctctagaatcagtaacatcgaaacgcactgagctgccttagggcctcataaagaggtaagcttgagaagctgttttccaatagatataaccaaacataactgtagtgggaaaaacactagtatgaaagggacctggaatcagtggttttcttggtacttgataggttttccattcctaacactcctctgaaaataggggaaaaatttacctcacagggtcatattatctcattaattctcaaagtttctaagctcagaatcagaaagatacaatgaaaagttgtgtgtaaacttcagaactttttcactttaacctctacgcatgggaatctaaatgtcatatacttctttgtccccttaaaatgttttcctaaacaaagtatacccttttcttgatgcgccagggtcatcattatgaccaactgtgacattatgcactagcaatgctggacccccccaagggtatgaggcagagtcagatggtgctggtgctggtgtttgaacataattaagtccagcggcctcatttcttacagtgccttttcattactggagctgagaagccataatcgagatgggtagaattatatataaatgtacaaatgtataaaagagtgtctctccctttaagttttagggtattgacttagtgacatcttttcatacaattagtactttggccatggtatatttgaggtaattatgttttgctggctctggaaacttatataagagtcacttttgcttaaataattccatcaccagttagccctgtggcatatattatgcaactttaaaaatttatcccta

SEQ ID NO: 914460 - DNA, 4001 bp, Homo sapiens
atgtttttacggagttgcatctattctcaggctatgtttaagtgttgagttcagccttaaggggcaagagtagagggaaacttgagatactcaatgcggcaaaaaaggagcaagctggcgaagaaaggttgcattgtggtaacagaagagcacacgaggcctgcctccgcatccaccacccttagatattggacagtcactaaaagttggaaaacagtgatttttgagtgcagatctgtagtgtcaaaatcagaaagtctcgcattataatccttaattacagtcacttcatatttcctctcatccgcctcaccaaaaataattggcatatccttctattaatagtaaatttcaaaattcatgtgttctcaggaagtttttggcacagttaagcacatacttattaaacagaaatttctcagcacttaccccatcgtattatgggcttggttctccatgtcaagaaactgctacatctggtttatatttcttgatttttaatctgttaggaggaaaatgatacaagttcctaaaatgtttatattctttaacctataaaacatgaaaattttgctactggcaaaaaccatttagtatgagtttttctgtgtagtagctcttgatcctacaaaatatagaaacctgagttttctgttttggttttttgtttgttttttgagacggagtctagctctgtggcccaggctggagtgcagaggcacgatctcagctcactgcaacctctgcctcccaggttctagcgattctcccacctcagcctcctgagtagctgggacaggcaatcgccaccatgcccggctaatttttgtatttttagtagggacggggtttcgcatgttgatcaggctggtctcgaactcctgacctcgtgatccacccacctcggcctcccaaacttgagttttttgtttagcgacccctatgcatttacgatattgacttagtgatttattgaaatatgtggtacggactaaaatgagcatccatttactacttattgaataatagcttgtactacgttgttcgcaaacggctcagtacatgagaatgagtaaaacagaattcccattaaaagagaaattctagccagatgttctcaaactttctattcttgtggttcccctaaaggtgtgcctttatttgagtacattctttctttggccctatctgggttttgttaggatgactataactatgagatttaggacaaaaaggctaagaatgcctttaaaaagaaatcttgaaattcttcaatggctctatgggcactggctcacctcttgacaaaatagggatgttagcatttgcctaaagtaaaaaaaaaaaaaaagtttttctcagtaacacaattttagttaaaaaataatctatgacgataactggagaaagtattgaaaaggacttcaactcctccgaatcactgaataaaagtcaattaaagaacattcaaggaggtagaaagaggaggaagattcgagctcacatcacttccaaatcgaagagttttaagagagaccctggaattaagagagacagagcggagaggagcagggatggtgaaggaaaacttgaccagaaggagcagaccaataaatggttttgtagattctcaaatatctcacttaaacgtcagggaaactgaggcacagacaagttaagtggcttgcccaaggccacacaactgaagcccagtccttctaacttagggcgcagctctgctctggatttgcaagcgcgggcctcccctcccagcctctgtccccgcgccacgcgcccctccaggacccgcgctcggttcaagcccagcctcccgcagagcggccgcccttttggggttcccctgtcccgctcgaggacccgcgcagcctggcctttgggtgagggtcaggggcgaggcggggccgggaaggccaggagccattacctgcgctgcgccgcgctcgcccgagaggtctgaggcgagggcgcaggaccgcgtatgtcacctcccgccccgccaggcccgccccaaggggccccgccacccgccgccgcgctcccgccgcctgggccctcccgccgcgcgaccaacgaggcagttgggcctctccctccccgcgcgcggcgccgccgcgtgttgccatggggacgtcgcggcccgaactcgtggccgtcggagtgggggatgggcgcggcggcggcggcaggcgctgccctgtgcggctcctcggctgcctccaacctcaccccgcgcgagcgcgacctcgctgtcccgcagttatacgtccagtgccccctctattctgggtcctttcctctttgtagtcccactgcctaccccaaggctgggcacccaagctgcagcccggaaatacttgttgaatgaatgaaccaaatagatcacgaaggaactgtaaaccgctggggagttcatcatccaggttccttaaatccccttggccctctttcctcttacccaaatttgaagtggcatgaaaaagaaataaacttcgggtaaagagaactgcttttatctccgttcaccctagcgtcttccagctgggaggagctggatttcaccgctcagcccctggttcctgtggtgataacagcatcagcttgtacctgactttcccgtcaagcgcgatgggtccttaaaacactgccagtcaggcgaacggacagtgttgcctcccttcagggagaagagaatagcttctaagaggagaagctggaacgaaactcaacgggactgattccagattctttcctttttccaccaaattccaagagtcattgatgacagattttctgtctccatttcatagaggaaataataggaaagaatatatgttttccaactgacatcttgagtgatttgttttaagcacttgaattttgtatttgatttattttaaccaaataattccttcctaacacatggagtcgactacttaattcttaaagtcttttatttgcactttactttcatcactttaacgctaatttgctactttaatattctatgaatttaatgcgcacccacatccctccgtccaggtcccatctgaattttataaaaccattatgctgtttcttgacaaattgagcttcatagatgaattgtatacggtcacctgggatatcagttctaacaggtgtttcatagctctcatgtttgcatgaagagagtgactgtgttatcttaacttgaaacttttcattattctgaaaacgcgtatattctttattcttatctgaattgaatgggtcaatgtattttttctaacccaaggaagggaaaatggaactaggaacgaaatttaatgaaatctcaggatgcccaagatcactaaggctatgtaacattgctaagtgcttccatgttcattatttctttagaggctcagaaatacactcagcaagtgtatcaggtgttattaatagcttctttcagaagattaggaaacccaggcttagagagaatgaaggatatgtccatggatttgtccatggatttgcacttgaaatggatgatacatcaagatgtaaacctagatcatcttactccaaatccagtgttctccaaacattaaggttgagtcggtttctttagcagtcaggatcttccttagcaaactgtaggtttaatgttttcctttttttttttttttttgagacggagtctcgctctgttgcccaggctggagtgcagtggtgccatctcggctcactgcaagctccgcctcctgggttcacgccattcttctgcctcagcctcccgagtagctgggactacaggcacccgccaccacgcccggctaattttttgtatttttagaagagacggggtttcaccgtgttagccaggatggtctcgaactcctgacctcgtgatccacccggctcggcctcccaaagtgctgggattacaggagtcagccaccgcgcccggccaggtttcatgttttcacatagaagaataggtgcaggggaatgct

SEQ ID NO: 914461 - DNA, 4001 bp, Homo sapiens
cttcagaaaactcagtcagatttctcatcttaactatagcatccttcacaatttgatcaaacttgcaataactttaatttggttagcatgaagtagtggttaagcatctgggtttcaattctagctccaccacttgtcggctgtgtaatcagccttgcattgttatttaatctctttcccatggttttcccatgaagtgtaaggagaatactgggaatacctacggtacagggtttggggtttgtttttttaggattaaatgagataacttccagcccctggcgtgtaataagcattccacatatgatatctattactattagaataacactatcaccgcacctgtacagttattacgggatacacggccagagcgaaagaaactaaaaaccctatgctgccgcctggtggacactcggaatttaaaaatctgtcattcgcttccttcctgacactacgatatgaagccgtatggaaattaaaacgttttctcaagctgcattaacacactttataaatcatcaaagtggggaatctaattttccaaaacttaacaactacccccaaggcaaccctgaaaccagggagagttgtaaagactcaaattggccgaagaaatggctgagagaagacaccagtgaaggactacagaggaaactccatccacagcgtatttgctgattctcaggttgggatatttcagtatagattttttcttcaaggtataaaacaaagagagccataggaatttatcacaactaaagcaaaataaccaataatcatcaattcgaggatctcaatataagcagaagactccgtggaatcttcacattttctttctaaaagaagtgcactgatcataaaggttcccataaatgacttaagggttgtcacttattttcagcagcaaagtgaagtggaagattgcagcaatgacatgaataatttattttattttattttatttttttagacagagtctcgctctgttgcccaggctggagtgcagtggagtgatctaggctcactgcaacctccgcctcccgggttcaagcaattctcctgcctcagcctcctgagtagctgggactacaggtgcccgccaccacgcccggctaatttttgtatttttagtagagacggggtttcaccatgttgaccaggctggtctcaaactcctgacctcaggtgatccgcccgcctcggcctcccaaagtgctgggactacagatgtgagccaccgccccgaccaaataatttatatctagaattcagcattatcaggattagcagggcagtcatttcattcccagtgagattccatttaaatttgctcgtgcaaggcagtttgggagaaacaaaatcaccagcagaatgaagaaaaaatagagaaatgtccctgggaatttacacacttctgcaactgcgctagaactttcgcactatacttaaaacattctgcaaaaagtaacgttcaccaaagaaaaagtcgagattcaccaataacagttccaaatgttgctaactctgagcggtcagagttgtttgaaaattttcagaagaacaatcgacatgattgcattgcattcataaggcaaatatgaggtttaaaacaaaaaccaccaccacgcaaggcacatgtacagaaggcgcttctccacgatgaacagacgagaccctcatgactcacccgcagtctcaatcctgcccaagcagagatccagatggatgcctcagtgtggctgcttctcctgggtcgggagcgtggaagattctagacacagcccagcagtcaggaggctccaggccaaagcagccccttggcaaccagagcaaggaagggtaggttacgcagctggaggtgcagggcaaacccgtaagtggaccctgcatgaaaagattagggctgcttcctaaacagcccaactacacgcttgtgactgctccgacttacctcagcgaagcgcgcctctagctcctgttggcccttccggttcaccttttcccgccctagggcacttccggcttgaaggtcattagcctaagatacgtgggtaatcttgagcatctggggcaaaatatgattgattttattttctttttaaatacaagcttcggaaaagatacctggatatttgatgtttttccttaagtacaacatgtattggcttatatattcttttttgtttttgtttgttttcggtttgtttttggttttttttttgagacggagtctcgctctgtcgcccaggctggagtggagtggcgcgatctcggctcactgcaagctccacctcccaggtttatgccattctcctgcctcagcctcccgatatattcgttttttaaaaaaaaagtctttggaaagatgaaagaaaaatgagtaagtattacctgtggggagcaatgggaagtgtgtggatgggaacgggagagagagggagacttcactgaatagctttttatactttttgatgtttgcttcatgtgaatgtgttactaattcaaaaaataaatgttagccgggtgtgagggttcactggctcatgcctgtaaccccaacaatttgggaggctgaggtgggaggattgcttcaggtcaggagttcgataccagcctaggcaacatggtgagacccccgtctctacccaaaaatacaaaaatcagccgggcatggtggcgtgcggctgtaatcccagctacttgggaggctgaggcaagaggatagattgagcctgggaggtcaaggctgcagtgacccaagactgcaccactgcactccagcctaggcaatggagcaaaaccctgtcaaaaaaaaaaagaaaagaaaagttgcttaatttttaaagtgaaatagaaaaaaaactgcagttctaattatactgataatcacacctattttaagcacctaactaatgctatgtttcagtatgttatgttgaatagtcattcaataagaatgtaatatgtttcaggcctacattgtttttgcatgctaccaaaatgtaaaagaagtggttcctgccctcaaattttttttttttttttgagaaaaagtctcattcttgtcccccaggctggagtgcaatggcacgatctcagctcactgcaacctccgcctcccgggttcaagcgattctcctgcctcagcctcccgagtagctgggattacaggcgcctgccaccacacctggctaatttttgtatttttagtagagacggggtttcaccatgttggccaggctggtcttgaactcctgacctcaggtgatctgcccgccttggcctcccaaagtactgggattacaggcatgagccaccgcagccggccccccgccctcaaatttttaaccacgttttccagtaaaaatctgtctggaattctttttactccttccctttctccaagcgtttgcccagatgtcacctttttagggaaagcattcctaactaccccatagtaacacccatgcacatcccctactttgaccccaccttgttttattctctgtagcacaatcaccatctcgtctggtatatttattaactgtatcctaggacacaagcttcgtgaaaacagagatgaattttgttcacttgcttaccagaatctagcacaatgcctggcatgtaaatgccaaataaattcatatgaatgaataaatggactatgacctttcaatttggtatttaccaaccataacagctatactctaataataactaatatttacgataatttactatgtgccagacaatgagctaagtgtttttacatacatcatctcatcttagtctccacaacaatcctattactatgcactttttgcctattagaaaactaaggtgtagagaggctaatgagttgaatgtaatcacctctgaatgccctcctaaccccatgcaatttccccaatgatcagtgctatggtttgaatgtttttgtcctgtccacgattcatgttgaaacttaatctccaaagcaagtgtgttatgaggtg

SEQ ID NO: 914462 - DNA, 4001 bp, Homo sapiens
gtctatccaagtgtaggattagacagtatgtgggacatctctgtctgatatggttaggctttgtttccccacccaaatctcatcttgaattgtaatccctaggtgttgagggagaggcctggtgggaggggattggatcctgggagcagtttcccccatgctgttctcatgatggtgagggatttctcacaagatctgagagttttataaatggcagtttcccctggtcccccgggcttctctctctctctctctcctgccgtcatgtaagacatgcctgcttccccttctgccatgattttaagtttcctgagggctcccccagccatgaagaactgtgagtcaattaaacctctttcctttataatgacccagtctgggatagtatcttcatagcagtgtacaaataaactaatatattgtccctccttcttaatttactgtgaatctacaactaccctaaaaaatcatctttaaaaaaagttcttactgtaccatttacctcctccctggtatcatttacctaaattgtaaatttgcattgatttgtgtgattatttgattaatgtgcatcttccccactaaacagtaaattccaagatgtttgttcaccgtaagttaactagtgctcagcatatagcagggtttcagaattccttgaatgactatacataaatttacaaatatagcaaatgtttttaaattcattaagccattatcttcaatgcatctttcaggatgatttgagaggaaaagataggagtgatgcaggggaagagaaagaagcagccattcctatttgttttctgcggtcatttggttaaagcctaagcaacatctctaagttacaatggtttgataataatgagtttgcattcctgcagcacctctcttctcctgtggtttgcagacagatctcagcctcactttggggtgactcttctacaaacgatgctaaaaacagatcttgtcttgctactaaccaagcctaatgagttttctctgagaaggtgccaggtccccttccaaagtacttaccctgtagctttttatgatcatctcattttcttaatacaacggcatgatgtcaaaggcaacaaaatcaaccgtctttgcatgaactctcaaaaggagccatttagggtccctgcatctcttttctctaggtaggcaaaagggttgtgatccatcccagcgagtggtgtgggagtggctgtttttacctaacctttattgagcacttactttgtgctagtccgtttattgagcacttactttgtgctgtctacgcatcccctggtttaatcaaaaccagaaaagggtctctgggcgtccaacgtgggcaggatgtgattaccagctggttgtcaaggcaacttagccacggcaggccaggcctgagccagggaattgggaagtgggtccccccgcctcccctgcaagcagatgaagattcaatccccagggccaccccctgctacccaacacgcttaccctcctggctcagcgagggcagagtgggcagcacctgcctgcccaggtcctgcagggcacgggcgatcgtatccaacatctccaatttccaggtgactccgtactgaatgttcgatgggtctcttctttcttatatggaatgtgcacaaaaataattttcccaccctccagccccttctccacggagctttggatgtgccttaaaaataagagtgacgaaaatcttgaacttcttgactctttttcttctttcttaaataaacttaaacattggttctcgccgtccctccccactgctctggctctcgggcagctcccacagcaagagccgcaggaactgatgtccggcaccgagtgagagtgtgcagacccgcgccctcctgaccaacgagagacccaatgaggggtgagctgcagcctcgaggaagggaggggcaccagggagaataggcccggcagagggaagggcgcgttgctgggacgcgagaaaggctcgctcggttgctaaggcgtcaaggctgggattcgacctcacccccttagatgggcggcttccaggttgcccaggcgattcagaagctcgaggcagcgaggttggaagtaacttaaaaataaataaataatgggtttttacttctctgaccccgggcagcgaagaaacgtggttagagtggtagtttttgtaccttggacaaatctaggaatgccttttgcccagagagatcgatatttgagtctccagatctgtttgagagtttgagtttgagctggaatttgtttcttggtttgcttttccctgggctctcttcctaggaaatggagagctggagaagtggggaggagggaattgactttttttaaactacagtcatttcccccttttctctacatgtcaccaatctcatcctgaagaattgcgtgcatgctctcccctctgctggtaattatcacaagctgaacatacctatgcaaaacccatccaggtcaaaaaatagaatgctagcacattgcacagatcagcacttcattacccctccagtcattagccaacacatactgcagattcattttgcctgttgaatctttggaatcatatagtatgtatccttttctgtctggctctattcaaattcacattatgtttatgaggttcatccatagtttctatggtaataatttcttcatttacactgttgcatattattcctttttatgagtatggcacaatttatgcattccactgttgaagggcatttgcgttgtttccctttgaggctactgggaataaggctgctgcaaacagtctcacagaacacttttgacagatagatgtactcatttctgatgtgtatataactaggagtagattcatgggtcatgagaaatgcatatgatcaattttaatagataatgccagctaatttttagtggcaatatcagcattattgttccacattaagataatggaattataaaaataattgttttacaatacattagattttgaattaaatatagtggtacttttaatctctagaaaagctgtcttcagttccagaagatggtggtggatgctaattattagtgaattgtagatggctaaaggaagctgtaaaaagaataaggacaaagacttttcttccaaggttttactttccttttgtcaaaggtctcttgacaaaagaggctgtgtagatacatgtaaccctgtgttgactagaaacttttaatgagctataaatattatatatcctgaaaatacatacttttcagttgctattaaaactcaggcaaactatgtacttccactgctacaaatttggatatatttggatataaaattggatgtattagcatgatacatacaaagatatatgtatatgcaacattgtttataatgttaattcttagaattagcctaagatgaccatcatagggaactggttaaattgtgaatacatacattggaatacatttcaagagtttacttaaaaggaaactgcacatttacgtgctgatgttgaaaaagtttcaaaatatagtaagtgaaaaccagtagcagcatagtatttttatataatgtaatcctgtttccttcaaatataagtatataagtatgcatacgtattcatatatatttttgtaaacatatgggatatttgaggaaagatacatacacaaaaatattaacagtggaattttggatcaggcaaaattttgtatggtggaggaggcattccaagaacttttatattcacttttctcctttatttactgtttaacaagggcatgaattactttataatatttaagataatttaccaaagagaggaagagagagaggtacaggtagagtgtagggatttatgcaaacactgaaggaaacaaacagggccaaaatgttcccaagtatttcaatgtacatttacttttctgcaagctccaacttgccttgcaaaacccacattgaatgggcagtcatttttacccaagccccaaggcacaca

SEQ ID NO: 914463 - DNA, 4001 bp, Homo sapiens
aaagaaaggcagtctctgatgagaaacatattttggaaaactgcagaatttgaatgcctgaggcagcatcttttatttaaacaaaataaatcaggtttcattggaccaactgccaaattgccagggtctctcatatttcaaaatgaccatttatatcagtaaggtaaaaaattctgttactgaaaaggaaagacactttgaatatgtttggctcttctttttaaattgtaggtagctttactatattagctgggaagggaagaatgataacggagggaaaaggtgagtgaacctcggaagagaaatgtgaaggaaagctagtttgatgggtaagatacctcttggtcttcagaatctactcaaaagagaatccatgcaaatgaatgttacttctgtatatgttgaatatacacttaatttcctgaaatgagaattttatcgagcttctgtaatgataccttacctttaagcaaagagaaaaacagagactccaaacagaaagcattaaataagtgaatgaagatgatcaatactatcacatctttgtgtttcatggttaatataagatgcacatacatagctatgttatctgccaaagaatatatattaaagacaataatccatattgcttgtgttctttctctaacacagtaactctatagctaaaagtactttgatgatgccatttgactttctcatcagaagaaatatagttccttctaaactttgaggttaattcatactcaagaaaagattcattctagaaatcacctacttgctgtataaacaatgcaggtggtagttaacactttacagatttgaaaggcagtggaaccccaggtcattatttgaaattctaccaggagggatccattcttgggtgtaaaacatcactcctcttcgatgttttcttttatatggcagtttggagagcaaagattaataagccgaaaaataattattgaatatctaccaaaatgcaagcacctgctaggaactgtgctgccaccatttcaaataaacatggtctctgctcccaaggagctcacaatctgatgaaattactagggacaccaaaaacaagccagcataatacacgatttgagggctacagtgtatgattaagatcaagttcttatcacactgctatgaataaatttatcatagttcttctattggcaggaaaacaagacagaacatgacagaaataggatataagaaaataaacataaagagaggaaagcctatttcccccacttagaatcacagtccaacagtccacaatttcgcaaagtggatcctgccagcatggtatccgggataactatattattcattaaaatccgttaacaatgaaggttaatgcagcaggaatgagtggtagacagtggaatagatcctctcaggaattaacacccggaagggtgactttcatgattacaaacctctttggcgggacgcaggaacccagcgcccgctagcccactagtccgtcactctgcctccaggagggaggggcacagtagctaggaaaccggaccctcaggccaagcttcgcgatgacgcgcgcaggacgacggaaacccccagaccccaaaagagctctgcaccgagaaaacaattacaagggtctggaaaggccagaaacccgagaaatcaccaaccgagctccctacatcagttccaagcacctccccaaggcggaaataacgggcaccgcgcccactgcagctcagctgaggagggttagaggcgcaaagggctgaggggcgttctccggcccacccaaagagcgcccgcgggaatttttctcttagtccgcgaggaggcacggcttcccccgcccctctcataaaccattagcaccgggagcgcgagcgagtcccagccgggagacagccccgcaccgccctcgcgctctcacctttcaaagcgcctccacctctgcctccgcctccgcccctgccccggcaaccagctcaggacaagcgatgctcctcccccccttccggggaccaagggaagtcccgcctctgggtggggcgaggggtggggccaggcggcgggagggatcatcttccgggagcgtggctaggggcggagcgactgccgcgcgatagtcagggagctgtgcgggtcctggttgcaagagaggtggggagaggggcctggcgggttttgagggactgggaggactgtcccggctaaagctggcgcgggaaactggggctgcgcggcgggagggccctgctgctggggaaggaatctaatatatccgttcccctgaggaagggtgccagtccttgactcctaggctcttcggctctctgtcgtaactttggggtgtggcaggggttagtgacgcgcggttacccgggatctggacgtgcaggaggttcgtggccacaatgggggtatagtctttctcacggctgctggggtaataaaacacatgcttttaatccggattatccgcggtgacatggggcctccgctactgcccgtataagttaaagaaaggcctgttctctcaaacttcctcctctttcaccttcttctgcagtctatttgccagccaaccccagcccgggaggggatcagggccaccaggttgctggtaaggatgaaagactgagtgtgttaagactgttgaagtgagcctgtgtaagagaaggaaggattttgtggattgctacattgtgagtgtggggtgagtcccagaacctcgctatgtcagggaaacggaagcgtgtggtgttgactattaaagataagcttgatataataaagaaacttgaagacggaggttcttccaaacaactggcagtgatttatggaattggtgaaacaacagttcgggatataagaaaaaataaggaaaagattataacttatgcaagcagttctgattccacaagtcttttggccaagaggaaatctatgaagccatccatgtatgaggaattggacagggcaatgctggaatggttcaaccagcaaagagcaaaagggaatcccatatctggaccaatttgtgcaaaaagggcagagttcttcttttatgctttgggaatggatggtgattttaacccctctgccggttggctaactcgttttaagcagcggcacagcattagagagattaacattagaaatgaaagattaaatggagatgagactgcggtggaagatttttgtaataactttcgagattttattgaacgagagaatttacagcctgaacaaatctacaatgcagatgaaactggactcttttggaagtgcttgccttctaggatttcagtaatcaaaggtaaatgcactgtccctgggcacaaatcaattgaagaaagagtcacaatcatgtgttgtgccaatgcaacaggtttacacaaacttaaactttgtgttgtggggaaagcaaagaaacctcgctcctttaaatcaactgacaccttaaacctgccagtctcttatttcagccaaaaaggtgcatggatggatctttccattttccgacaatggtttgataaaatttttgtgccgcaagttcgagagtatttaagatctaaaggcttgcaggaaaaggctgtgctcttgttggataattcaccaacacatccaaatgaaaatgtcctaaggtcagatgatggccaaatatttgctaaatatttaccacctaatgtggcctcattgattcagccttcagatcagggagtcatagcaacgatgaagagaaattatcgtgcaggtcttctccagaacaacttggaagaaggtaatgacctgaaatcattctggaagaagctaactctgttggatgcactttatgaaatagcaatggcatggaacttagtaaaaccagttaccattagcagagcatggaagaagattctccctatggtagaggagaaagagagcctggactttgatgttgaagatatttctgtggctactgtggctgccattttacaacacaccaaaggattggaaaatgtgac

SEQ ID NO: 914464 - DNA, 4001 bp, Homo sapiens
gcagtttgtcagacatgctggtggtgcttgtgatagacatggctgaaggggcccaagcctcgatctggggacaggcactgggggtatggcactgggcagggggttcccaggtagtttattcgttttgtggctactgcaaatgagattgcacagaacacatgtttaacttaattagaaatggtctccagtaaatgtttttaaaaatcctgaattaatttaaagccattcagtggtaatagtaccacctaaaacattaattttaaaaattgagaccgcttttcatattgattatgtatatatgatagggaccaaaattgttagtgttaaaatgtaaaatttgcccggtttggaaatatgttaaaatcatatattaaaatcaaggtatttaaaaatatctagatgagtgacattttcaagtttcacttggacgactgatgatgtacattacattagcatgtattttcttcaccaatcctttagtcatggcacatttttctactgcagtacccaaagatattggagtcttagctttaaaattagtccgtcttctgatccagagttgctaatatcaaatagtttgaactgcagtatattacactaacttctctagtaaccagaactacatttttttcccactcttactgtccttcagttttagaattatcaacaaagaaaagaaaaataactatgaaaatattattatgaggataagggaaaaatatgcaataataatggtagagaacaaaaaggcttctttctaccttcaaatagcagtagtgagtctaaagaggatcttctggaggtggctgtaaggcaatccatgagcaattatcacatagactgataaatacccagtcattatttttcccctctgtcatcacaggaatctttcttttcctttttttttttttttttttggcttagatagggcactttttcccatctcttaatcacttcctcaactctctctcttgcccagcagaaaattatgggataaggaagggagtgaggcaacaacatggcactgtacaaatgtgacaaattcataaaagaaaccaagtgttttctttagaagaatgttgtagtatccagagcaagaagttgaaaccaatctatgaattgggatatgagggtaaaagacatcaataacacacttagcacatatgaagtacctacagcggaagagcattgcgctggtattgagaaggatgcaagagtatgtgaggtcctcagaaagcattcactagactcagaatttggtgagagaggcactaagagaagcaagaccgagcttagtcccagctcctgcacagagttgtataacctaggccaagtctctgaacctctgacctgtttcctcctccatctgtcctagttgctgtccgggctatgaggctccaaacgctttgggaaaactgtcaagtgataaagcctcataagaatggaaggcattcttagtctgctctgcgtctgctgtgtgctaggggctgtgtgagggcaccgtgaaggttacaaacctgaatcaaattcagagcctgcctttcgagagggcaaataatgtatccaggggttctaccgcaaggcggagagatgggttaacattctgatcagattaaaaaggcctgccctccttctcatctcctgggtggagaagaggagtgggcctatcagagcccttcccagcagctcctaacggcccaagaacggcgcttcgtggacaagaccaggagggcgcgacccccaggctgatctcgaagcggcgcaagcccaggcccgtggagagtggagcccgtggagggtggtcggggggaagcttataaagtcttcagtgtcagactggaaggagtcgggggccaagaaaagaggccagccagtctcctgacatcccctccacagcctgcaggggcggatacccggccctgggcggacagctcgcacttcctttcagcccgccggccaggcctaccggctccactgcagcggctgctgcgccctgcatttccaaggcaaccgacgtcctcctccctactccctccccacccgccctagcttagccgcgaacggcgggccgagcgcgccatctggtggcgacgcagggaagggtcccggccgagcgcccgcgccgccgccttggtagcagcggtagcgctctcccgccttcctccgcgcgggattttcggcgtccctcagccagctggtctcaaacgctcacgcgctcgttggctccctttagtcgcaagcctggaagttggtgactgtagacacagggcccacgggcttcgtgctgtgaccgtgagcaggtcatttggatctcagagtttgtgtcttccgctgtaaaatgagacgcctggactcggtggcgctttccgcacagttcgggggacggggacggggcctggttgtctggtgaggcttctgcgcgcctctgtcccgctgcgctccttccacaatggcggcttgtcttctttctactttcgtgcactaattctttggttttagctcttaataagaatggcaggtccctggactaaatgcttacagggcaacttcctgctgtataagtccttgattctgtttttcttctcgctttccttttttgttcgtaaacctaaagaaaggaatttaagtccagcatttcccactcttcgctttttgctgttctttcctccgagagagaaaaagaaaatcctacacgtacagcctttaaagttcctctttcctctcctgcattatttctcattatctgccgcaagataattttctttttttggtacttgacactggctttgaacggacaactttttttttttttaatgagtggaaatattcatttattcagcacttagaaataacagttcttgataatattatgatttataatttatacatggtgtattttaatgaattgcaggtgtttaagaaataagtaatatagcagggcgcggtggctcatgcttgtaatccctcacgcctacaatccctcacgcctgtaatctcagcagtttgggaggccgaggtggacagattgcttgcggtaaggagtttgagaccagcgtaggcaacatggcgaaaccccatctctacgaaaaattagccaggcatagtggtgagtgcctgtagtcccagctacttcggaggtggaggccgaagaattgcttgagcctggaaggctgagatctcagtgagccgagactgccactgcacgggtgacagagcgagcctctgtctcaaagaaagaaagagtatgtacctggatatgtatttttatttttatttttattttttacagcttaacgagatttttttattttcctgactttttgctttggagaattagtcagtagttaaggtctatcttgttcgtttactatggggtttgaatttgagatggggctgacgtcactttggggcccttttcttttcttcttttttttttttttttttattgatcattcttgggtgtttctcgcagagggggatttggcagggtcataggacaatagtggagggaaggtcagcagataaacaagtgaacaaaggtctctggttttcctaggcagaggaccctgtggccttccgcagtgtttgtgtccctgggtacttgagattagggagtggtgatgactcttaaggagcatgctgccttcaagcatctgtttaacaaagcccatcttgcaccgcccttaatccatttaaccctgagtggacacagcacatgtttcagagagcaccgggttgggggcaaggtcatagatcaacagcatcccaaggcagaagaatctttcctagtacagaacaaaatggagtctcctatgtctacttttttctactcaagacacggcaacaatctgatttctctatcttttccccacatttcccccttttctattccacaaaaccgccattgtcatcatggcctgttctcaatgagctgttgggtacgcctcccagacggggtggcggccgggcagaggggctcctcgcttcccagaaggggcggc

SEQ ID NO: 914465 - DNA, 4001 bp, Homo sapiens
ttctgccaaccaagaggcagcagatgaattcccagataccattaagaaaatcattgagaccaggcatggtggctcacgtctataaccccagcactttgggaggccaaggcgggtgagtcacctcaagtcaggagttagtgaccaacttggccaacatggtgaaatcccatctctactaaaaatacaaaaattggccgggcgcggtggctcacgcctgtaatcccagcactttaggaggccaaggtgggcggatcaggaggtcaggagatcgagaccatcctggctaacacggtgaaaccccgtctctactaaaaatacaaaaaattagccgggcgtggtggcaggcgcctgtagtcccagctactcaggagtctgaggcaggagaatggcgcgaacccaggaggcagagcttgcagtgagcggagatcgcgccactgcactccagcctgggcaacagagcgaaaaataaaaagaaaaagaaaaaaagaaaaaaacgtaaaaacaaaaattagccaggtgtggtggtttgcgcctgtaatcccagctacttgggaggctgaggcaagagaatcacttgaatccaggaggctgaaattgcagtgggctgagattgtgccattgcactccagcctgggcgaaaagagcaaaactctgtctcaaaagaaaagataaaataaaatagagtccaaaactattaaaagtaggtactggctgagcagcagtttcttacaaactataaacagcctcttctaacgttagtattctcggtgcctcatatttaagtagttgataacagtcaacttttagtattgttctctatttgctaaatcctatcccccaactaaacctcaagaactgtcacatttttgtgtccaatatagtacctagaataagaagtgctatgaagacagcagattcttcgtaagtccctcctgaactttccagttaatagagtaagctcccatacctgacaaagatccagagaattcactctgctacttcacgttccataccagtgactcaccgcgcataatcctggggagtgaccagaaacttctctttcatctggacctcagctttgttctcccaccagaatttgttggttgctttcttgtgctctgggctgaaaatggagaggataagtaatctcagctatagattataaaatattactcagatattaagcattaggtttgtaatgcaaactgacatctgggtttctgcctggggcacggctgagagaggaacactgttaccatctcttcaagatctcgtgtctcttcttcccataaaattgtgagaatctgaggggaggttaggggcggtaaccaagcgggctctcgcagccagaccaccagcaccacttgggaccgtggcagcatatgacccctaccctaacaaggctggcaaaacctgtgaagtgactcaatccatccttcttgatcaaatcacaaaagcgtcctttttctcacccaccccaaaccctcctcccgtatatgtatgcgtctgtgctggagcaggctcctagctcggctctcacctggccagatgctccagcagccccccgtacagcaccgtcaggtttccatggctcaggtgttcccgcacctcacagccgcagcacaggcaccagcagcatcgctcgtgttcgggcacatagcgctccacctgagcggcgcggatggccttgcgggccgcctccacctgccgcagagaggccaagtagaaccccgagggggacccccaaatcacacccgctctggccttcactgacctgccccgcactcccatcccatctctagccttgcctccgcacctggggcaggagcctctccaaagcctccttcagctgccgctggtgcttgcggctgtaaacgtgcccgcgaccacagaagaaggtctggcggcacagagggcagcgctgcgccggcgccatagcccgggtacccggtatcaccaccaccagcggccgatcctacgccatccggcggcctctgaccctgacccctcggggtggggctaacccggcggctcccgcggccctcagcgcccggcaggcgccactgcaagcccttctgcggctgcgcagactcctcccgggcctctagtcccgcccaggcaacaacatcccagagctgggcgggttaaggaggaggatggcgccgtcctgcagatgtgcggggacgcgcgcccgccgcaacgtgaggctcataggccacacgcaactctgagcattggccaggacctgtagtagccaacaggacacttaataactgatgtataggtgcgcactgtgtgtccagagctttacgttaaccacctcactgtgtcatctcgctgaggttgtgtggtttactattactgctattagcgcatttttaagcgggaaacctgaggcatgaggaggtaaggagctttgaggagggttgcacgggtgttaagtagcgcggtcagcacctgatccccgtcactcatcagtacggcggttggaggggaatgcctgctggaggggaccacgaactaaactcaatcgcccccacagggtgtgctcgccgtggttcctataaagctgtaagggaggctacacagcgtgcagcgttgttgctgagggatcgcacacttcccgtagattttgttgctagttctggtgcactaacgtggatggactgcttgctgtctgtagggcctgcccacggtcagcgctacagaattcaggcccggcgtagctacttccaacccttcagatcttcacttcctgttggaactgtcctctagactgtagcctctgccagaaataattcattttgaatacccttgtaacacccaattccttgatctcctatcattcccctggcagggtcagtcctcgaccttgtccccccaaattgcttcgtctctgaatccagactctgaagttcggctctgcctaccaccttaagttatccgatgtggccttaccgtcagcctagtctttgactacaggaagacctctcttcctgaagaagacgcctcttttcatccattcactctggaaatgattcaacgtctgcctgctgctgatgctttactctccaccaggggttttcgaagtgtgcttccccattccccctgggcctatagcatcagcatcagggaacttgtcagtaacgcacattcttgggccccaacccagaactactgaatcagaaacttggggtgagggcctgtcgtggtggctcatgcctgtaatcccaacactttgggaagcagaggagggtggatcacctgaggtcaggagttgaggaccagcctggctaacatggtgaaaccccgtctctactaaaaatagaaaaattagccagatgtggtggcgtgtgcccataatcctagctactcgggagactgaggcaggagactcgcttgaacccaagaggcggaggttgcagtgagccaagattgcaccactgcactctagcctgggcgacagagtgagactccgtctcaaaaaaaaaaaaagaactcagggtgaggcccagccggctgtggttttatgagcttttcaggggatactgatgcgggatcaaatttgagaagcactggtctaggtcttagatcctcttgcttcagtttcgtcattggatctcaggaatgttcagctgccctctcaaggcaacttcttacttcacttgaccttccaagacctctcgttctgtcaaaccccaattttggatcaacccaggcatgcttccctcatgtgttccaaagctggtcagagtagtctacaccactatctgcttcaacttctagtaacgtctaagccttcagcagttttgcttatgaaactgcttcactgaagttctccaccaccaagtagtcagctggcatcggaattcggcttgtgtcaaatggaactcaacatcttcctcttcaggacatcccctattttcatcctcccagtgaatgacaccaccaagttaaagcctggaggctgggtgtagtggttcatgcctgtaatcccagta

SEQ ID NO: 914466 - DNA, 4001 bp, Homo sapiens
gaaccgcacagctcaggaggcgcccttggcttctgtgatgagctgatctgcggatctcagctttgagaagccttcagctccagggaatccaagcctccacagcgagggcagctgctatttattttcctaaagagagtatttttatacaaacctaccaaaatggaataaaaggcttgaagctgtggcctgagtgcctcactggacccagaggccaatgggagagtatttggagccctaggtcccagccttagctctacagactcactgcatgaccttggacaaattctttgatatttttggactttgtcttatctgacaagtggggctacatccgctcggcctcatctccgggactgaggggagacagtcctctggggtaaaagcgaagaggcttaccgcccctctccccgtgggggcccacagtgctgctgcgtgtgccacggaggggcgctgttatgcccccttccagcctcagaggaggcggccgagtggttctaggcccccagcacctgcttcctgccccattgtcttggacaggaaggagccgggaagggagctggagccacttcaggggctggattaaggccggtcccggcgcccgatgggggaagtctggtttaccactgccccgcatcccaccccaggctcgaagtaatgggggaatcattagttctgcagtccttctggatgggaattgtaccctgtatcagcaccccaccctcgccccaaccccggcgagtaccaaacagacgctgcccaggccgtgggctccgcttccgtccgggtttattacccccaatccaacccccagcaagtccctccgctccagccttcagtccccctgctgccctgccagcaagagcgaggggcccttcttggtgtcaggatttcttagtccatgccagcggcccctcctgcgcagccaggacggcgtccaggtcccgaggtccacagcggtcccggggctcggggagcaatccgggcgggcgtcggcgtggaggaagcagtgccttcaatcatcgggggaacaggccaggggcaactgatccggactgcccacgctgccagtgctggagcttccatcgcctaggtcgcggggcccgcacgggggcaaggcaagctcgggtgctggcccggctcctgatcccccggcgccgctggggccgccgcgggggccccattcttcgcccagcgccaggcagagctccttaagcgctaggttctcccgcagcagctcctcctggcggccctccagctcggccagcttctgccaacagccgcccaggtcctcgcgcacggcccgggatgcttgggtcccgaagagctgccactggcgtgcggcgcgccgcccgcgctggcgctccgagtccaggaagcagcagaggtcgcgcagctcacggttctctgcctgcagacgccggttgagctgcttgagctcgcggatctcgcccaggtggccctgcagctgccgattcacctcctgcatgaggcggccgcgctgcaccagtgccgccaggcgcgccgcctcctcccgccgcaggcgccgcactagctcttccttgcctagcgccgccatctcctcgtccgtcagctcctccaggccgcctgcctcggcctccatggctggtcaggcctctggagcatcgcccgcccgccgccgcggcccaggagccccacgtcgggcccggcgccactcaggctcgggctccggctccgcacgcggcaggcagtggccgaggcagcgtaggctgcagcagctacccgggctgggcacgcggcggggcgcgcgccggggcggggccgcatgtcgttatggaaggacagccaatccggtgaaacgtccccggaaaggggcggggcctgagctcaggggccgcccccctcgttccccacccactccgggtgttactgatcctcgatgtcaaggaacccgcgcgtcatcgccctccacatcggtctcaacccgaaactaggagcttcgaacctccaagtaccggatcgccccaagcttgagcctaggcctctcggctcttctgagaaacaagattcaggcgtccgcccctgactcctgcccatcccccacagaagtcagatggaccgctctccagtccctctttacctttgatcaaattcggaagtctcggcccactaaggatcgctcctggttcctcggaaccctgagtccaaacgtcctagctcaccaatagactaccctccctcccagggagcgtttcctgcctggggggaggaacatacaggattcgtttgttcaataaacgttttttatgtgcaaggcccatgcagaaataaatttaaccaaaataccgattccatcctcaaggaggtcgcagtctgtccgggaagtcaagctgtgttaagcaagaaataaatccgggaggagtatggtctgagggtccttaagagggttcccaaaagagatgctatccaagaggctctggtagatccataggactttgccaagtaaagagctatttcagggagagagaataacatagtgaaagacactggtgcccgaaagagcctagctgctttaggaacaatgaggatagcttggtttttgaaaagcagatgtgtcgagaaaatgctaagagagagagagcgaggcttcaaaggtaggtaaaagccagattcttaagaacttccagtaccaggttggagcatttccaaaggccactaaggatgttaagcaagagagtaacatttgtaaggatgttaagcaagggagtaacattttaaaatatgcctttaactggccaagatggtgaaaccccgtttctactaaaaatacaaaaattagccgggcgtggtgggaggagcctgtaatctcagctactcgggaggctgaggcagagaactgcttgaacccgggaggcggaggttgcagtgagccgagatcgcgccactgcactccagcctgggcgacagagcgagacgctgtctcgaaaaaaaaaatgtatttaaaaagattgggctgatctgtgtgggccggaccctgcggggaggggacataaacagggagattagtaacggtgtcaaagagcaagagcaaggagagctaagcagaaagacggctggggcagcatcagtgggggtggagaggacaaacagatactagaaatattcgggaggcaaatcagccgaactgaatgtggggagagaggagtctggaagaacgcccaggtttctcgtatgagaactggtggatgttagggctgtcactgagatagggacgcaggaaagaaacaaatggggagaggcagaggtctgtctagaatatgttgagcttttgaggggcttacgggaagagtgtggatagacttggccgataggcggcccctccggatgtggacttccaggcagagctcggaggggcagaattagagacgtcagtagctcgtggggctgggggtgggattaaaaccaaggtgggagcaggtgccccaaacccaggagaggtgctcatgcgcaggatggacaaaccagtctccagcaagagcccgaggaagtcgggtcataccccatttttgcggagatttaggatagagccctgtgaaacccctaagtttaggatacaggtcaaacttaggaggtcccgaagagggcagagaaggtgggagaaaagccaggaggaagtgaggggagaagttacggggaccgaggagacgaagaggaggcactcccttcgtgctcctgcagacggccggggagggagacaggacgcaggagcccgggactccccctcccggcgggaggaagcggtgctcctccgcgcaggcctccccctctcttccctcgccgctcccgccccgtcccctccccgactggctgtgtcccggaagtggtcataagctgggtcccgatgccgcgagcggaatctcggcgctcccggaagtggcctgaaggcggcgcgccagtcccgagcagtgctcgctcctgctcggggcgctgcggccccgggcgtcgccatgaccagtgagctg

SEQ ID NO: 914467 - DNA, 4001 bp, Homo sapiens
tctcccatgggagacttgcagtaaattactctgtaagcctcagtttcttctgtttcatcaggggtggggggataatatccacagcctagggttttaaggatacaagaaaagggcctagcacgaagcctggcacagagtcagcttcttccttaaaaacaccctccttcctcatggtccctcacaggcatacatccctgactctcccctgtggttcccattagctcgaattggaactgaatcccacacctctccttcatggcagcctacactcttccttcttcagatgagctacttcgttccttcattaaataagcattcattgggcatttactatgcccttggcacagaaagacaagaaagatctcgtgcctgccccttaagaaggtcgcaatccaattcaaggtggatctacagggattgggtaaaggggttttttgcacacaggcttcggaatcagatctgtgctcaggtcctgtgcctaccactcatttagccttggtttcctcacacaaaaaacaggaataataacaccgcctgcttcacagggctgacgtgcagattaagcgtgatgacacatgctgttccatgtttgaaaggctgttgactggtaaatccttattaaggctgttgactggtaaatccttatataatcagtgctcagtaatactttttatcttaaaggcaaataactgtaatagactatattggatgaagacctcactgctttgatcaagtaatggctggtttacttgcttctgcttctctcactagagagggcagacaacggtaaatgtctgttgaacgaatacagacctgaggtgctacaggagaggcccatagggaccctgaggaggaaaggcatcagagaaattgatctttgagggcctggccccaccctctccgggatcccagggcattttaccacattctgattgtaattacctgtttgctaacatccccactaacgtgagctctctctaaccctggggctattctccaggctgcagcagggcaaaggcggggtcccaacaccatagagaacgccacccctgtccatgctgtcccccacttcaccttttcttggagcggtccttccacactcgccccgatttgggcttccccttcgggattacaggaagctcctctttattcaacttcttggacgctggggcctgggatgaagaaccttttcgcttctttgccccgaagccgcctgtcaccgtctccccagctggaggtggcttgctcggctcatgctgaccccggggggagccaggtgccctgggtgtcagctccagtagtggctgagagggctccggaccgggagcttgctgaccggggtaaggctctggtgatcctgggaccggcggtagctgatgctggggggcccccggggtcagctcctccttattctgggccaactccgaggccagtactccctggtcctgagaacactttggtgcctcctcacttggcttcggctgacatcgtggggattcaggactgtactctggctgtctttgaggcgactccaggtgtaggtcttgctgacgctggggggacgctgcgcctggctctggctgcccttggggtgactccaagcctgcaccctgctgcagacggggtgatcctgggcttgtcttcggcggcctttcgggggaccccaggccagcccgctgcacactcggaggagacccgggctccctcgtttcttctgggttcgactcgaactccacaagggcccgtctcgtccgcgaaactgaggtgaggctctcgggggattcgggccttaggcctcccagccgtcggctgcgccttaacggtgtatccatggctcagccggtaagtttccacacccctgcgcacgtgcagcccccgccgaaaccggcgccttcctatgacgtcaggagtcgccgcgtccgtgacgcacaggaggggggctgttgctgaggcggccatgttggtgaggggtggagaggcgggaccggggttggggagagtggggctcagcatgcgcatgcgcaattcgcgcgagcgcagtcaacatgtgattgatgagccagtctttttcctgggattcgcttttgcctttcttgcaaagtttcctggggaaagaagagcgagcaagtagaaaagggaaagtgggaggacccatttcagggagagaacagagtcgaaaaaaggtccgaggagcccataggcaaggcccagtggatgttttgcagccaactccggtgcagttgggcagagtcctgccctccttgggcctgttttctcatttgtaataggggtcattttgcactagcttcgtgcatcccaaatgatcctgtcagagtcctcctcccacctacctgagggactgctacctgggggtcctggaggtggaagatcggtcttttctgtgttaattgttcacactcttgattcttccgtcctgtgcttccgtatataatccatagctctccctcccttttcagcgttttcaacgtttgtgagggaagttgaggtaccaataagatgcaccacctttgtcctgtggctcacctgggccctcgaccagctgcatatcctcccacgtccctcttcttctaccccagttctagaaacgggttggatcatctccgatcttcctttcagcccagacagtggtttttgctcgtgtgtgaacctgcttcgcctcccctcccttcccttgctattcacctgtaaatgtactttgcttactaagcactttgggacctcaccagtgagcaggtgttgacttctggacctcccaaggcctagagaagactctcgggatgtggggttggggaatgtggggctgtggagactttcgtgtgagacctaggagtggggctttgatttacttacagcatgcttcttaggaagaacatcttggaagtggcccagttgtgtaattcttggaactgcctggggttggccattaaaggtcccagggccccgtctgacattccagtggtttcttttagaaaccattgtttctccagctgcgggcttgtgagagggcctgggaaattgtccaagaatatcagggatcagagtgtcctcatcttcctcatgttcctgagtcaaggagacccctgcaggggggctttgcctgcctcactgctcctctccggccatgcagctgtccacagcagaagcagccgggacacctccttgcccagctcttccaccccccaactgtcagaggagtgagttccattcagttccttaaatgccctgcccctgcctggagaccccaatgatctgacactcagaaccaagcccggcaggtgttgccagagtgctggaggagactgtatgcccctctgccctgctccagtcccccttggcttgccctgcctcctaagctcttgtccccagctggagggatcactctccagtgccgattggatcatatcctagtctagcctgaaatacttcagagggtgatctcaggttttcaccagagagagggagatgtgttttagaggaggcctttgggtggcccccagacatttggaggcactttgtcaacctcagcatcagatgggctctggcccagaaccccctactcccacatgagctcagtttgtcattgtcattatacatggtgtgcagaggcccagaggagactcctgaaattttcagaagcgcctggtgtggcgatcgctgttgggaccctgtctccttacactcctttgctttcttttaaaaattattattatttttgagacagggtcttgctctgttgtccaggctggagtgcagtggcacaatcacagctcactgcagccttgacctcccaggccccagggatcctcccacctgagtagctggcaccacaggctcatgccaccatgcctggctatttttttttttttgtagaaacggggtctccctgtgttgctcaggctggtcttgaactcctgggctcaagtgatcctcctgcctcggcctcctgaagtgttgggattacaggcgtgagccactgtgcc

SEQ ID NO: 914468 - DNA, 4001 bp, Homo sapiens
ttcatcttctagcaatgggggagggtgctgaatctctagggactctctggcaggggccacaatctccacaggaacctcttcttcatgcatttgaaagatgacatgaaggaaatctgtttcatggttggtgaggtacttgaagtagtcatccacagacaaggtggttttccatgagttcatcaaggaggccttgtttgaccacttctcccagcttttggtagcttggagtgatgggagggagggcatcttcttagtattggactgtaaagtgtttgctctctgggagtaaagtccaaccagctcagggttgatgatttgaggctgtttttcttgacgtagaaaggctgaggacaggaaggtcgaccagtctttatctgctgcaggctcaactaggggcccttgatcaaaatgtaagtggtcagaagagacatggctcatcaactccttgtagacctccctggtagtactgccaacaaagttatcaatatccattttttcaatggctttgggatccagttcaccagccagatggttatacagggctccggccccctcaatgtggaaagagtctaagaagtttctatcagagacccgtacggcagccgcctggaccacgacctcatttctaagcttcaaagtaatggtcactggctgtgggtgaagtggaaaggatttggggggctgggggtcccactgcccagaggcttcttcctcctggaggttcctcaacatcttctccagctcctccaggcgatgccctgcagctgggtgacgggtcacaacccccaggagaggaggcaggcctgagtccagtggtgggtagcgagtcccctccaacttcatcttctttatcaactgcttcagatcctcagccacgatgagcccagtcagctctggtttgctctctgtagccaagaccagcggggttaaggggcgagatgggagtggaggaaggcccaactcatctgccagcctccagccctcacgcagggagggcatggattggcctctccggagctcagggcagaaaggcgagggggaagccctgctggtgggggccacaggatagctgggcagcgacaccatctgtgaggaactgatgtcgatttctctcttctttcctatggagggcagccagtggaaaggctttttcctcttcaaccgagggatggacttcaattccttcactggatccatccttcctggctcattgagaaactctggtggacggctgagttggatgaggtagttcaggttgaggttagagcactgcacttgggcgaagccagtgctgtgaggccaggggatagggcacagcttgaacgtcccagcggggcagacagggtgcagcttgtccacatccccagaggcctgctctgccctcagcagggcctggaagtcggcaagcaggccacggtagacgttgggactagtaaggaagagtgtgcagtccctggcgaggctggcggccaaccgggtgagggtggctgattcagtgaagacccccctgggagtcgacatggtcaccagcaggtgcaggtagcgcaagaagagctgctcgctgctcagcagcacgtaggcctcgagccgcttccgcagcttctggttgtttttgtggctcagactaagttcggcgggcggctcccgccagctgcacttcagctcgtccaggatgaccttgatgagacgtagtcgggcctcaggaggcactcccgctgctatcccgctgccggccagcagcttggccacctggctgcacagcgacgccaccgtcagcttcgccagagggaaggactgcagaatccggccctcctgcggggggcgcttctgaggctctggggacgtcgtcctagtggggaagagcgacagcggacgcagcagccggtggtaaaaccgctggagctcaggctcgggcttcgggggctccatcatagagccggcggccgccaccgtccaggaacagaaagccgaggggttactaaggcaaccaggagcccgacggcccgagtgcgcctgcgcggccgccacccggtggctgacgaagcagggccttgcgtgcgcacgcactaggaggaggagttaagggtggctttagaggctcagtccccgcgacgccgcgctggttggtgctcctgcgccggaggagttctgcgtctcggggtggtgactgggtccagaatggcttcggattcggggaaccaggggaccctctgcacggtgagggtcgaggcttcgtgtggagcctcgccgggcagagagcctcggcccctgggatgatcgttaccttgggaagaggagaaggagtgggcacttgggttggggcctggggccatgggatgaaactagggtgcgagggtagcaggggccctgcgtgagtgttggggggtgactcccatggtcctggaatggtcatgagagatcatgaagaaggtgcttgaagaggggttaagtggggcttgttcccagacccttgcggtggtcatagggtaggtggtgaaacaaagtcataccaaggcacttccccagcgatcatcggttggtccctgccgcccttgcagttggagttcgcggtgcagatgacctgtcagagctgtgtggacgcggtgcgcaaatccctgcaaggggtggcaggtaagaacagggtaaacttttctgcagacagtccagaagcctctgggagggaccaggcgaatctattaggcgaaccctactcccattttacagatgcagaaagtgaaccccagagagtgaaaggcatgttctcagagttacacacagacctggaggcagagcctagagtacagctgtccagcttgccctgacagattctaactgcctgtcttgttgtcctgaacctcaggtgccccagagactgaggagctaggctgagggagttcctgggaaaacaggcagtttttgcttgggaaacaacataatcttgacaaagcaaacagcagctcaggccctataccatcctgggtagctttctataccactgggtgtggtggctcatgcctgtaatcccagcactttgggaggccgaggtgggtggatcaccaggtcaggagatcgagaccatcctggctaacacagttaaatcctgtctctactaaaaaatacaaaaaattagccgggcgtggtggtgggcgcctgtagtcccagctacttgggaggcagaggcaggagaatggcgtgaacccgggaggcggagcttgcagttagccgagatcgcgccactgcactctagcctgggcaacagagtgagactccgtctcaaaaaaataataataataaataaaaggccagctggtctggaggtgacctggcacaatgagaaagatctggaaaggtagagccaccagcatggctctgggaactggcttcctttgattctgttaagtgtttatccaggccaggctcagtggctcacgcctgtaatcccagcactttgggacaccaaagtaggtagattgctcaagtccatgagtttgagagcagcctgagcaacatggcgaaaaccctcctctataaaatatacaaaaattagctgggcgtcatggtgcactcctgtagtcccagctactggggaggccaaagcaggaggattgcttgagtccaggaggtggaggctgcagtgagttggatcgctccactgcactccaggctgggtgacagagtgagaccctctctcaaaaaaaaaaaaaaaaaaaacaagttcacccagtcattcggcaggtatggaccagacactggggctttttagggagaagagttcacatgggtatcaggcacatcccctgcactcaggtggaaatgagcatgcaagcgttgcctggatggcattcgcagaatgcttcgtggaaagagcaatggtgagagggaatgagataagatggcttctgaagctgggaccctggtagtggtggactctgtaaagtgattaggggtatgagctctagagttcaaaccccctctttgccacttaatggcactaagacttc

SEQ ID NO: 914469 - DNA, 4001 bp, Homo sapiens
agccaccagggctagggtcccatccaggcttaatctgcccctctccactcagtccccttcccaggctgcgcacactcacagctcctgccgcagacgccgcagctgagccttggcgttggccagctgcagggccagatggtgcgaggggccctcggcgggagccctagagggagcctcaggcctcaagcagaggggttctcgctccagcagcagttcagccagccgctgtaggtcaggggtcaagggtcaggactaacttatccaatgcctctgcacatcgacccccaaccacaacaccagacatggggttgtggtctggggtcttgggccatctggttgtgacatcactgatggcccaagacctcagaccacaaccccatgcctgggccccaaacttccatctcccttgcacaaccggctccctgatggtcctccagttccccaacctgagtccacgatgcccctgctgcccctacctgggcccccaggtcacgctcccgtgccagcttcgacagtgtccccatcaggctccgggacagcatctccagctcggcaggtgccagctccccaggatctggcccagacagtgccagcaccacgccggcccccggctgggtcacctggggcgcaggaagagcagttcagtggaagccgcggtgtggcaagggcgtcccaggtgccataccagtctgggctgccgaaccgtctcagtacctcctggatggcagcggccagctcgctctggacctcgagactgaggccctggatgtggcggatgaagagttcccggtgctcacactgaggggagacaggaaggggagctggtgcaggatctccctcctctaccgccaaagctcgaccctaacctttccttcccaccgccggctcacctgtactgacgctcccaacagtagccgaagaacgccttccagctgctccaccgcttcttctgcaaggcacatgccacaaggggttaactggggcggggaaggtagagtagtgcgggggcagaggcaggagggtgtgggtggggagagcacctgagagagggtcaaatcccaatgtctggaggtctgggggtggcgacaggatcagcagctgcagctcctcctggaggcagagaggcagactatatgaggcgccttcccgaaggggctcctcttcccctcctgtctccgcctttccctcgagaccccttacctggtagaagtccctcagtcggccccacaggtggttcaggttccacactcgccaggcagcaggtccgtcaaggcctctgagcatccgaggtccccctcgggagctgggggcactatgagccggaggtgggctcgaggacccgcctcccgtcaacaggcctcgcccaccgtccctcaggccccgcccactgagcatcaggctccgcccacccgcttcccctcctctcagatccttccccgccaccgccccggcccgatgccccttacatgatgcccagcacccggaggagcagggccccatcgctgaggcgcaggaatctcttctccaaccaaaggggcggctcttcctcctcttcctcttcttccccctccgagtcctccgcctccccgaccagcccggccagtcccagcgcctgtgaggagcccagaggggtcagccgaccagcagagtgaaccctgagcccctccgacctgccccagtgagcccaagcaccccttctcacccgtcctctgagtgcctctgtcccctcttccctcaccacagccccccacaccatatctccatcccccacatttgaacccagccctcccctccggcctggttctgcctcaccctcccccggccagcgccaacaccagcccctggctggggctcacttcccctccccaacccgctgccacctgccccctcacccaggtagccagactcccactcaggaagtctctgagcctgggccccttgcccccctccatgcccgggtcggggtgcccgtctcactgtggcagctgcacctgccctgagaggaagaggaagtccccgagtgggggatcccggggccagccacagacaccctgtgcagcttcctccttccgggtgcaggcgggcctgggcagtctgagtcctacctcagcccccacctcacctccctgcatcctcctagcatctctgcagggctagcccagaggttggcggcggaaggcccacagctcccctggctccatgggcaatgaccgaacagcccttcacctctctgggccttgttttctcaaactgaaactggagaggatgaccccagcctgggaccttcgagggcctcaaaagggctctgggccttgcgtggtgagtttggtcacccacacacccatcttcccaaatgccaggcttcactcactacagcgttctttcttttcccttcagtatttctcaaagttacccaaaccacatcccctgggaagcctggttcagatgctcctccaagaagcctcccttgaaccccagatagaagggagcatcattcctgtgacctcaccccaccccatcctctatacactcgagactgttgtagccatactaggtgctatgaaggggaggggatttgacctcggcaggatgatcagggaaggcatcctggagtacgcatgagatcagggatggctgggttaacagggcaaagtggaaaggaagggagggtattccaggcagcaggaacagaatgtgcaactgctctgaggcagctggaagcatggtcagcaaaaagattggaaattatgcatgttttatctattccaagatgcttaatgttcacgtttcactttttgttttgttttgtttttaagagacagagtctgaatctgtgacctagtctggagtgcagttgcaagatcacaactcgctgcaacttcaacctcctgggcttaagcaattctcctacttcagccttctgagtaactgggactacgggtgtgtgccaccacacctggctaattattttgcttgttttttgtacagacagagtcttgctgtgttgcccgggctggtctcgaactcctgggctcaagtgatcctcccgccttggcctcctgaagggctgagatgacggcatgagctgcctcacgcagcccccattctacacctctgaagtgagtttacatggtacagttgctgtctggctagctgccgtcccaacatcactgtcaggacccacacctgaaaagcaccagcatcaaatccttcagaagagtgtcagcagcttggaagaaatcctagaggcaagcagaaccctttttagccctgggactcaaatggtgggaaaccccaggggaagggaaccaggcttgtcagtgacactccctttttttttttttttttttttttggtgagacggagtctcgctgtgtctgtcgcctaggctggagtgtaatggtgcaatttcgggtcactgcaacctccgtctcccgggttcaagcaattctcctgcctcagccacctgagtagctgggattataggcacctgccaccacgcccagatgcttttttgtgtttttagtagagacagggtttcaccatgttggccaggctggtctcgaactcctgacctcaggcaatccacccacctcggcctctgaaagtgctgggattacaggtgtgagccaccacgcccggcctgtcagtgacactcctagagcagagtgaaaactcggctccacttcatctgcacaattgtaaagctggcttaagagcgcctggctgttttatggaatgtttggagcagtactgctctccgtagaactctcaaggactcagagaaggaggtggcaggcagacacagacatcacgactctcagaccaaaaatgattcaaacaagttggactctaaatgtgaaggagttttctgaacatggtaaccaatttattttgcttctattatcctttttatgtgtgcatgagaattatatatgataagaatctacatttaagtgaaacagagctctttcgagaaatacaaaagaaaaattctagtg

SEQ ID NO: 914470 - DNA, 4001 bp, Homo sapiens
gcatatcgtgcaatattaaattaagctactgatatttgcattattgcacatctaaatcctctttttaaagagaaaaccaaaaaatggaatattatctaagcttgcagaaaaaataaaagttgttttgtataacttatttgaatcatattgctcatacagaataaaattgaccttctttgttaaagaacttgatctcaatcattttccaagctagcgcaaaataaaataaagtcagacacttttttttttctgcaaagcattcatgctattatgctgatacatgtttgcttacaatctcaactatgggagactataagcctaactatctacagtgggtaattgtgctaattatttttcacaatggcacatctcactgcacttagattgacttaaatcatagaagctgctaatttaaaatcctaacataaatgaagatatctgaggttgagaattaataacttatgggtaggagaagatactactagtaaatttaagatttctaaggcacagaaggaaatctggcaaatcttgtgtattctaggtgtagaaatgaaaattaataatggctttacaataataacaacaatatcatagtaaagtagcttttctttgagttgccttttgtgcttgaaagtataataaatgggatatcatctttactcttgccataatgctaagacgcaaatatttgaattctgaattgcaggccagaggaagcagaaacttccctatggagagagatggcggagtttgccattgagttctctctccttgcttaaaagatccaagctgtgctttttgaaggcttcagactgcagcctgagttcatcgtaggccttctggatcccatctactttgcgctgaagctccctgactctcaagttgctgtccacagccactgcctcttgctcaaaccgctccagcgcatgcttcctgtcttcatttgctatctccaacttttcctcaagctggcagatctctgcctgtttgttctgaagcactttgcccctttcaatggacagctgcagcaactcctctttctctctagtgacggtctgcagcctggcctgcagctcctggctcaggctgctgtgtgtctcctctgccttagctatctgctccacagcctgctggtgctgctgcttgagggtctgcagctggctgcgcagctgttctgtctccttggtgtgggtgcaggcctgctggctctgtagctccagcagctccttctcgcgcgcctgtgcctggcaggcatcctgagcacacctctccttcagcgtttctagctccccagtgagggcctcacaccggactgtgagctgtaatactttcgcctcctcatccttcagagcctggctgaagaggctgctattctccagcctcagcttctcattctcctccctcagcttgatgttctcactcttgtattcatccttgaagcggagcatcaactcgtggttggctgctagggtcataaagcgttcctctagtttccgactgtactcaccctgggccttgagcttctcagcctcctgcatcatcttctcctccagctctgcattgagcagctctaggatctggcagcgctccagggcctcatctgacctccgcttcaggatgcagatgagctgggactgctcttcaatgcgggagcgaagcatagccttctcgctcctctcctcctctgacagtccccggaggtttgccaaggcttccctcagaccgtccagttccttaaactccgtctcctcttcctggttgttcagtttttcattttgcttctctaagcgttcttcagggggcggggtgtccatcctgggagcctgctgtttctggagcataggcgctctcatccactaagggctgactacagtcttttcccctcagatttcaaacgctgcagggtgttgctagggactcttggcactccccagcagttggtttttccagtaaggagccctgtaattggtggacaggtcttcagaatgctatgaagtaacaacaggggaatctgggggagtccagagccaatctggtcgggttacttttgcctttctaaccaatcacagctctcagttgtcaactgtctcagtgtctggcctgtacagcacagagatgccaaccccactcaatctccagccagcatcaggggaggaagcctgactccacctaatttctggtagtagtaaacaaatgaagcaggcaatgatatatttatcctccctctcccctcttcagttatcgtttgaataaattactgtttgtggaaacatggttggctcctcaaaaaatttcagtctatgaatacaaagtagtagtggtattctgagagccaggaccctaaaagcctgcatatctgcacccgtgatgtttggcacagctcccttttggtatttaagtattaaaatagaaaacaccagtgaaatttcttttgttgttcttagcattgtccccacctgggcataaatactctttattagatatttaacaccccctgtttttacccattagcaaaataaggttacagaaagaagcttagtgaaccacacagataaacattaaaacagaaaaaataagattcaaatgaagcttgccattatatgccaaagtcaactcctgatagattagttaaatgtaaacagaaactagaagaaaatgaaggtaaacatcaaatctctggggctaggaaggattttttttttatcttaaacattatgtaagatcagaaagggaaagcttactcaaaaagttatgtataattttttaaattatgtgacttctgaggtctctccagccccttcttccactggattttcttgacattttactcctcaaacccaaatattgaagccaaacccaaatccactaaccagctctctcgccctatctttaggtgttcctctacttggaatgcctttcctactttgtcccttgtcactctagtaaagctttttattcttagttaagaatcgtctctgaagcctattcctggcccctacatgtccaattggtcactcacatcttttagtgcatccgctatagctatttgtacttctggtggaggatgtgaaaattttattgcagtcactgtttatctgccagcttccctctgttagactgtaagatccttaagggcagggactgtgtctatttcatccttgatgattagactagtgcctggcacatgggggagattcagataaatgtgtattaagtggatgttgaaggtaaaaatcaaattgagaaaaatatccctaatatgacagacactactttttttttttttttttttttttttttgagacagagtctccctccatcgcccaggctggagtgcagtggtacgatctcgattcactgcaacctccgcctcccgggctcaagcaattctcctgcctcagtctcctgagtagctgggattacaattacatacaaccacacctggctaatttttgtatttttagtagagacggagtttaaccatgttggtcaagctggtcttgaactcctgaccttaaatgatccacccgcctcagcctcccaaagtgctgagattacaggcatgagccatcgcacccagcccagacactaccttttttaaataaatattttatacatatcaacgaaacattaacatctaaaaaataaacaattaaattcacaaaaatggccaagaactgaacgtctacagtgatccaataaatacaagttaaaattagacataatttcggccgggtgtggtggctcacgcctgtaatcccagcactttgggaggccgaggcaggcggatcacgaggtcaggacattgagaccatcctggctaacacggtgaaactccgtctctaccaaaaaaatacaaaaaattagccaggcgtggtggcaggcgcctgtagtcccagctactcaggaggctgaggcaggacaatggcgtgaacccgggaggcggagcttgcagtgagccgagatcgcgccactgcactccagcctgggcaacaaagcga

SEQ ID NO: 914471 - DNA, 4001 bp, Homo sapiens
aaacacttcagtgtatagccagttacttttctgtcaggaattcaaaagaacaggcattaacagcatatattcttacatgctggtctactaacgtgctacactagttgcactagaataactaaggtccttccattggtcagaggtcaaggttttcaaatcccttgattattgacattattaggcaagtttaaactacttgtataaaataaacattcaatatttgtttagtgaggaaggacacaaatcctactagttgtaagaagagatttaaggtttctccaagaacactcagattcaagtgggataacttttatgttaaaacattaacatgtacttatggtcatttatttcccagtatgatatacacttcaaagttcattctctaagaacatttaattttgttttcatttggatatgtaaaagtcaacaaagatggcagctggatgacttcctggagttcaaaagtgctacctcctttttgtaaaatccatcataatgtgtatgtatgctaaacactcaaatacctaacaaaagagaccttgtgaatgaccctggcagctaaacagcaatctcacagatggaggatcaacaactgcagttttgactgcagctgttactggtgtggattaaaatgaaacaatgagcaaaatagcacaagtaacaatatggagtataaataacagcgtagaagtgtttgggtaccgaatggctcagcgtacctggcactgaagattcaagaaggtgaacagagataagaggtgcctattcgcctattttgtggacaaccttaaaacggtttaaaaactgggagggaagttaaaaaactgggggtgaaaaacaacgacgacaacaaaaacctagccctagaaacatttctctgaataaagttagatgtcttcaggacaccctgttaacaggggtgccaacaggttggaaacttgtgggttccagtattcacttattttcccaaagtctacaatgtgactgaaatgtactgagaattccagtgagaataaggcagacgtggcctgaaatttatgatgctgtctaccaaaaacctgggctcgaggccagcacctaaaaaaacaaaatcaaaatttgatcaggccacaaaagaaaacaggacaccctcaaacacagattaccttacgttggctcctgacgagattactagcctcttgtcaccaaaaaacggaaacaacggctgagaaagaagccgggcgcgaagcccaggccttcaaaggttcgctttaagaacagaaaggcagtgctttcctcagtcctcgccccttggggcgagctgggcaagtcggggcagcaggcagcggcgtcgcccagcacaaggcgtgaatccgggaggagggcgtggcaccttctcttcccgttcgctcgagcaggcgcgaccccacgggcatcgtctccctagagagcactcaggcatctatgacacgacgccttgcctcacctctccgcagggccggcgagaaatgcccgcggggccttgaaacccaacgatctcctctgccttgggagagaaagagccgccaagcctggcgactattcatgtcctcagagttttccggtgggagggaggcggaagacggggtaaatctcgcacaggctttcgggcaaggtagttctggcaccacaggaatgctgggaattgtagttttcgctctgtcacaagctcacctcccagcgcaggcgccaccgtggtcccacgaaactgggtctcttcacagacagacccacagttcgcgagcatggctcagcgctgccccgcttctcccagcgccccttcccgacctttgaacgccttcaccgccctaggaaagcgagatcttgtcagagaaccttccggcgcctgtttcctggcagtggggcatagtccaacagctggctcccccaagatagccagcggccattacgcgcttgggtcgggggagatggagtcgcatttagccgcacagcagcctggaacctgaagttttcggccgctgagcgttctgggtgattgcgtagtgcgagggccaacgaaaccttctgggaagtgtagtccagcaagccgctcacttttcgtgaggcgtcacatcctgctgcttcaccctctggtgcacgggaggaccaactatttcagtcggtatgtcctttctttagggaagccgaattcctccgtttctaggagaaattccttgaattttcaccatttatccttctcagacctcagttactcaagactgctccgcatagtaaaatgctgaaagcaacaatgcacagtagttgtattaaaatgcactaatactcatgaatattctctgtaagttgtaaaatggcacacagttgtgcggtgttagtggcttactctctcaagattctaaacaattacggctaggtttctatctatatgtattcaaagctttgtgagagtcaactaagtaacaaacaccatttctaaggcccgaagcacattgaaagaacaaaacttgattcccgccaacaactgctttaacagacaattcatgaagaggaaatataaattgctatttaaaacactgggatggctgggcgtggtggctcatgcctgtaattccagcactttgggaggccgaggcgggcagatcacctgaggtcgggagttcgagaccaacctgaccaacgtggagaaaccctgtctatattaaaaatacaaaattagccgggcgtggtggcacatgcctgtaatcccagctactcaggaggctgaggtaggagaatcgcttgaatcctggaggcggaggttgcagtgagtcgagatcacaccattgcactccagcctgggcgacagagtgagactcgatctaaaaaaaaaaaaaaaaaattgggaaaaaagtttgatcttaccagtttcaaaatacaaaacgcaaaaccttagggtatatcgaggttaggggtcccaatgatcccaacaggatgtaagcatagtactcaacaggtgctttttcaacccatgcccctctgtccgtctccccctttcctcatctaatgatcctcaatgcctgttgtttccacgtttaccatcatatattcaatgtttagctcctacttataagtgagaacatgtgtatttggttttctgttcttggcattaggttgcataggataatggctccagttccatccatgttgctacaaagagtataatttccttatttttatggctgcattatattccatggtgtatatgtaccacattttctttatccagtccactgttgatgggcacttaggttgatttcatgtccttgctatcgtgaatggcactacaatgaacatacggttgcatgtgtctttttttttttttttttttttttggcttgaggcagggttttgctgcgtcactcaggctggagtgcagtcgtgcatggctcactgcagcctcaacttcctgggcttaactgatcctcctgcctcaggcttccaagtagctgtgactacaggtgtgcactaccacaactggctaatttttgcatgttttgtagagatggggtcttgccatgttgcccaggctggtccagaactcctgggctcaaactatccacccgcctaggcctcccaagtgctgggattacaggcatgagctgcggtgcccagctctgtgtctttttgatggcatgaattattttcctttgggtatatacccagtagtgggattgctgggttgaatggtagttgtattttaagttctttgagaaatctccaaactgctttccatagtggctgaactagtttgcattcccatcaacagagtataagcattcccttttcttcacagcctaaccaatatgtgaattttttttcttaataattgccattctgatgggtgtgagatggcatctcattgtagttttgatttgcatttctctaatgatcagtggtgttgaggattttttcatgtttgttggctatttgtatgtcttcttttgagaagtgtgtgttcatgtcctttgctcattttttaattg

SEQ ID NO: 914472 - DNA, 4001 bp, Homo sapiens
cagcctgttcattattcccttcttaagatatatgttctagtcactcaaaactatgtcacagtggataaaagtgccatgaattcaaactttgagcttcttatacatcttgtccttttatttgggatgctttctgcctcttctgcccgttcacttggctggctctcccatatgtatatgtgtgtgtgtgtgtgtgtgtgtgtgtgtgtgtgtgtatatatatttttttttttttttttttttgccaacaggaagcttagagccagcctccctaatttttttgactttgtagctcatttcctcaagaggccaactttaattctcaaggaggctgggctgggctagaggtgttccacttgtgttcccactatcttttccctgtcaaggctcttccactttgtgctgcaatcccctgcttttctgtctcgcccattaaactttgagctctgtgaagtaggaattgtgtcggttttgttcaacttacattcccactgcctagcacaatctctggttcaataaatattggctgaatgacagaatccaagtgtgagtgtgtaacaactcggctgagaaagcatagattatttcgtggggtaaataaatacttggattacaatttattccaactttccctttttgagtttagaaaaatttccttctgcttaacattgctccttcacctagaatcccactccttccttttctgcctactcaacttcaagacccagctctaaggttctagcctctgtgaagttcttttggtgcccacagtttagaccctttcatgggacttccattgtgtctgtgatttttccatttgcttggtttctctctgcacttggctatgggccatgagggtccagactgggtctagtttgccctgtgcccccagcacctagcctagggctggagagagagcttggaagatagctggagacattacttgcagacaaagagagagggcacagagcctcgaaagctccaactagggaggcagaggggtttgagaaggagtgaaatggaggcaggcagctctaaggagcatcccctagtgtccagcctaattcagatttgaggatcttttttgggatggctgggggctggggtgtcagatgtgatcacaacttcagcttcgcattcaagctttccagagtgctccctccctcaaccagcccccttcttttcccagtcctgccttcctttcttccttcccttctctgttgtggctctgtgaactggatgtaagagggaaaaggagatctgcagggttggcaagaggaggtcctcgccttctgactggtgtctaggaggggctgcgtgttggggaaggggctgtgctttggggtgagcaggggctctaggtgtattcaggggaccaggatgtgaaggagttccgaccaggtggtgtgaagctgtgatgaagttgtaggctgtgggggtgaaggtgtgaggggagctgtttgggggctgagggagtactatgagaggcacggtgtggacgtttgagaaggtagtgtggagctcgttggggggactctattagtgttctggggtacagtgagaaatagcttgtggggggggctgagggaggcacccacctcgtgtcccggctccgcgaatgcgagggggctcgcagctgaggttgcccacactgctgctgttgaggagaggcgcccccgggcggcacagggaagcccccggcccgggtccggttccctgcacgctccggttcagctttagcagctccatggcccccgccgagcccgccgccttactcagctcgacccggcgggctcccaacgcggctccacctgctcacgctgcgattccggctcaggctcccgccgccctcctctccctgccccctgccccgcctggtccccgcccccagcccaggcgcctgccctccactctcccgcggctcgccccgcctgggttcccgtccctccgccagcctctgtcccgccaggtgactgtgcaccccctccctggctcgggagttctgcccctccctgtgcgactgtcctccaggctcgccccctccctagatgtgtcccgtctcctcttagagatttctctcctgcccacctctctttatcacccgcccccacccccgattcccaggaatgagagagagagagagagagagagagagagagagagagagagagagagattgaagacaagagtattggcagcgtagggggaggtttcggggaagggagggtaggaggggttgggtagagacggctgccacggatccagcatctttctctggtgtatcagggaacgtggaggtggcgttggagaccaggtctgcgtgcgtcacctgctgaggcgcggatgctttagtctgagcctagagccgcatttaccgtactgtgttgcagtggccgcagtgaccgtgacactattgctaccgtagttccctgcagctcctcgctgcgggcctggggtagctcctgcatctgtctccgcaccctccatctcctgtctgaggcttaacactcaggcttgcacttaagggtcccaaggagccctccacagctgggcgggagtgggggtggggccggggccgagatttggctccagggaagccttgccagggaaaagggctcccgggaggaagcttctgacttgagtgttgagggcagttgggggtggtggcaagcactgacaaggataaaccagagtaaggtgaggatgggatataattctaacgccggcccagcgcaggcaaaagagaaggagaaggttggctttctccaccgtctccaggcagcgcccacgcccacccgacacgctaacgctccctgtttgctctcagtgcaggcagagctgcctgtgtagggtgtcaggttcccacgagagggggctagaaggggactgggtcactgcggtgcagcgggaacagggctgaagggtgcaggactgaactgggttcagcttctcggggcaggatttgcctcttctactatttcagccctgctccctatgcattctcctatccattccttttcttccccagattcctatctccagattcctatctccagattcctatccattcttcagattccggatgaactccaatacgatgtgaaattcttctgacccccagcagtagctgtaagaggttgggggcgggcatcagtggaagagcaaattagagaatggagtctggctttatgggggattcagcaggcccttatccaattaatcttttggagaggacctggttcagccagccctgagtttataggggctgaagcattgaaagagagttgaaagacagtttatgcctgagatgtcatcaactgctccccctttccttcctcctggtactgcctgtcttgcccatcagagagcctggaccagaggagcttgatttgctatttgttccgctccagcacaggtggggcctcagataacctgctcaagttttcccacattggatgacagtacgatgaggagggaagggagcaaaggatgtaagggagaggggagtgaaaatagaaatagatggacattcacttatttagcaaactatgccagttctaggggtatgcactagttgtccaatatagtttgcccctcagtagcacctactctagtgggattttcccaagcaagccaatgattgtaatatatggtcgttaagtgcacccaccaggatgtacaaatcagaaatttaggaattattattgatgccttactcccctatgctccttcacccctgcgctggatgctgtgatgcaaagcccagaaccctcttcaaaaatggaggatttattttccagctgtggagagtgctcctaaaagatggccctcagctgtcataacccttcaggagttgcctaagcagaagaaagccagctcatccaaggttatgctccctttcttgggcattctatatccaatgaccgatcagcacagaggtataaaagtttaatcccctcaacccagtggtggacaactctgaaagatgctcacacccctagaac

SEQ ID NO: 914473 - DNA, 4001 bp, Homo sapiens
cagcgacaggaagcggtccaggtagttcatggccagcgggaagacctcctcctcgcacttctgttcctcgcagacctacggaggcacggggcccgtgaccgccgccgccaggtcgcgccgcccccccgcacgcccccgcaccccccatcgcgcttggcagggccgccaggtctggagggcgccgaggggtcggggctgggggcggcaggagcttcccgtgatgcgccccctcccccgcgcgtccccagtacccaccctccccgaaactgaaagggaaagtccccgcgaggctggcacggtgggggcgggagcgggcacagctgggcggcgtgcgcggcggcgcgggctgccggcccccgggaccctggcccgccctggagctccgtggtccctctgactgggggtcgacaccaactggggtgcggggccgcggaacgggccgcggggttgggcgccgcgcctgcgagacacaaaggtggcgtcccaggccgccgcgccgcatttccccagacgtcatcttttcaaaaaatatttaaaaatattaaaaaaataactaagtgcataaaaaaaccctgaaaatgaccctcgggcgaccctttacccaggccgggggttgggagttcgttacaggctccggggggagccccaggaattcaaactccggggcccccccttccccctgggcgcgggcggcgtttccctctcgcaagggcaccacgccgcactttcaaaaattattttaaaatacttgcgggcccctcaggcgcccaccgaaggtctgaaaatgtgctcccaggcccccggctcgctcggagaaggtcctccaagccgatatccctgcagacggggatcaagccctggcgtcttgggggccacgcgaccttgcagctcgccgtgctctccggcccaggctgcccgttcggggcgccccgggactcgctgcttgaacaaaggcccccccttccctagcggcgtccccccaaaactacccatgccgcgtccctgcgcccctcccgcgggctcccggcagccgcgcggcccttagctgcggccccagcgcccggcggccgctccccgcccccaccctgcccccaattattaataaacacttttgctttgcaataaaagagcaaagatggcgcataatactggcacgagcggcccttgcatacgtgtccatggatattaatttaaaaatcaaatctatgccccctccccccggagttggcggctcccggccgctgaggcgcagccgggctggggcgcaggcgggggacacaaagcgcacccagcctgccagcccgcaccctcgggcccattggggtgcccctggcactggcttctcccgaaggcacccctcccggacccccttctcccctcccacgaaacgctacttctagcacccccacccccaccccttcctccttcagaaaatacccgcaatttttattttgaaaatacggatccctagaaacaccacggcaaacttcaaagttctagcgggagagaagggaggggggtgagtagcaaagaaacgtgggtctgggcaacaagttgcagggaagtcttaagagagccgcccgaagccccgcacctccagcatccaggtggcgacgatcttccgcatggacggcaggacctccttctgcacacatttgaagtaggacaccgagggcgcgcaggtctcctccgccttcagcatggcccgcagcacccggtcgttgaggaggttggcatcggggtacgcgcggcggatggtttccacttcgcagcacaggagctggtgttccatggctggggctcttcctgggcagctggggagggctgtgggtcctggctgggtccgcgctcggctctcgcttctgctgccccgcgctccctcgcgctcttctgcccctcgccggagcgtgcggactctgctgctcgctgctactgcgccgacagccctctggaggctccaggactttgcaacttcaacaaaactcccctgtagtccgtgtgacgttactgttgttaagcaaagatcaaagcccggcagagaatgggagcgggaggggggcgggggcgggcgcagggggagggggcgcgggcgccaaacgccgggagcagcgaggggcagagcccaaaagccatccctgaggcgccgcgcctgccctgcggcggagttgcccctgtagtccggttttcatagaaatgcaaatcgccccgctgcagcctttctccccgccagggaagaggggtgcagggggccccgtccgcctcgagtgggtcccccgggatttagggggtgaggtggaggtggctctgcagtaggggacaactaggaaggccggcaggccacacgcagcctggggagaccacgagaaggggtgactggggcgcggcgacaccccatatccaagccggcagaatgggcgcatttccaagaacgccacgagggcacccacgggcggacagacggccaaagaatctcagcgactgcatcttctttcattttcattaacacgtgtaaattgcaagaactaatttagcatgcaaggacggggaggaccgggcacacaacccctgtgcaagtttcattccggcgcacaggggcgtcgttgcaaatgcccaagggggtaaccctaaaagttaaagggatttcagcttagcatgcgctcgctcaaaaaataaaataaaataaatgcccgaaaattccagcagcagcccaagatggtggccagcatttccttcatcttgtccttctagcctggagactcttcgggctgccttcctaccttgaccagtcggtccttgcgggggtccccaactgcaccccctcccttcccgtgccggcaatttaaccgggagaaacacacctctgaatggaaagctgagaaacagtgatctccattctgactcattttttttaattaaaaaagaaattaaattgctggaaatattagtcccctctgcctgggacaagaccaccgaaggttcctaattggttttgttgggggtgtagacgtcccttcacctttagaatttgccctgggactgaattcgtgagcgtgagggggctggcaggagccggcataattcagaacaattatcaattaaacaaacgagtgtactgatctgatttttagcaaaatcgataggtgttcgtggttacatgagagggtccccaatattatcgcaaacttaagcagatgtaaattaaaatacacagtttttaaaattacaggttctgtctctttggtgcattaaaaaataaaaggacattttactgtcttaacttttgtttttatttttacagtacctgccccaaattaagaaaactgttcatttacttccttttgaatatagttcagtgtcatcaaaccaccgtaccctcttaacagtaaaagctcaaagaaaactgatagaaaaagccctctccccttcgccagggtgctcacagcaagatgcgaccccccccacccccacctttcagggtgaattcctcccgcgccccctcccccgccgggaattaggattactaatattccgggtcctgggggggtaattacccccggattccgcatggggagcgatgggttgccccagcagggagcacctacggtcgtgcccccccccactccccgagcacccacaatcgcgttggcccccgcatagccaagcctcagagcatcagcccgcgcacaagggcggcccagctgctttttcattcataaaatcccgacccggcggccgcctggatgatttatggggcccggagctatcacccggcctctcccatcccgtggggcgaggggccccgagccccgcgtgcgccctggcccagcccgaggcgcgaagcgggccgaagtcggctaggggcagcagggcataaagaggctcgcccactccggcacaaccggctctgggtccaggagggagcttcacccccccatcccgggcgcaagacagaggaaactggaattagcatgagccaatgggggcgcggcgctgttactagg

SEQ ID NO: 914474 - DNA, 4001 bp, Homo sapiens
ttacatgccaaagacttttctaaatgctttttttgtattaactcggttactcttcaggacaatcctccagattagcttctattatcatcccccatttaacacagaagaaacagagacacaaaaagtaacatgcatgaagtcttagtgccattaagtggcaaagagggggtttgaactctagagctcatacccctaatcactttacagagtccaccactaccagggtcccagcttcagaagccatcttatctcattccctctcaccattgctctttccacgaagcattctgcgaatgccatccaggcaacgcttgcatgctcatttccacctgagtgcaggggatgtgcctgatacccatgtgaactcttctccctaaaaagccccagtgtctggtccatacctgccgaatgactgggtgaacttgttttttttttttttttttttgagagagggtctcactctgtcacccagcctggagtgcagtggagcgatccaactcactgcagcctccacctcctggactcaagcaatcctcctgctttggcctccccagtagctgggactacaggagtgcaccatgacgcccagctaatttttgtatattttatagaggagggttttcgccatgttgctcaggctgctctcaaactcatggacttgagcaatctacctactttggtgtcccaaagtgctgggattacaggcgtgagccactgagcctggcctggataaacacttaacagaatcaaaggaagccagttcccagagccatgctggtggctctacctttccagatctttctcattgtgccaggtcacctccagaccagctggccttttatttattattattatttttttgagacggagtctcactctgttgcccaggctagagtgcagtggcgcgatctcggctaactgcaagctccgcctcccgggttcacgccattctcctgcctctgcctcccaagtagctgggactacaggcgcccaccaccacgcccggctaattttttgtattttttagtagagacaggatttaactgtgttagccaggatggtctcgatctcctgacctggtgatccacccacctcggcctcccaaagtgctgggattacaggcatgagccaccacacccagtggtatagaaagctacccaggatggtatagggcctgagctgctgtttgctttgtcaagattatgttgtttcccaagcaaaaactgcctgttttcccaggaactccctcagcctagctcctcagtctctggggcacctgaggttcaggacaacaagacaggcagttagaatctgtcagggcaagctggacagctgtactctaggctctgcctccaggtctgtgtgtaactctgagaacatgcctttcactctctggggttcactttctgcatctgtaaaatgggagtagggttcgcctaatagattcgcctggtccctcccagaggcttctggactgtctgcagaaaagtttaccctgttcttacctgccaccccttgcagggatttgcgcaccgcgtccacacagctctgacaggtcatctgcaccgcgaactccaactgcaagggcggcagggaccaaccgatgatcgctggggaagtgccttggtatgactttgtttcaccacctaccctatgaccaccgcaagggtctgggaacaagccccacttaacccctcttcaagcaccttcttcatgatctctcatgaccattccaggaccatgggagtcaccccccaacactcacgcagggcccctgctaccctcgcaccctagtttcatcccatggccccaggccccaacccaagtgcccactccttctcctcttcccaaggtaacgatcatcccaggggccgaggctctctgcccggcgaggctccacacgaagcctcgaccctcaccgtgcagagggtcccctggttccccgaatccgaagccattctggacccagtcaccaccccgagacgcagaactcctccggcgcaggagcaccaaccagcgcggcgtcgcggggactgagcctctaaagccacccttaactcctcctcctagtgcgtgcgcacgcaaggccctgcttcgtcagccaccgggtggcggccgcgcaggcgcactcgggccgtcgggctcctggttgccttagtaacccctcggctttctgttcctggacggtggcggccgccggctctatgatggagcccccgaagcccgagcctgagctccagcggttttaccaccggctgctgcgtccgctgtcgctcttccccactaggacgacgtccccagagcctcagaagcgccccccgcaggagggccggattctgcagtccttccctctggcgaagctgacggtggcgtcgctgtgcagccaggtggccaagctgctggccggcagcgggatagcagcgggagtgcctcctgaggcccgactacgtctcatcaaggtcatcctggacgagctgaagtgcagctggcgggagccgcccgccgaacttagtctgagccacaaaaacaaccagaagctgcggaagcggctcgaggcctacgtgctgctgagcagcgagcagctcttcttgcgctacctgcacctgctggtgaccatgtcgactcccaggggggtcttcactgaatcagccaccctcacccggttggccgccagcctcgccagggactgcacactcttccttactagtcccaacgtctaccgtggcctgcttgccgacttccaggccctgctgagggcagagcaggcctctggggatgtggacaagctgcaccctgtctgccccgctgggacgttcaagctgtgccctatcccctggcctcacagcactggcttcgcccaagtgcagtgctctaacctcaacctgaactacctcatccaactcagccgtccaccagagtttctcaatgagccaggaaggatggatccagtgaaggaattgaagtccatccctcggttgaagaggaaaaagcctttccactggctgccctccataggaaagaagagagaaatcgacatcagttcctcacagatggtgtcgctgcccagctatcctgtggcccccaccagcagggcttccccctcgcctttctgccctgagctccggagaggccaatccatgccctccctgcgtgagggctggaggctggcagatgagttgggccttcctccactcccatctcgccccttaaccccgctggtcttggctacagagagcaaaccagagctgactgggctcatcgtggctgaggatctgaagcagttgataaagaagatgaagttggaggggactcgctacccaccactggactcaggcctgcctcctctcctgggggttgtgacccgtcacccagctgcagggcatcgcctggaggagctggagaagatgttgaggaacctccaggaggaagaagcctctgggcagtgggacccccagccccccaaatcctttccacttcacccacagccagtgaccattactttgaagcttagaaatgaggtcgtggtccaggcggctgccgtacgggtctctgatagaaacttcttagactctttccacattgagggggccggagccctgtataaccatctggctggtgaactggatcccaaagccattgaaaaaatggatattgataactttgttggcagtactaccagggaggtctacaaggagttgatgagccatgtctcttctgaccacttacattttgatcaagggcccctagttgagcctgcagcagataaagactggtcgaccttcctgtcctcagcctttctacgtcaagaaaaacagcctcaaatcatcaaccctgagctggttggactttactcccagagagcaaacactttacagtccaatactaagaagatgccctccctcccatcactccaagctaccaaaagctgggagaagtggtcaaacaaggcctccttgatgaactcatggaaaaccaccttgtctgtggatgactacttcaag

SEQ ID NO: 914475 - DNA, 4001 bp, Homo sapiens
gccccttcctaagctctccaggcctgtttacggtctgttaaagggcagcccttccttcatcctggccggggtggggagaatggagcgtggaggcaggtggagcctggcagactgggagggtttttcctggacaggcgacccacaccaacctgagggggcagcacagacaggctatgcccctccccagatgccccgtgcccgcccgacctgcagcagtgggcaagctgtgagcatggggaagccagggagggcgtggggtgcagacagcagctgagcgccctgggccacgtttccagacagcacagccaggtctggactttcgccgccccgcctgctctgccccaccctggccagcactcaccagccgggctggaaacgactcctctgcaggacaggtggacagaagctccccaggactctaggctagaggggcaaggacatgtcaggtcacaggttacaggtctggcccaagggccagagtgggccgggttcattctggaggcagagagaggagtggccaagcccggtattttagtctgggctagggtggggcaaggcacaagacattttgtttttttctttttttctttttttgagatggagtttcgctctgtcacccaggctggagtgcaatggcacgatctcagctcactgcaacctccgcctcctgagttcaagcaattctcctgcctcagcctcctgagtcactgggattacaggcacccaccaccacgcccagctaatgtttgtatttttagtacagacagagtttcaccatgtggaccaggctggtctcgaactcctgaccttagatgttccacccgccttggcctcccaaggcagacgacatttcgggacagtctgatcctgggagggacctcataccttcccccaggtgccccactcttggccttcgctccagacccatcactggcccttcccccacaaacagcggcagctacagcctgggaaagaggcatcatggaatggagctggagggggacagaccttaccactgagctgagaggggatattcaccctccatgaaggagccagggcctaaatacacgcaggaagggtggcacaggcagaccctgccaccagcggggggatgtgtctgccaccggggggcggggtgtgcgtctgccaccgatggggggatgtgtgagcccctcaaggacctgcccctggcctggctgtaaggtcccaggctttctggagaagttggttctgggcacagatgcgtcctccaccgcgaggacacaggcgacccgctgaggagtggcccctcttcccaggaatgcctggtccctctggaccccctgggaaagggccttccagaaatagttgtctgttcctccccaagtccccgggacctgcaccaggcccctgggcggcccgcgccctatcagggggagccccagtcagggggacctgggactccgcgcctgccaagcgtccccggggcactgcaatgaggtcaccgccgccgccgaccccgcccggcgcggccaatggcgcgcccacttgcacgcgggcgggggctgctgcgggcggagggaagactgccgtgtccagggacaatgagcagggtgtccaggctgcgcgtcccgggacccctgggctgaagggggccgtcaggccggtccaagggcccgggaggcgcctctccttcccgctgcgcctccccaacccgcccggagtccgcctcccgcggaagggcaggcgagggagctggggcaggcgagggagctgggccaggcggtgggtgcggcctcccggaacctcccggcgcctgcggctgggcctccggggctggggcgcgcagggccttcggccccctcgcgcccctcgcccccctcgcgcccctcgcccccctcgccccgctcgccccgctcggccgagctgtcgtggccgcgcactcacctaccacgcgtccgagtccgggccctggcggcggcggcagcagctgcgggggcggcggctcccagcgctgagaatgcgcggcccggagcctacgagggggacgccccgccccgccccgccccggccccgccccggcctcaagcccctcccgcggcggcgggcgctcggcaggtctgaacccgcgtgggtgtaggcgctgggggtcgacctggcactgcggaggccgggcgagctgcagccctgggggcgccaatagcccagcaagggcccatcccgtccaaggacggaggagctgggcgggaggcgggcccggaggtaagacggcgaccagcctagccagaggccctgggctgtggcgacccggccctcctccatgcccaacccccatctctttctcctcacccaggaaccgcccagaggctgcaggggtcggcagaaccgatgccggcctggggcgtgggagggcctagcgctgtgggcaaatgcgggagaagggctactgtacgtgcagtgtggacagcctggagacccgggcaggcctggggtcccagcgagacatacccatggggtcctggggggcccatgccctccagactggaagggaccactgggagcggtgcgaggaggtgagggacgaagggcagggccggcctagggctgcaccaagacgccaagagtgggagtgaggaaggagggggctgcccacccaccaagctcattcatcacagccacaggggaggaccagcatgggagggggtggccgactgaggccgggaacctgcccggcctccctggcgagacagtggggagccctgatccacacactggcgagggccccgaggggctccagccttgatgggtagtgtgagtttggggcatgaccagggacacaagaggacacgcaggacctcagccccatcgccacaggcccgcgctccctgtattcacccacacagcacgcgtgcacaggtgcccacctcatccatgtggcacacacaggctgtggctcccagacacacggaaggcccaggaggacgcagtgcagtcagtgggttttatttgacgagggggttttctgctgaactgagatggggttgattgaacggggacagagcgaagactggcagagggcacacacgggaccctggccactcccgggaccctgaccactcctaggctaggtccttcatgtcttcagtcaggcgagcctggggcccactggggagagcctgcatcctgagtgggcacccccgacccatgacaagcctcctgcaagggcagcttctagctcatggtccgtgagtcactcggggctggtcaccgggcactgggaaggtggccagagccgcgtctggggggccgagcccagcaacagcagcagcagcaggtgggcccaggcaggcgggctgttgtcagagccttcctgcagctgctgcccgcccgcctggcctcgcaggcgtccctgtcatcccgcagccgtgtattcagctccctagggaaggaggagtccgacactgagagggtctgagggagctcaaggtggggggaggtgagctccgactcccctcagagcgaagagaggtgtctggctgaggctgcagcgtgaggggtgaaaggcaggcataaggaaggacttccaatggagtagagcggcagccaagaatgttggggagctgggagcccccaagctccgctgagcccattccctctcgggcctgagcctgaccgtacctgagcagctccagttgccgtagcaggctgactttctctttctgcatgttcctggagacggcgaccacgtctctgtggatgggaggtggtgacccggctgcaggaaggctccttggggagcccccggaccccctagaagatcctccttcccacggggcgggcctgggacttgagatggggatgaaagtggcccagacctgagcgcccgtcggccccgcccccgggacacgcaccggggcccgcccagccccgtcccacggcaccgttgggtttgctcctggcggcctcgtgcttcgctctccagcctgcggatctgctcctgcgccccctccagctgcgttcgc

SEQ ID NO: 914476 - DNA, 4001 bp, Homo sapiens
tgagggcagccacagggccaacttgggactggggccatcttcccttgggatttggggggctttggaatggggatgtgtagggctgatgggtgaggtctggttagtggggctctgagagggcaggagggtggggagggctgcgggctgggtggcagcaggcacagagatttgatgggcaggagacacaggggacctggaggtggtggtcagagagggctgggcagttgggataatgggaagctgggtggcctgggttctgaggacaagggcatctggggcttgagggggtagctgggcaccgagggtggtgaccagaggggcatggttaggtgggattccaggcaaatgagtggtggtctgggtgccagcgacccgggtgtctggaaacatgggggactggtgggcagggaagagctccggatatttggttgagatcatagggggctggtgggcaggaggctgtgctgaatgagagacagagagaataccgggttggtaggcagaaggcagatctggatagttggctgcgatcacggggatctggtggtcacgggacaaagctgggtgtgtggcagggatcacaggaggctggtgggcagaaggcagtgtgggatgcgtggcagagaccaccacaggccgggtgacggagagcactgaggagtggtaggggaccctgggggcactgagcgggggtggccaggtgggctccgggtagggtatctgtggctctctgtcctctgggaagctcggtctataggccagggcaaagtcaggcggctgcgtaggctccatccacaggatcccaggcatctccgtccagccaccgttgaaggccttccaggcctcgtcttcatcttcctcatcctccccgtcatccagcaactcatctccgaggtcctgggaagcctgggcacccatggcccctgcagggctgcagctgatgccatcagcctccagctcatgtccctcgctacaataacactcgaagccaccaacgtagttgacacacatctgctggcacacaccggcaatctggcactcatctgtgtccacacagcggtgcggatcatcctccgctggccggaaacccaggcgacagtggcagctgtagccttgtggcccaccgggctcacactgctgctcgcacggagcctgggcacaggggtcctcgcaactgcgcccgtctgctgccagccggaagccctcagtgcagcggcaggacacgtgaccatccacctcctccacacattcgtgttcgcagcccccgttgtcagggctgcagccagtccccaggcacaggggcccagcccgtgaccagcccacacctccctcaggctgcttcacgcagagcagagaggctcccctgccagcctggcactgcacagcggccacagagccgaagggcagccactcaaactctgtggagaccaggtggaagggcgtggtatacacggctgggccggcctggcccgcctcatcttgcagcgccgggcaggcgccctcgaagccaaactggcacaggtagccgtcgacagccagcgtgcacgagccctccagccagcggtgctcgccacttgcctccagggccacacagcgctgggccgggcaggggcctccagaggctggctgggcccagttggtgaaagccgtgtcctggtcccctgtggtccacgtgaagccgcgcagtgggcgctgcagctggcattgccgggcctgccgctgcagcccgatccacagcagccggctggctgggcccgcacccaccaggctgtccacacgctgggcctcctcgggggtccgaggagtggccaggtcgccccccagctcgcggcaggcccgccaggcctccaggaaggtgcggcgccgtgggaagagagcgtagcagctgctggggccgcaggcggcacggggctcagcagcccaggggtcctggcccagtgtgggccctgcggccgcccaggccagcaacaggcgcagcagcatcgcgatgcccccggactggtccggccccgggctggcggcagctcttgacagggggagggcctggggcctcctgcgggcgggccgggggcgggcctggggccgggctcaggccttgtaaggagtgggctggggcggctgccagctccctgctccctcttccccgggggccgctagagcaggaagcagtggggtggggggctctaaggttgggggcggaggaggggagaaggcgcagttgacggctgccccaggccccatggggctgagagtcagggggtgggaaaagcctgcctgccgagctctgtgaccctcaagttggggctcggggctgtggggtgaggtcgcttcccagagactcagagacccaaatctggacacagcagccccatcacacccgggagcagtctcagcccagctgctcgccatgcacgggaacaccctcatgcccactcctttcttgccccacagacgcgcgcatgcgcctcccccacccccaaccccatgcaagagtgcactctctgccaagctgtttgtcccttcacctcaccgtggacctatgctggcttgcagatgactcccttgccacacgtacacacattctgacatgctgagaccctaggtgcacatacaaaaatggtgtggcattctacatggcctgacatatgaagacctccgattcggcctgaatggaaacagcttggtcacccaggcacaggcatcctcagcctctcatttatttactgagcccctgcgtcagcctctccccctatactcaagctttctggttccagctgggccagcgtgtgggggtgttgggggagtgagggggccaggggctgccctcccctcaccccagctcagcctggggccctgggaacctgggcttagagggggaggaggcagcccctaaacaggaaatgcctctctgggctcctgcgtcaggaaggcagggtgcgtggtttagggggctgggtgggggctgggctgcacgcaggatgtggaaggctgtgaggggacccatgcaaggccatgtatgggcatggggcacacagtgacatatatgtgtatatgtgacacaggcatcacgtgtgtggagccctccctgcccccggggcctgctgtttcggcctggccagggtcctcttcccgcccttcctggaggcctctggaggcatgtgcactgagcccatcatccaggatggcctctggggagctggctggcggattaacccatgcacacccgctgcactcttagcagaagttagaaacagtgtggggaggtgggggagaggttccgcccttcagtaaactgccctgatgcagcttccccctctgccacagatggatcgactttgtgactgcaggggagtcactggccctctctgggtctccttttttctcagttgcaacatgagggcaatgagtccaggatttttagctcagcagggctgagatattgcgtcacagcgctcagtgtttgcaaatgtgctttgtcagctgtggagcctgaagcaaatgttcctgtcttctgagcatatgtggtgggtggagaccagggtgcgtttttgcaaaccaccttacagtgcctaggctggccctgcagacccagccagcccctcgagaaccagggcttaggaagttcttgccatatgcctggaagttccttcttacaaggtctatacatgtgaagcacacagaatgactccccttctcaggagacaaaagtcaagatggaggagttcatccttctgttggctcaggccccaaaccttgaggtcatgcttgactcctctctttctcccacagcccacatccagtctctcagcaaatcctgttggcttcactttcaaaagagatccagaatctgaccactcctggacaccttctttgccacccacccccggcccaggtggctagcaacgccaatctagatttccccaacagcctctcccgtggtgtctctcttgccctctccatcctgccagagggatcctttcaaaatccaagtcagatctgat

SEQ ID NO: 914477 - DNA, 4001 bp, Homo sapiens
ccttcagaaagttccccaccaactgcaggggtcaagggggacatgaggatgccattcaagcagaggacaggtcttggggccttggtgcaaaagaggacccctcagagcaggattgacccaagcaccttcctggaaatgaatccagaccactgatgaggagtagggggagcacggaccactgaagcacctggaagatgtggaaagacagaagaacattcctcgattggaaatgtctgcattttttcttcaaggaaacatctaattccacttcccagccatctacaacactcccacttcagcttcttatcctcatccttcctcattgcccctgctccattgacaaccaagaaagcggggctctcaacactgaagcctttcccagggccagggatggctgtgggtggagaccagctggtttaccagcccctgaattatcagccaagtggtccagaacgggaccagggcaaatcccatgtacagttttccacccttggttagaaggaggagaacaggaaaaaaattttattgaatccatccctagagctcctcacaagtcaagtcttgtgggagacttttagggctggaggtgagtgcagcaacattccagatgcagtgagttcctctgacagcctgagcacatctccacaggccacagaggcactacagtctatgcctccaaacacagggaaaagtggaggctacattcattcatcctgggcttcacactaagtcccaaatttggatacaagagcatcttctagaaaaccctgaaacagctgttgctcacacttctgaagcaggttggaagtatatgcatgtatcctcagggagacacatgcacatcaaatgcttcacgtcctacagtcgcgtcctcttcagggatctgtctccagtggaaatcctgagtgccctagtgcagccaactattaggtgaccattggacccagtttgcttagtgttgaaggggttcctcggacatgggactttccattttaaaactgaaattggcaaactgagatgagttaaaatcctaccatgtaacaacccctcaaatcttccctccgtcctgctcaacctaaagttaacttctcttaaagcattcacataagtgctaggacatgcctccagggatgacataatcatggccaaacaaacaagagtcctgattccagaggccatcaggcctaaaaggagtagtgcaggaagctgtgctcccatggccagtcccagattcaggtacatacgtactgagctattttctgcagatctctggcctaaggccttctgagagacattctaggcccacatgcacccatggctggagtcagtcaaagccaagagcctgtttcccagactctatgctacatcctgcccctgccctcctgacacccctggggtgcctggtgaactgaagctagcaccgagaagcacttttttttttttttgagataaggtctcacaggttgcctaggttggagggcagtggcatgatcacagctcactgaagccttgaaatcccgggctcaagtgaccctcctgcctcagcctctcaaatagctgggactacagttgtgcaccaccatgcctggctaattcttttgttttttgtaaagatagagtctcatcatgttgctcagactggtctcaaactcctggcctcaaaggatcctcccacttcggcctcccaaagctctgggattactggtgtgagccaccgtgcctggcaagaaacactttcaagtgggcctcactcccatcagtaatgtccctctcaggtcccttcccccacccacctggagtagccttaccttgcgagagaagggtagccagtaccaggccagagagaaacgtgctatgttccatctcccagcggaactcatccagtagataaagccaggtcaccgaactatcagcctgggtgagagctgccctcccctagctgactcacaggtaccggaaagaggagagtgggggaggaactagaagatgtctgcttctctgctttctgccgttgatggtgggaaattttcagagtgggggtgggctaggggtagggtaggaaggaagcggtgtaaattgctctatctctgagcagggagctggcagagaatatggaaaaggtggcctgaactttagcgtccctattgacaatgcaaccacatttacacacaacctaaacactgccacatctcgaagccccttgagagaagccgtcggccccatagcgcaagccgtagcagctagatttctcatggaggctgatctttctcaggacccttcactaggcagccagggacaccagatctagcagcttcttgtcagtgggaggttgggctttagagaccccagccagagatttgaatcctgggtccaatactgcctacctgtggggcctgggccagccataaaatttttcagagtcttattccattagtaccattattaggattcaaacaagatatttgcatggtgcctcacgcatcatatgtgctcattaaggggtagttattaataataatataattgactgacaggcaatattgagcctcccggtgagacaaatggacctttttcccctgtggcctacgaggatctgaaactcttcacgctgctgcagttagactgtcacttacctggggacagagtcatgcctgtcttgctcactgctgtatcttgtgcctggcacataacgggagctctgcacatttttgttggctcactgactgactggctgagggagataggggcctgagatcctggacattcagtccgggctctggcccctgaaaatgtgctggcctgtcctcggaattgttccacctattgccttccaggcgcctctttcatgatctcaaaagaatagtgaaaccaggtgccgtgtctcacgcctgtaatcccaacactttgggaggctgaggcaggtggatcacaaggtcaggagttcgagaccagcctgaccaacaaggtgaaaccccgtctctactaaaaatacaaaaattagccgggcttgctggcacgcacctgtaatctcagctactcaggaggctgaggcaggagaatcgcttgaaccccggaggtggaggttgcagtgagctgagatagcgccactgcactccagcctgggcaacaaagtgagactctgtctcaaaaaagaaaaagaaaaaaaaagtgaaaaaaattcctgaatgaaggcctggactgaggtggctttccatttggaggtccagccccaagcatctgagagtccctcctaaattcattacctacagcaacaacaactagcaacaagtaacaactggctacgatcctaacaactaatgacagggacatttatctccctcatgaagaaacggtcccaggaccatctcccacccagcatccattgcggttccctgtgcaagatgagtctctgagtgggaatccagcactctctccctcttcttccccaccaccttcaccctccttaacggaaaaacaaaaggcatctgcacctgcagccctgctgaggcccctgctgctcacacttgcagcagagggtggaggctctgggttcttgccttctctcaaaggccccagccccaacagtgatgggtggagccagtctagctgctgcacaggctggctggctggctggctgctaagggctgctccacgcttttgccggaggacagagactgacatggaacaggggaagggcctggctgtcctcatcctggctatcattcttcttcaaggtaagggcctactaggggtctggaagcctggggaagggctcaagggaagagcccatcactagtgagacaggaatattggtatccctaaccttcagcctacctctgctgtcaccttagagttcaaagaagggcaaaatggaggctcttaactgttctctgctagagagaaacagtgtcccatggaggagaaggaatccttgtctctgaaaaatgcaaacagagtacttaaatggctgaagagaggaccctgttaccgccatcttagat

SEQ ID NO: 914478 - DNA, 4001 bp, Homo sapiens
cattcctatgatgccagatgtctagaggtgattgggtctttgatactgtctcttttatttatttatttatttatttatttatttatttatttatctattttgagacactccaggctggagtgcagtggcttgatcatggcttactgcagcctcgacctcctgggctcaagtgatccttccacctcagcctcccaagtagctggaactataggtgtgtgccaccttgcctggctaatttttaattttttgtagaaatggggtttcactactttgcccaggctggtcttgaactcctgagctcaagtgatcttcccactttggtcccccaaaatgctgggcttacaggcgtaagccactgcacctggcccttctcctcctcctccttcttcttttttttaaggaaaagcatactttataacacaggtctctaagaaaatgcctggccactccttacaggagtcacatcctgcccctcgctactcaatatgttcctaggaccagcagcagattaataaacttgagagcgtactagacatgcggaatctccatttccagtctgggtcttttgaaacagaagctgcatttttaacaagatccccaggtgatttgtgtgcacattcaagacgtgagaaacccaagatgaagcaggaagtggagacatcgttgctgtgggtctgagacgggagcaccagctgtgatagtgttttctaggtctttgaaataaaaccatcacgagccattttgcctcatgtggtgcagccatttagagtacaaacagtcctggtctcacagattggcttcggcacttactatgtggtttaaaacaagttatttaacttttttgagtatcaatttcttaatctgtgaagtagagaggacttatcagtttatatagtcaaaattaaaaagaattttaaaaagaggatataacaccttccttcctaggcagaagtaggattaaaccagttaacacgtctaaataattttttctttacacagtatctgacaataaatggcaactttttttggtattatttatctcatatgagatacagaaatgctcttggttatttatcaattcataatccatcttgcttcaaaaaaatgaaataaactgaaagttgttggtcacttgaaaaggactaaaaattacgaggcgttttatggtctcaaagatagtgaattgctatatatgccctgtgcagagtttggacgcaagtatctggtctcttcaaaacaaggagtggagcttcgctcttccagtctcttttgggttagttctggagggctgggtaagttggaatgagctcgtacttagaggtagcgagacctctctgctcacaatagctatgatcaccccaactgctcttctttgcctgctccccgaacgctctcccaggcacccgtggcctatctttttctttagtccccagctctaatccctcaccctaacatagcacaaacagttccttacatctggtaaatgaggctccttggtgccactaggcagtgccaggtaaggctgtaagccttccagcggtctggagacacaccaccctttccactccatcctactcacctgataagaggcagaggcccagaactctccagtgagtgcccgactgcatctttgtttcatgggactgttactttactaagatggcggaggccagcagacttactacttctggaaaaaaagcaaaacagatgactttttcaaaacatctgctagagataaggaccctggggccattgttcccaatgctaggatgaaaaaggagggctttataagagagagactcaccattttctgaagcaggcacctgaggctgggaggggaggagggtttctgaaccccacacaggaagtagagaggcctctgggcctgcgggttttacctcacttggaaacgttcaaggcagaggcctccacctggactggttgaagaaagctgggtcccacagccttcctagaaggccaaacaagaggactctgacaatacctggaggggccatgaaaaatacatgacatttagctgtccagaccatgtagtaggttggcacaaaagtaactgcagtttttgccattaaaagtaattgtaatacaatatgcctccacattgcggggtcttccttcctctataagctctgacaggaagagggagatgcactgaacatttgctttctgtgtggtggatctggcatggagcagcagggtgcagccatcttattaacaaaacttgttggcttgaaaatacatgttgacttaaatccataagaattaaatccaaagaaaaaatgccactttttacctatattctttacaaaaatatttaaaaacacaagactcaatgttgaacagggtaaagagtgatagtgtcaaagtctgctggtatgagtgtgaattgatgtaacctttctttatgtttaagcatgcattaatcaaatgcttactatatccaagcaccgttctaagagcttttctgatatatcttatttaatcctcaaaacgaccctctaaggtaagtattatttttatttttatttccattttatacttgagcaaactaaggctcaggcaggttatctaagttgcagattacagagctgggactctagaaaacattttgatgaaattcacttatttaatacatattttctgtctactgtactgtagttatatgctgggtgctagtaatacaggagaaacaagataaatagtcctcttggataaaaaaggaaatgtggagattaaacagataacctcataaccaataaccatgccccgcatgatggtgtacacctgtattcccagctactcaggaggctgaggcaggaggactgactgagcccaggggttcgagactgcagtgagtgtgattgtgcctgtgaatagccactgcgctccagcctaggcaacatagtgagatcccatctctaaaaaaccccccagataacttcaggagattgatgctaagaaaaaagacgttcaggtgctgtgggagtgatagaagggatctaagatagtctggggtgggatggggaagagaaggtccccctgagcaggtgacatctaagctgaaatttgatggaggaacagcaatgaaccaggtggagtggaaagcattccagatagaggcagcagcatgtttgaagtccagagatgaggaagagaaatggaaaatccagcacggcaggtaacagggagaacgaggagtgtaagaaataatataagaaattcgccagatatggtactttgggaggccaaagcaggcagattgcttgaggccaggagctcaagaccagcctgagcaacatggtgaaaccctatctctacaaaaaaatacaaaaaattagccggatgtgatggtgctcacctgtagtcccagctactcgggaggctgaggtgggaggatcacttgagctcaggaggttgaggctgcagtcagctatgattgtgctactatgctccagcctgggcaatagagcaagaccctgtcaaaaaataaaaatgaaaaaaataaaagagataggaaactcagcaggggccagatgggaagggatttgcaagctatgttagggattcttaaggattttcttagggctgtaggaagtattcaaatagttttaaaaaggtgagtgacagtatcaaattcttataatattcaaatggaaaaagttggggttttttttagatgaagtctcactttgttgctcaggctggaatgcaatcgtgcgatcttggctcactgcaacctccccctcctgggctcaagggatcctcctgtctcatcctcccaggtagctggaattgcatgtgcctgccaccacgcccaactaatttttgtatttttggtagagatagagtttcaccatgttgcccaggctggtctcgaactcctgagctcaagcgatctgcccaccttggcctcctgaagtgctgggattacagacatgagccaccatgcctggccaaaatgaaaaaagttttaatgatggaag

SEQ ID NO: 914479 - DNA, 4001 bp, Homo sapiens
ctgcctcagcctcctgagtagctgggattacaggcacccaccaccacaccccactaatttttaaaatatttttagtagagatagagtttcaccatgttgaccaggatggtctcgaactcctgacctcaggtgatccacctgcctcgacctcccaaagtgctgggattacaggcatgagccaccatgcccgtccctgccacatttctggattggctggcatgagaactcccagacagtggaggagttgttcaagtacacatagctcattggtgtccaagctggatccagagctcaggttttctactgctgaactcaaatgctctttccatgatatgcagccacctcacccaggcttgagagttgctcctcaacctgtgttgtctttacctgacttttccttgcatttctctcagaaataattctattctaaactctcactgtcctcttcaagtctcccaaccggtcatcacccagctcagtttcagcaggtggcattgcctcccacctggattttttagaacacggaagttgttattgtcctttctcctttagcttcctttccctttataaacctatttgtggccagtgccgtttgcacttcctttctcctggtcttagagggtaacgttgccttcctctctgtgctcttgaccccactcttgactctgtccttccaccatcaactccaggaccttgctctactcatcatcttctcctttagcctagaaatgtgctcaagtttctctcaccctcaaaaacatttattcttagactctacttcctcctctacctaccacccagtcttttctccctcctcatccaaatgtctttaaagaatagtctacacttgctgacctcatcacctgaccttcaccttctaccaattttcacttggcttccactcacaataccctgctgaaactgtgctaaatcacccatgatgcatattctgccacatcccgcagacttaaacttttaaatatattcttatattagtgggctctctttaacattttatactcttggtaattctcttcttctagaagctctctactctcttggtttccaaggtagtgcatacatttgattatttcagctctttgattctccttttatctctttcctggaatgtttttttttctctaactgccccttaaaattggtgccctcactgttccatcttcagctccctcttcctcacatagtacttgtgtgacttcagcaaattccatggttttaactttcccaggatgtccagactccaggcatcaacccagttcatccacttcctattggatagtccaatggagtattcatgcaggcacccatactatactgtacactcagtctggcaccatgaaaactaatctctccaatgagactatgagttctgtagagcataagtgttttattcatttttatttcctcatggcatatcacatattagggtctcacccatctttgttgaccaattggccaactgcccaactgagtgaatggacatttcctaggtcgactgctagcccccagctctgaagtagggaacatatactttttccttttagtttcttggcctatgcccttttgggctgcattcaaatctaagatggcggtaacagggtcctctcttcagccatttaagtactctgtttgcatttttcagagacaaggattccttctcctccatgggacactgtttctctctagcagagaacagttaagagcctccattttgcccttctttgaactctaaggtgacagcagaggtaggctgaaggttagggataccaatattcctgtctcactagtgatgggctcttcccttgagcccttccccaggcttccagacccctagtaggcccttaccttgaagaagaatgatagccaggatgaggacagccaggcccttcccctgttccatgtcagtctctgtcctccggcaaaagcgtggagcagcccttagcagccagccagccagccagcctgtgcagcagctagactggctccacccatcactgttggggctggggcctttgagagaaggcaagaacccagagcctccaccctctgctgcaagtgtgagcagcaggggcctcagcagggctgcaggtgcagatgccttttgtttttccgttaaggagggtgaaggtggtggggaagaagagggagagagtgctggattcccactcagagactcatcttgcacagggaaccgcaatggatgctgggtgggagatggtcctgggaccgtttcttcatgagggagataaatgtccctgtcattagttgttaggatcgtagccagttgttacttgttgctagttgttgttgctgtaggtaatgaatttaggagggactctcagatgcttggggctggacctccaaatggaaagccacctcagtccaggccttcattcaggaatttttttcactttttttttctttttcttttttgagacagagtctcactttgttgcccaggctggagtgcagtggcgctatctcagctcactgcaacctccacctccggggttcaagcgattctcctgcctcagcctcctgagtagctgagattacaggtgcgtgccagcaagcccggctaatttttgtatttttagtagagacggggtttcaccttgttggtcaggctggtctcgaactcctgaccttgtgatccacctgcctcagcctcccaaagtgttgggattacaggcgtgagacacggcacctggtttcactattcttttgagatcatgaaagaggcgcctggaaggcaataggtggaacaattccgaggacaggccagcacattttcaggggccagagcccggactgaatgtccaggatctcaggcccctatctccctcagccagtcagtcagtgagccaacaaaaatgtgcagagctcccgttatgtgccaggcacaagatacagcagtgagcaagacaggcatgactctgtccccaggtaagtgacagtctaactgcagcagcgtgaagagtttcagatcctcgtaggccacaggggaaaaaggtccatttgtctcaccgggaggctcaatattgcctgtcagtcaattatattattattaataactaccccttaatgagcacatatgatgcgtgaggcaccatgcaaatatcttgtttgaatcctaataatggtactaatggaataagactctgaaaaattttatggctggcccaggccccacaggtaggcagtattggacccaggattcaaatctctggctggggtctctaaagcccaacctcccactgacaagaagctgctagatctggtgtccctggctgcctagtgaagggtcctgagaaagatcagcctccatgagaaatctagctgctacggcttgcgctatggggccgacggcttctctcaaggggcttcgagatgtggcagtgtttaggttgtgtgtaaatgtggttgcattgtcaatagggacgctaaagttcaggccaccttttccatattctctgccagctccctgctcagagatagagcaatttacaccgcttccttcctaccctacccctagcccacccccactctgaaaatttcccaccatcaacggcagaaagcagagaagcagacatcttctagttcctcccccactctcctctttccggtacctgtgagtcagctaggggagggcagctctcacccaggctgatagttcggtgacctggctttatctactggatgagttccgctgggagatggaacatagcacgtttctctctggcctggtactggctacccttctctcgcaaggtaaggctactccaggtgggtgggggaagggacctgagagggacattactgatgggagtgaggcccacttgaaagtgtttcttgccaggcacggtggctcacaccagtaatcccagagctttgggaggccgaagtgggaggatcctttgaggccaggagtttgagaccagtctgagcaacatgatgagactctatctttacaaaaaaca

SEQ ID NO: 914480 - DNA, 4001 bp, Homo sapiens
ttttgtattttttgtaaagatggggtttcaccatgttggccaaggctggtctcaaactcctgaccttgggtaatttgctgcctcagcctcccaaagtcctaggattacaggcatgggccaccatgacaggctgtgttgttgctatcattattattattatttcagcttcagtagtataaatcctagatccccaaatccccacctagcaaagacctctcactcacacagaaagggagatgcatatgcacagagaactcatcctgcctagcctccacctagggtcactttcttcctactgcagaaagtaggaagatagagaaagcagaaagtaattcaagatactttatactgggtactcaatctaaactacctgggtgagactgtgtgtttcaatttctcagtactcccgtggaactgggttaataaatatttgctgagtagaatttactgcatgcaggctgagctgtcttaatgacccagctggcacttcttaaaagaaagattaattttggccagcgataagcaaatcggccatgtaattatctgtacatacatagacaaagaaagagaatgcttggagttgagccgtgctagaatataccttacacgcagcccctcccctccatagccaccacaaagcactgaccctgtttggatgagatattggagccctagctccagggtccctgatgttgccctggtatcaaggctcttctctctgctctgaggctgccaggcagggaatataagccaccttactgttgagatttccccacactgattggcagaagcaggaggtggtgaggaccaagcagctggtccagtggttgcctctcatattcatgctccctatcccaggctggaatctcatggagacccaagacctcaccgcagagctggttcaagcttccacagcgctaaggtggcagtgacactgcggactgtaagctttggaacaaggctcagtggggagctgggagaacccaggacccctttctggaaaacccattgccagctagtctcacacttggaattgtgatcccttctgtgaccaccttgataacagccactcgccctgttccagccccagtctctgccccgcccagctctgccctgcctagacacagcccggtggggcttggcgagcccttgggcacaggagcctgttagtccagacaacgactgtgcgcatccgggagaacggttactttctgccatgtgctgcagctctagcgacctcgcccaaaactgcgcgccggcagcctgcccaacaaactttcttctctttctctttttctttcaaccaaatggtgcttccacagacacattctccaacggtttagcgcaaatcccagccctgctttccggagcccaatgcacttcgcagacagctcacttgactccagtcccccagggccgactcagccggaggggctgccgccgggtccgcgctgagcaccccgcacccatcttgctgcccaggctgcggcgggcactcaccgatctgcgccaggctcagcggcacgaggcagagtccccaggctgcgtgccaccaaaacttgtccatggtgtccggagcgaacggagggcgcgggcgaaaggagctggaggatccctgggcgcggggcaggggccggcggaggacgggacgaggatggcggaccgaacctggcagaggctggggtccgctgggcaatgaggctgcctcggaagttggctgcagtttttattcgaggttgaaaacagtgacctaagacggagggagggagcgagcgaaggacacacccaagcaaggggggctgtgactaagcagcccgcagaggttttaagaagtagcagccctcccgggcgggcccctctgcccccgccccgtgctctgctgaggctgtaaataatcggggctgccagggacgtgggtcggggaacctggagtgtcgcggggtgcctgtgcctccgagccccactggcccctgcgcccagagacgcactggctttcttctcccgctggccccgcggcgtcaggacagaggatgaccgaaccgtaaaaccttgcaccattgggttcagcctttggcctctcctttcccgctaaatttctctgaatccggctggagcaagatctctgggtttcacaggatgttggatatcctgggagaggagctggagagagggcgaggtcttgccctgggtggcgcagtgcctccgtgcccacagtggggagtgaggggtggggagttggtgaatcttccaagtggaaagagggagagctcattctttttcccctcaataacaagtccacatggcttgaatgaattttagcttcttggcagaacagctcagggaaagctactgatggcctgtcatagggctggcatttggctcagctaacccatgtgttcaagccagtgtgaatgggcacctctctccacacacatgctcattcatcctcctaaatatccttccatccgcccatccatctatccacccatctttccttatgtccttctggggctctcacatccatccatcctcctgtccatccactaaccacttaggtccatctatcatcccactcattcattcatccaaccacacaccttttaatttattcaaccacctattcttctattcatcttcccatacaacttctcatccatcattccacacttcctttttcacatctcttcataaaaccacaaccatccaccatcctcttctccacccatccacccacatatctgtttattgatatatccactcatttcccatctgtccaagatcaacatatccacctatcattttatccattctctcatccacccatacgttcatctattatttttgcccccattatcctcctttctgtgtaaacattaattcattttctcccatctttcctacccagcagatcttaaagagaggaagagtttgtaatattcttcaggggaagccttttgagattgaaatatcatactttgaatgataactctatatctatctataatatactatggtttaatgtttggaaatcaaacgcagtatttatttgtcatgtgaactactaaaagtaaatctgcatggacttcttgcctggtgagttacacagaaaatgaaagtgattatcagtggctgtggcaagatgaaaggaaccatgccaggacttctgagggaaggtaagattttgttatttatttcaagaaattgaaaagttgagagaaatgcacccagccatccccctatgcattcattcatcagacatgtaatgagtgttgtggggtatcgaggtaaataagacctggcgctatcttcagagccctcaccctctggtacggaataaaactcacaagcaggccattaccatgcaaggtgaaatatgctgcaaaatgtgtgtgtttggggtgctaccattcctagagaagggagtcacactctctcctggagaacaccaggcagtcttcacaggggaagtgatatttgaggcaggcctcaaaggaaaaggaggaggaattcttcagatgaaactacagggacaagtaagtcatccacaggcagtacagtgtagtgacgaacagcatggattcaggagctagaacacctagatccaaaccctattatggctgcttcttagttgtgtgaccttgcctaaggcaattagctcaatttgctcaagtataaaatgggcttaataatagtatctattattactattacaattctattacttcatagaattggtgaggattaaatgactcaaaagccctgcatgtattaagccgtagatttatgtctacatatgcatgcagtaagcactttaaataagtgtttgctatcattactaaaagcaaaattgtgtttgagcatagaaaagtgaaagaacatggcttgtccagagaatagagagcaatgtgagctgatctgaacatagatcagatgaaggggctgggggaagatagcagacatgaggttacaggtatggggactacaaggtgtaagctatgcca

SEQ ID NO: 914481 - DNA, 4001 bp, Homo sapiens
ggagccgccctatctcaatgaagtctgaggccagaggtgaggagcaggtggggggtttaagggcctggtccctccttagcagggtccctgaagccagccagaggtctgtctcaggcctcttactttgggacagaaggcattttgtacctgttgttgttacatgtgagaagaaccatgtgaacatgtgtgcacaggtgccattgtcacatgtgttggggagataatcctgcctttggaggccgcattgtgctcatgaaagcacacacacacagttctcacacacatgcgcacagactcccacacacagactcacacacagactcacacacagactcacacattccccccacacagtactcacacacatgcccagagactcacacacagactcacacacagactcacacattcccccatacacagttctcacacacatgaacacagactcacacacagactcacacgcacagactcacactttcccccccacaaaatactcacacacatgcccagagactcacacacagagtcacacattccccccccacacacagtactcacacacatgcccagagactcacacacagactcacacacagactcacacattcccccccacacagtactcacacacatgcccagagactcacacacagactcacacattcccccccagacagtactcacacacatgcccagagactcacacacagactcacacacagactcacacattcccctacacacagtactcacacacatgcccagagactcacacacagactcacacacagagtcacacattaccccccaacacagttctcacacacgtacacacagactcacacagacacacatagactcacacattcccccacacacagttctcacacacatgcacacagacacacacacatgcattcccccacactcacacctgcacacccggtttccctagaaggctgctgaggctccctgctcaggcaggcaaggcctccggaccctctccctgccagcctggaagctgctcgcatcctcctgtttccagcccagagtcacgcacctctgtcaccctgccagaccttctaaatcctcaggaagtgggtcaggcctcatccagttcacacccccaacccccacatttcataaatggggagatcaaggcctggagaggcttggggacctatccgaggtcacacagggttgggcttacaacccagggctggagtgagagcaggcccagcgtgtactcatcccagccggcctggctgggcccctctgggactgacccaggactgggcatgagagggcctaggacttccgctatgagtccttgacatttgctcagacatcgtcctcagaggcggctccaccctgcctcggcccactgtctgtccagagcatcatcagagctgcctcggagacggcgagtttccatgtctctggaggcgaccaagtaaaggctgggctgtcagtgggggacctcgcagagggaggcctgaatgctctgctaaaatccaactcagcctaggaatcaagttgtctgggccccatcaaatgcgggtcccccctgcagtctctcttgcactggaagggtaaagcagggttctcaacagcgcatgagagaggcaaggttgtgctcctggcgggtgggacatgcaggacagagggccaagctgcggcttagtgggggcaggcagggatcccagtggccccaaatctccacaacgctccagagggctgacatgtggatcccagagtcagccttgggtaaaactgggaactccttccttgcactggagcgagcccgggtgttcgcaggacacctgggaggggtactcacccagcatccccagcaggtacaaggtggccagcggttgcagagaccccatgggcatggtttctggccttctcttgcctcagcctgggcagctgggcaccgcaggtgagggtgtctggccgggtatctcgctctcagagagggagagggcggggtggcgtgctcagggaggggtgggacggggagcaggcagtgtggggcctgcgtcacccatgtttgaagttgaactgtcaacttcctcctggcaaaaccacctgcccctgtttgaatggcagccctggcctctgccagcttcctgcccaaggtacccagggctggggcagtgctctcggccacccccacacaggacaaggccatgcatcctggagggacagggctgcagggggtggggaccctgagcgggggttacggaggctgaaggcctggctgcagctgagggctgggctgaggacaggcgtccctgaggcaggggtctgggtggggagaggcgggaaatgggcagcatgatgccagttcttgttgcagactccagtgaaagccaaaaccaaaccctccattccccctttgtgagggatgaggttggaagtttgagctgactttccacaggtggtgttttgctagcaagtacaagagatggctgcgccatgaatgctgggcttgtgccagtgtgtgtgtgtgtgtgtgtgtgtgtgtgtgtgtgtgtgtgtagagagagagagatctccatgttgacttgtgtgatctctgtgttgtgtgtgtcatctctgtgttgtgtgatctccatgttgaggtgtatgtgtgagctccatgttgagtgtgtgtgatctccatgttgatgtgtgtgtgaactccatgttgatgtgtgtgtaatctccatgttgacgtgtgtgatttctgtgttgtgtgtgatctccatgttgatgtgtgtgattgtgatcgccatgttgatgtgtgtgtgatctccatgttgatgtgtgtgtgtgatctccatgttgatatgtgtgtgtgatttccatgttgtgtgtttgtgatttccatgttgatgtgtgtgtatgatctccatgttgacttgtgtgatctctgtgttgtgtgtgtgatctccatgttggggttgatgtgtgtgtaatccccatttgatatatgtgtgtgtgatctccatgtttgtgtgtgtgaatgtgatctccatgttgatgtgtgtgaatgtgatctccatgttgacgtgtgtgtgtgatctccatgttgatgtgtgtgtgtgatctccatgttgatgtgtgtgaatgtgatctccatgttgatgtgtgtgtaatctccatgttgatgtgtgtgtgtgatctccatgttgatgtgtgtttgtgatctccatgttgatgtgtgtgaatgtgatctccatgttgatgtgtgtgtgatctccatgttgatgtgtgtgtgtgatctccatgtggatgagtgtgtgatctccatgttgatgtgtgtgtaatctccatgttgatgtgtgtgtgtgatctccatgttgtgtgtgtgtgatctccatgttgatgtgtgcgaatgtgatctccatgttgatgtgtgtgtaatctccatgttgatgtgtgtgtgtgatctccatgttgatgtgtgtgtgtgatctccatgttgatgtgtgtgaatgtgatctccatgttgatgtgtgtgtaatctccatgttgatgtgtgtgtgtgatctccatgttgatgtgtgtgtgatctccatgttgatgtgtgtgtgatctccatgttgatgtgtgtgaatgtgatctccatgttgatgtgtgtgtaatctccatgttgatgtgtgtgtgtgatctccatgttgatgtgtgtttgtgatctccatgttgatgtgtgtgaatgtgatctccatgttgatgtgtgtgtgtgatctccatgttgatgtgtgtttgtgatctccatgttgatgtgtgtgaatgtgatctccatgttgatgtgtgtgtaatctccatgttgatgtgtgtgtgtgatctccatgttgtgtgtgtgatctccatgttgatgtgtgtgtgatctccatgttgatgtgtgtgtgtgatctccatgtttatgtgtgtgaatgtgatctccatgttgatatgtgtgaatgtgatctccatgttgtgtgtgtaatctccatgttgatgtgtgtgtg

SEQ ID NO: 914482 - DNA, 4001 bp, Homo sapiens
ctgccgacaggcgccagtgtgtgttgttcccctccctgtgtccaagtgttctcattggtcagctcccacttattaggccagaactctttggaccaaacaaatctgcagcttcccctacaagggcctttcctgcagtttgttccggaatgccaatccctaactctccaaagagtcctatctccgcactcacggcccctcccgtgttaagtacacatgcaaaaccaaggtttagtgaatatgtttcctaagatataggacataagtaaaaagaagtctttgcctttagaaagcctcaagcacttctgggcttggcaatgtctgtggcggtttggctgaggttcttaaagaggtggcccagaattttccatgctctacttttcaagagcttctaccagcagctgtcaaagatgaatgccattaggcaccccactctctcaccctaagatccattttatttaggcttttatctcctaagccactcagctaatgggatgtttttcttacagctaagttcagcaaacagtttctagtttccactgtgaaaatacagaggccacaagttttaggactgtttggcttgtaggggaggcagcctccctttctgcctctccttcataaactgccacgtaaatagccacattttggcaaacgttgccatctccctcaacattcggggctctgtgccttcttcagggaactgggagtaaaccgccaggagtggagaacttgaacaactgctcagggatcgcagggtacctgaaataattagcagccgccgcgtttgtgctgagcgctttccgtcaatcatctcaaccaccctgtgaagtgaagcctattgttttacccatcaagtgctgttaaatacttccagaaatgaccagtgaagagcctgggtatcactaaacggccataaaaggcacactgcttaatgttggttttttttgtttgttctttgtgggttttgttcgtttttgaggcggagtctcgctcttattgcccaggcagtagggcaatggcgcgatctcggctcaccgctacctcagcctcccgggttaatgttgttttttgaaaagtcagcagtcagactctaagaagggtgcggcccgagccgacccaagaaaacaaaacatcacgttgtacttaaaacgtccgtttcggccgggcgcggtggctcacacctgtaatcccaacactttgggaggcggaggcgggcggatcacgaggtcaggaattcaagatcagcctgaccaacatgggaaaaccccgtttctactaaaaatacaaaatttagccaggcatggtggcgcatgcctgtaatcccagctactcaggaggctgtggcaggagaatcgcttgaacccggtacacggaggttgcggtgaacccagatcgcgccactgcactccagcctgggcaacagcgaaactccatctcaaaaaaaaaaaaaagtccgtttcgcccgacacctgcttttcaaaattacacatttagaccgcgaggggagagaggaactgccgtgaccacggagggctggcctttcccccggcgcagtttctctggaccgctagagcttcccttgagacgaaagcgatggcaggggcccgggtgcgaggctgcccccgagggaatggggggcgcgacgggggtaacggggctgcttctgggagagggcgcgctccccgtttctccttcctcgtagataaaatgaagccagcgttcggctaggacaccgggccgcggtgacgggttggaagggccaggcctcgggaggctcgcccggcaggggtcgagtggaaagcgaggacgggggtagcccccacagaccctccgcccgggcccagactgccgccgccacctcggctcggctcacccaaaccccagcaggccttcgggccttcttacctggcggcgcccaagatcctcttccagcctcgagccgcttctgcgctcagcccccgcattctttcgctccagcccgcaaggctccgccccccggccccgcccctcaggatgcccttgccctcccaggctcccggctcccgcaccgcgcagccgcacctcggcaggaacctcctcctctccctccacccccgcgcggagctcagcctcctggcccaggttctgagaaggccgggtggccaggacccaatgagcaccttcaaaaccccagggaactgaaagtttggggcgtcctcctcggatttgctatgggacataaaaacagtaggaaacttccaaagacttctgattttcccttttactttttttttaagtatattaaaatgtttttcaaaacgtttctgtgcgtcttgctggtgccctgggtgccccagggcctggctatcgggctatgcggccctgctgcagtctgaagctgcttcctactgcgaggcttgggcagcatccaaatagccatcagccacagccgcatccgtatccgtgccttgtgacttgtttgagacccaaacaaaatgttatgcgtttaaaagcttactgggctgctcggggaccagtgttttgaatgaacctcttcgagtgtctctatcaacttagctggtagctactgttccccagcagccaccagaggcagggacagaagagcaagaccaggggatccgcctgcatgagtctgtcccttcagggtggcctcgcctcagggactggattgtaggcatggtttcaataacacagcggtgtgaaagtttaagagtttttagtacttacggaccctgggtggtacacagcttgcctagaggacacacacacacacacacacacacacacacacacacacacggagatcagggagaacagggagagggaagggaggaacggacctttgggccagcaactttatccagttaggtttcctctggagagctctaactggtggatttaaaagcaagcaggtgaaaaggcagaggtgggaggaacttgaaccagagtttgaagctgcagtagtgccctgttatcacatcactgcatgtttatctctggccaccagctagagccatttgcgtggggtatagtactggaaactgtcaatggtgactgagacttgcttctgttattaaaagttaaacatattcaaaaatggatgctgaggtaacaaaaaattataagcactcaccagaaccgcaaccaccatttggaacattagttttatgtgcagatgtaattagaagtttccatttgctattatatttggaaagtgtcccactcactgcagaactgactgtaagaacgccataggagggagggtggggctacaggccaaaagtacaagtcttcctccaagaggatggcctctgttagaaagcatgagacacactttgagggtcagggtgagaagatattacatctcagggctgcttgtgttgaactggtcagggaagaaggcatgagataaaatttaagcagggggaatcatagattactgaatgtcttgcagggaaaatcatatagtaactgtcttgacgcttctactgttattctgatggctttgggatgtcagggaatgagttccatttggtggtgctcaaatcctggtattcctctatacaagtgggagttttttaaatcaggatgacttgctttgatatttaaagcatgtctccttaaaacagctaatactgtatatttcccaagatggattccaaagctcttttgtgtacataccttacacacatcctgttagctattccttccttgacacgcttggcttctgagatgccactctctcctagtttggttccctagaatggtttcttgaccattcggtcttgagattcttttcctttacccactaataatttggtgtcccaggattagactgagaaccatggctgtgtgtgctccctgggagactatagtgtatctactcttttaccttgggatgtatgtttgcagatgattcaaaagtctgtctccatccctgaccactccccctatcttcatattcatatccagctgactgctggacatctccacttatatgttcc

SEQ ID NO: 914483 - DNA, 4001 bp, Homo sapiens
ccctgaaaaaaacaaacaaaaaaaaacaagcaataggtcagtggacaatggtttgatattttagccactaagccagggtagacgaggtttcccctgggccataagaggcagagctcagaggaaagttcccctgcagggtcctgagacccttttgggcagcagcaaagaaggcctctcatctgtgggcatgtgagcttcacatctcaattctctgagaaagggctgaagtgcaccccaagacttgtcacagagaagctgatggtcccaagcttgctccataaacaaatgcagactgctggaagtaggatgtcactgggctattaaaattctagaaaatattccaacttaagcagcagagacagaaaaaaagaaggaaccaagaaaaatgaataaataaaaaataattatagaaaaaatatagtgttttaacacaggtgaaccacattacagtgcaccctggctagaatcacggaaggtggggaagaaggggtgccatgacttctctttctgctcagaaagggagaacatattaaagtgtgtcctggcgccaagttactactttgccttcatttcctcagctgtaatatgggaggtaacagtaccgacctcccggaatggctggacggatttaaatgagacaggctctggcacagtccccagtaaacaataaacagtgaatatatggttgctgttaatattctaagacatgctacagtggtgtggaaatctttttttaaattgctcactgtattgccactttcttttctgctccccccaccaaccatatttataaaaaacaaaaaaccagcagtggccaagatattataccaacatgacacaggcagacaaccacacttgatctttacaatgaagcatgtgtgtttccactgttatagaagttgactcagaagcacacaatttcctccagcaaccaggggaggggtggctgaggagagggggtggcccagtgacagatggcctggagcaggagggaagagcagggactctgttgccagactgtgtgttcacattcccgtgtaccacttctgtgtgttatttgacaagttattaattttggggaggcctcaatcttgttgcttgtaaaacaaggataaaaataccaccaactccatcaggttggcatgaggattaaataagcaaatacacgtaaaatgcttagagtagtgactggcacataaatgcttcagggttagttagctgctgctgctgtcactatgaccatcatcatcattaaaacacaggaggagcctcagagcagaaggactgagctcagatggctctaagcagagtggaccccaaagggacttgcacagcactctaagaatggtatccattggtgtccccaagcagcttatggtgacaggagtgaaacttcagccgccgattgttgacccacccctgccaaaagccacgctgtaactcaggacgggctgtaactcaggacgatgccccactgaggacaaggtcataacataggaaggagctgtcatacaaccccagacctgtaacactggaaggcaaaagaaccaaagccaggcctggaggagcagctggggctgaaactgaggcttaagaagggagttcatggccaaggcagcctagatccatgtcctgagactggagcactcacctgaatggcagaagacagccaggacgagcagcagcccgaacaggacagaccctccttggattcccattgtgattgtccacagaacctggaaggaagggacaggaaggaatgtcaggaacgaacaaatgactgctggttgtctcaaaaaccaagggctggaaggccaagaaggcttctgagaggaacatttacagggggagtcaaggcacactgaatccctgggccatgccccagctctgacccacagcaccatatacccttgagtaggctcagtccctataagccccagtgtgtactaccacactgtgggaataacactatcttccccatcagggtcagtgagtcaaatgacaatatgagcaaattgactcatatagccactgtggttcccactctactggccccaccccaagctgctggctgaaagagagggccacttctcggagccacagcactaagtgaatcagaccaaaggggtgactctggaaggcaccagcatgcattcagcagtggaacagggagcaatggcttagcatacctggaagctctggctcctcactgtaagaagtataatggggacacttgcttgctctctttggggacatgaagagaggtattgagcaactttgtaagtttccattacgtgaatgcctagatgtgtagtgatagcatcaggtgagaagaaggaaagcctgaaatgcctccaaccctactttacccagtaaagaagccaaagcttagggaggttttgaacttgcctaagtacaaagcatccatagcagaactaagaaatctcccaactccaatcctacatccctgaacccatcctgaaataaggaggtggcagtgcctgtaaaccagggtactccatattctattctccagagccccacaggcccggacagacagatgggttcttggaagggtgagtcatctaccctccctaagtcagaaatgcagagttccctggggaactgacaatcctgacaatcattcctgtcccttccttctcacacatcttgaaggtcatctgctacttaggaatttgctgacgcaggccagtggaggactgagaagttccaggaaaagggcagggtctgacattgtccaaaaaagaaaacaatcagtgagtcaagcctggagatgggggtggtggagatgagaaagaggtggttttatgatatgtgaggaaccaggaagaaagacaattgtcatctggcctttccttacaaattgagggctccccaccacccgctgggctctgaaacctacagcctgctacgggacaccatcccccatgtggaccttcccaggagacctgggctccagcacatgccagcggcttgcttggttccccattttcaggggtttctgagtaggaagggtgatttatagactcaggttagacagggctccagtatacaaggaactgctacaagtgagcagggagaggaaggtattggtctgaggtccccgaacagagagctccagacacttcctaaaagttaagcatagcatgatcggagcctgggtattatagtgagaccctgtctctacaaaaataaaaacattaaaaaaaaattagactggtgtggtggcacataactgtagtcccagctacttgggaggctgaggtgggaggatcgcttgagcccaggaggtaaaggctacagtgagctgtgactgtgccactgcactccagcctgggtgacacagcaaggtcctctctccaaacaaacaaacaaaaacccaatgtagctacaatgtcaggcatccccacggaaggaggaaggaaggaatctcctgactcgggttaggcactggaaaggtgtcaggctggcaggagctgccggttcaggacacttcccttggaatggtccttgacataaatcacactgccacaacacacagggcccctgatggggagctgttctttgaagtaccttagaaagaagtggcctgctaagaaagcaggaagaacacaatgaaagggttcagagcacaggcattccagtccaatctggaggcctctgaacaaggccagatagttctggctctgtcacctctttgctatgtgttaacctctgatcacgctttggctagtaagcatggagatagttacatgtactgcatagcacaatgcctggccaaagatggcactcaaaaagctgtggccactgttagtgctactcaggagtaatgaggttacttgaggaagaaattgtgtggggagggagtgttggggggtgaacggtgggaaggcagacagagggtgatgtgaggtgaggaagccagagaaacaccctgggttgaatgagcaggggagacctcaggcatcaaacctaaggaa

SEQ ID NO: 914484 - DNA, 4001 bp, Homo sapiens
aagtgcaccccaagacttgtcacagagaagctgatggtcccaagcttgctccataaacaaatgcagactgctggaagtaggatgtcactgggctattaaaattctagaaaatattccaacttaagcagcagagacagaaaaaaagaaggaaccaagaaaaatgaataaataaaaaataattatagaaaaaatatagtgttttaacacaggtgaaccacattacagtgcaccctggctagaatcacggaaggtggggaagaaggggtgccatgacttctctttctgctcagaaagggagaacatattaaagtgtgtcctggcgccaagttactactttgccttcatttcctcagctgtaatatgggaggtaacagtaccgacctcccggaatggctggacggatttaaatgagacaggctctggcacagtccccagtaaacaataaacagtgaatatatggttgctgttaatattctaagacatgctacagtggtgtggaaatctttttttaaattgctcactgtattgccactttcttttctgctccccccaccaaccatatttataaaaaacaaaaaaccagcagtggccaagatattataccaacatgacacaggcagacaaccacacttgatctttacaatgaagcatgtgtgtttccactgttatagaagttgactcagaagcacacaatttcctccagcaaccaggggaggggtggctgaggagagggggtggcccagtgacagatggcctggagcaggagggaagagcagggactctgttgccagactgtgtgttcacattcccgtgtaccacttctgtgtgttatttgacaagttattaattttggggaggcctcaatcttgttgcttgtaaaacaaggataaaaataccaccaactccatcaggttggcatgaggattaaataagcaaatacacgtaaaatgcttagagtagtgactggcacataaatgcttcagggttagttagctgctgctgctgtcactatgaccatcatcatcattaaaacacaggaggagcctcagagcagaaggactgagctcagatggctctaagcagagtggaccccaaagggacttgcacagcactctaagaatggtatccattggtgtccccaagcagcttatggtgacaggagtgaaacttcagccgccgattgttgacccacccctgccaaaagccacgctgtaactcaggacgggctgtaactcaggacgatgccccactgaggacaaggtcataacataggaaggagctgtcatacaaccccagacctgtaacactggaaggcaaaagaaccaaagccaggcctggaggagcagctggggctgaaactgaggcttaagaagggagttcatggccaaggcagcctagatccatgtcctgagactggagcactcacctgaatggcagaagacagccaggacgagcagcagcccgaacaggacagaccctccttggattcccattgtgattgtccacagaacctggaaggaagggacaggaaggaatgtcaggaacgaacaaatgactgctggttgtctcaaaaaccaagggctggaaggccaagaaggcttctgagaggaacatttacagggggagtcaaggcacactgaatccctgggccatgccccagctctgacccacagcaccatatacccttgagtaggctcagtccctataagccccagtgtgtactaccacactgtgggaataacactatcttccccatcagggtcagtgagtcaaatgacaatatgagcaaattgactcatatagccactgtggttcccactctactggccccaccccaagctgctggctgaaagagagggccacttctcggagccacagcactaagtgaatcagaccaaaggggtgactctggaaggcaccagcatgcattcagcagtggaacagggagcaatggcttagcatacctggaagctctggctcctcactgtaagaagtataatggggacacttgcttgctctctttggggacatgaagagaggtattgagcaactttgtaagtttccattacgtgaatgcctagatgtgtagtgatagcatcaggtgagaagaaggaaagcctgaaatgcctccaaccctactttacccagtaaagaagccaaagcttagggaggttttgaacttgcctaagtacaaagcatccatagcagaactaagaaatctcccaactccaatcctacatccctgaacccatcctgaaataaggaggtggcagtgcctgtaaaccagggtactccatattctattctccagagccccacaggcccggacagacagatgggttcttggaagggtgagtcatctaccctccctaagtcagaaatgcagagttccctggggaactgacaatcctgacaatcattcctgtcccttccttctcacacatcttgaaggtcatctgctacttaggaatttgctgacgcaggccagtggaggactgagaagttccaggaaaagggcagggtctgacattgtccaaaaaagaaaacaatcagtgagtcaagcctggagatgggggtggtggagatgagaaagaggtggttttatgatatgtgaggaaccaggaagaaagacaattgtcatctggcctttccttacaaattgagggctccccaccacccgctgggctctgaaacctacagcctgctacgggacaccatcccccatgtggaccttcccaggagacctgggctccagcacatgccagcggcttgcttggttccccattttcaggggtttctgagtaggaagggtgatttatagactcaggttagacagggctccagtatacaaggaactgctacaagtgagcagggagaggaaggtattggtctgaggtccccgaacagagagctccagacacttcctaaaagttaagcatagcatgatcggagcctgggtattatagtgagaccctgtctctacaaaaataaaaacattaaaaaaaaattagactggtgtggtggcacataactgtagtcccagctacttgggaggctgaggtgggaggatcgcttgagcccaggaggtaaaggctacagtgagctgtgactgtgccactgcactccagcctgggtgacacagcaaggtcctctctccaaacaaacaaacaaaaacccaatgtagctacaatgtcaggcatccccacggaaggaggaaggaaggaatctcctgactcgggttaggcactggaaaggtgtcaggctggcaggagctgccggttcaggacacttcccttggaatggtccttgacataaatcacactgccacaacacacagggcccctgatggggagctgttctttgaagtaccttagaaagaagtggcctgctaagaaagcaggaagaacacaatgaaagggttcagagcacaggcattccagtccaatctggaggcctctgaacaaggccagatagttctggctctgtcacctctttgctatgtgttaacctctgatcacgctttggctagtaagcatggagatagttacatgtactgcatagcacaatgcctggccaaagatggcactcaaaaagctgtggccactgttagtgctactcaggagtaatgaggttacttgaggaagaaattgtgtggggagggagtgttggggggtgaacggtgggaaggcagacagagggtgatgtgaggtgaggaagccagagaaacaccctgggttgaatgagcaggggagacctcaggcatcaaacctaaggaagccctcagttttctgggatggttggggagtgtcaagtcttagcctcagttccacatgactggctggttgttgctatagctgatcccatgacatgctgcaggggaagccaagacagcagagaaaggaagtagctatgtgtagatgccaaggtcgggctgttccatcaaaataagaccaggcctttatgaaccactgccaaaatatgaatttccaagagcaaaacgt

SEQ ID NO: 914485 - DNA, 4001 bp, Homo sapiens
gtcttcacgatcttttcactttttgctaaagcgtaatagaaattgggttttgccaccatttgtttttatgtttccctttacctttcacttatgg[450 bp omitted]gggcttcatggggaagaggaaagggggccactctcggacagtctgtttcagctcaggggcagaaggcagctgaaattccagagctgctgctccagaaactcctggtagagttagcagggcaaagctacatgcacagagctgaaggcacacaaactccagttcccagagccgaatggctttccctgaaccagtatgaggccacaggctcggaacacatgcctggagatcaaggcagagaggagagcactccctgcccagagtctcgcgacatgtacccagtcctccaaaccagctcgatgccccctcctgactgggtcttcctgggtctcctccatcacaaaatgaaagcacttggctctctggctgcaaggtggacccagactcccctggcccgaattctgtttccataccagtcttcccaaatcccaaaatgtgagagctcgatggggtcaggatctcttgcatctccaggcccctgccccgctctggccagcttggaccctgcactcaacaggggccagcaagtatctggggagcacagtctagtgccccaaaccttctggccatctgattccctggcccaggtggccaggtgccttgacacttgggggcagcttgagacgtgggggtggccttcatgctcgcttatgccctagactaccccagctggttgtgctgaggccatcagcgcctggttgtccagaactctccctggcttccctgagtcctgtttcgggaggtgctctcctgtgattggcctacgcctgctggaccccaagcctcagctttggcgttgaaagtaccaccatcagtggtcctgcctctctggaaggtgaacggttccttcttaagagttggcaagaaataggaaatgggggagttcctgagcttaaggatgggagaggcacctccctcctcacaccctagggacccattggtaaggcacaaagcatgcttcccacattctgtcactccaggaggcttccaggcacagccccagcccctcgaggggctcctgtgtcctctcctagccccagatgctggacctccctggtacctgagtgtagtcttggctaaaagatcctagaaaagtgaccacaaggaaacaaccagaaaggggactgagagggccggacccggctcctccagcaccagtggcaggagatgagggaagggggcctacctgagagggctgccgtcagcaatccagtgatcccgaagaagagccacatgtctggagctgtctctggctgctacgcgtggctgcctgtgggaagcaccatcttggggccgggaggtggacacggccgttgtgcgcccctggcgcaggtctgctctaccctttgctgttcttgttcctgtgtctctctctgctctctcctctccgacacgcatgcgatcaaacccaacctgtgagtgtctcacgcctgcttgttctgcttgtggttttggtctgcaggaagctgggctgctgttacaggggctggtggggagagccccagctgcctgtgctgggagcccacccatccaggctgcaccccaagagtcacggagccagacacacgcatgcacacgcatccatgcagacacacttccccgagggtcttctaagaagaagggaagtggaagagccatgcctcatttctggtggcccagaagaaaaaattgataatgtagtagctgctcaatcagtacatattggaagagggagtgaatgacccattgcctgtcccggtccgtgtaatttggctctcttggattaaatcctgagttttatcttaaccttaggtgcaatggtggttgggaaggagggtgtggtcttgatgcacttttggagataagagcctaagtctcccctcagagaaatataaattgggaagggcctgagagatggccatcccacaagtccttctacagggaagggtgccaaggccttgtgggagccgccccgtcagatggcacagtggggccagctatcccatctccaggtaccagactgggcatgcctccgtgggagtcaggcatgggagctgggtctacaaggctgagcaggattttgacaaacagcaatcatgggaggcctctgggccagaaggaatagcaggagcaaagggctgaaggaaggaagcccagggctgcctgagaaaccccgagttgccccattgcactgcagcagactgacgctataggaagaaggcaggggccaagcgtgtttaattcccatggtactccctgtggagcatatggtaggaggtgaataaatgtttattgaatgagaaaaggaatagataatttggttgtccaagcagggccctggaagtggtcaaatccagaaggggtttggttccaaatcctggccctgcctcaattggtcccatcccaggtccacctctcctggccctccacttcctgcatccttgcttgtcttcatttccccaacatgtggaatgaggagcggtcctcctccattgggttcggtcctaaatgtgggtgtatgcatttgatgcggcaagtattagagccacggggaaccaggcgcccccagagtgagactcctcccagtcctgccccagcgccggcacctgctgccgctgccctctggtggaagtcactggcagcacaggtttgcatgggtgcctcgagctcccagatgcaattccattcatttacacagtcttggtgtgcagaactctggacaggactctgtggaagtgaaagagaggaaaccatattcctgccctcaaggaggatgaagttcacacacacacaagtgaccaaaccacaggccaaggtaggacacacataatgtgaggtctcctggtcctaagaggaacccgtttgaaatgggccgggaaggatggctagactccatttctgacaatatggtagacagcagatgctgaagaattctcctaatacaaaacaccacaaaaatattgtaaaccatcttttaaaatgtgtagctgaggtggtgagaaatgaagaaaatcatcagagatcaaaaacgacaataagcctgggcaacatggtgaaaccctctctctgcaaaaggtgcaaaaaattagccaggtttggtggcacacacctgcggtctcagctactcaggaggctgaggtgggaggatcgcttgagcccaggaggtcaaggctttaataagccaagattgcactgctgtactccagcctgggcaacagagtgagaccttgtatatgttaatatataaagacaacaaaaatccaaagagatcacagccagcagagaagtatctgttgatccagttgaccaagagcttcagtcttatgaacatggacaaaagttaaagctgagaaacaaaatcgaagtgaaaaacaaaatccaaaatttctgccttaaacaaagagcactgaaatacaacatccacagtggagaactcggagagaaaaattccttaaagcgagctgacacagagcttgcccaa

SEQ ID NO: 914486 - DNA, 4001 bp, Homo sapiens
ggtgaccgcagattggagagtgagctgggctggggaaagagtgaggcggatcgcccccaacctccggcaaagtgtgcgcccccgccccaccatccaggggcggcggctcttgatgagctcatgggggcggggcgccaggagtcccgcccgcgagcccccccctcgtccccgcgaagcagcagtccggaatccgcggccagggacccgcgcaggcccctccttagctgaggggcggccgggtactcgggtcccgacccgcgaccaccgcacccatcaccaccacagcgggaactgcccggcggcccccagaagccccggcccggccgcagaggtgggcccccgagcacagaggccccgaaactcggctcgcagccctcagccccaatgtcggggggcgcggtggccccgggcgaccccccaccccgctcctggagcccacaggtggccccacaacttcgcggcccgcgctgcgcccgcggggcctagcacgctgccgcgggacctgcccaacgtggagtgtgtgcctgccccctcccgccccggcccccggcgcagcccttacccagaagacgaaattgaagacgaagagcaggtacttgatgcacttggtgcagccctccactcccatggcggcgcgggcggcgggcggcctgcggggcgcgggccggtcctgggcggcgggcgggccggcgcggggcctggcgggtggccggcaagggggcctggcgggccgaggggcgggggcgcgaagaaaggggcgcgggggcgcgggggcgcgggggcgcgtggggcgctgggcgccggaggcctggcaggatgcgcggtggggtcgccgccgtcgccgccgttgcgcgctcgctctctggccgggcgcgcgcctcgctccgcagtacttatagggcgccgcggtcccgcccctccataggccccgccccggccagctcacgccccgcccccggccccgcctcctgccgccagggcgcgcagccgaggggtatggggtcgctgcacctacccccaacttggcgcgtttcggccaggacctcagggcccaggtgcaccgtgctgggcgcgggaggcgtccccaagctgctgtcgcgctccgagcccccaagggggtggcagcagggccgcgcctgaggacaggcatgcagcgtctgcccaggagtgcagccccggtgccgggagaacaacccattcctccctccctcaagcaccttggacaatctgggagggctccccaaaggaggtgagcaccttggacaatccgggagggcttcctgaaggagttgatgccacagtggttggctttgcaaagacagcaagctttgctcacattgctctccggggctggaacctgggcaggcatgaggccccctagtcagtgttggcctcaaggtcctagtacaggtaaccaatccctgtctcacggaaggggagaattgctgacccatgctgtgggagtctgcatctgaaaaggtcactggggcctgagagggcagctcccagaacagtgtgaagtgtccaggaggccagagacacctataggagaacctccagatattgcatctatttcgtctacatcctggttgtgtcgtgccccagggatgccagcctcacaccgtggctcttccggaaggtgtggggccaggcctgctgcacttactgctttgggctaatgattcagagagtgaagggtgctttctccccagaggaaggagcgaaggcctttgcaggagatgacacactgacgaaggtttcccatgccctctccaagaaaactgatggacaacggggctgcatcctgggcgggggcttacctgggaaccacgtgggaccaggtccggagaaccatcctctagccagctcgtcttggcaagtgtcgtccaacccagtgctagctgatagaaccttctgcaacgatgggaatgttctgtacctggataaccccctggcacagatgactactgggtactggaaatgtggccacaaggaaccaaatttttcattgtgtttcatcgtaatttaaattcacatggccctgggtggccagtagcgctcacattggacaaaacagctctatcgtcatcatctgtgctctaccggttttcttggtggttaatttgtaaactggttttggcttcatgcctgcgtaagaactgcaagcactagtagtttatgcctggttttacattttgtgcctgtcgaagtgacattataagaaaagacactatatggtcacttgagagtcttcgaggattctttttgtttagaagggaatagaaaagggttccagtgtgaggaaacatttctctggatgtcctggacacctgctctcccatcagctccctgctgtccccagtgatggggacatttcccgttaaaggtgtgagctgtgtcctcagcagggggtggtaggtggagggagacactggctccactctcaggaagtgggaggagggggcagatccatgcacactgtgtccttgaccaccagcctcagaagcaggccatgcccagccagcagccagcctgcctgtcctcttcagccatgcatcaaatatttagtgggtgcctgctgtgtgtcaggcactgttccaggccctggctgtgggagccaggcagcagacccctcccctggaggatctgcaactctggcggagatgacacgtgtcacagcacgatggtcatatcagtgctggggagggacggaattcctaggatgcttgctagagggtcacagggttggggcactcctcaaccacggggctgaggcactccaagtgcagaggcttggaagagccacagtggatccaggccctgatgcctgagaaggagccagctaggcagagccggggaggagcactccagacagacaggtgaggttggaggaacacaagggaagcaggagacagagccaggggaaaggggctggacacaggttaggggcaggtgtgagcctgggaggcaggggggctggccttgggacctggaggccagagggaggctgcattttattctgactgcagtgggatgatggagggcttcatgggcctgacatctgattgcgggggcagcagcccgtcttagctccagagtggaactcacattcacagtcacttgcaggctcacagggaagactggctatgagggggtaggaggaccacttcgcagggcctggcccatgggagctccacatctgaagtgcccttcccagtggcccactggtgtgacctcatggggaccttggggatcccatggctgacaaggacatggcttgtgtctgtgtgatactggcacagtacgcacccagaagtgcgtctgaaagggttcctgttgttagctgggcctggtggagcttccatcctggctccaggacaaatattcaggtggactctgtcagaggatgaggggagaaaggggaggggcttgctcagcagcccggcctgggatgggagcgccgctccctgggcctcccctgccctgagaaggcttatgcctgaggaaggcagagctgctggagcgatgtgggcacagccggaggcacgttgaggaagggcaggcgtttgcagcccggctgggttcttctcctccctgtgtgtaggagtcttcccctccccgtgacttcgggctggtccctcagtttccccatctgcagaagtgccatctcccagcattttgggacaggtgacatgtgcatatattcccattgcacttaggggcagggcctggcctgtgggaggaaccaggtccctggttccttgaagccatgtttgacagagagacctttctgcctggcgtgaggtgactcacagccccgatggagcacaccttcagttggtggagccattcatgagaccatgagacccctgtgccttgatttctcgtggaatacatgaagatcactcaaatgaggacaagcagaggctgtttatgcagtgctcactctagcagggagtcggccactagcactcatcttgggcagacacgcccaggcaggt

SEQ ID NO: 914487 - DNA, 4001 bp, Homo sapiens
ccccaggcctacaccctccctcggcccctgcccccaggtccacaccctccctcagcccccacccccaggtccacagtctccctcagcccccacccccaggtccacactcgcctcgtcaggggacggggcttcaggggctggcagagggacatcctgtgtctggtgcctctcccacatgcctgggctgaagcaggccaccactaagcaacggctgaggtcccagggccgggcctggggaaggcgagcccctcccaaatggcctagctgcccccactgccagggcagtgccgaaggccacagtgactcccaccagcgtcccaagcaggctgtgcagaacagcccggcttggggaaggtgggatgtgactgccccactcatctcccagctgagagttcagttcagcctccgtccttccccctccaaataatcatccgcactgggatcctcagccgtccagatgggaaacagatgtctctggtcccacacactggctccaggggccatttaaaaagtttgccctccctgcctcaacttgagaaacactcggtccactgggacatcagccgagtcttccacgagaagggggtgacagcctggggggcacggggaggggcttgcagtctatgcccaggggcgtggccacggggaggccgcggccatggacacccactccagtccttccaggccaagaagggatttccaccccctccccaattctaacaccgacaggaaatggaaacaaaaggcgaaagcccatcagtcacttcccagcagcaaagactgcggtcaggagaaagccattctcagcaaaagaccctcctccacccacgctggcacccaaagatgcccagcgtgggggcccctcttgcaaagcagcggccccactcccggaccctgccatccactccaggcccctggtgccactctcttccttgtgccaactcagaaccgcgggatccccactcctgcgaggcctccagagcccttctgggaggaggcctccgctggaacgtgtctgggtgaggagagggagatcggctcccaggcagggacggccagggtgcgcgcaccccagcttctgggccatcccggcgggagtctgcgctccttttaggcgcgacccccaggaaggtctcgggtggtgaccgcagattggagagtgagctgggctggggaaagagtgaggcggatcgcccccaacctccggcaaagtgtgcgcccccgccccaccatccaggggcggcggctcttgatgagctcatgggggcggggcgccaggagtcccgcccgcgagcccccccctcgtccccgcgaagcagcagtccggaatccgcggccagggacccgcgcaggcccctccttagctgaggggcggccgggtactcgggtcccgacccgcgaccaccgcacccatcaccaccacagcgggaactgcccggcggcccccagaagccccggcccggccgcagaggtgggcccccgagcacagaggccccgaaactcggctcgcagccctcagccccaatgtcggggggcgcggtggccccgggcgaccccccaccccgctcctggagcccacaggtggccccacaacttcgcggcccgcgctgcgcccgcggggcctagcacgctgccgcgggacctgcccaacgtggagtgtgtgcctgccccctcccgccccggcccccggcgcagcccttacccagaagacgaaattgaagacgaagagcaggtacttgatgcacttggtgcagccctccactcccatggcggcgcgggcggcgggcggcctgcggggcgcgggccggtcctgggcggcgggcgggccggcgcggggcctggcgggtggccggcaagggggcctggcgggccgaggggcgggggcgcgaagaaaggggcgcgggggcgcgggggcgcgggggcgcgtggggcgctgggcgccggaggcctggcaggatgcgcggtggggtcgccgccgtcgccgccgttgcgcgctcgctctctggccgggcgcgcgcctcgctccgcagtacttatagggcgccgcggtcccgcccctccataggccccgccccggccagctcacgccccgcccccggccccgcctcctgccgccagggcgcgcagccgaggggtatggggtcgctgcacctacccccaacttggcgcgtttcggccaggacctcagggcccaggtgcaccgtgctgggcgcgggaggcgtccccaagctgctgtcgcgctccgagcccccaagggggtggcagcagggccgcgcctgaggacaggcatgcagcgtctgcccaggagtgcagccccggtgccgggagaacaacccattcctccctccctcaagcaccttggacaatctgggagggctccccaaaggaggtgagcaccttggacaatccgggagggcttcctgaaggagttgatgccacagtggttggctttgcaaagacagcaagctttgctcacattgctctccggggctggaacctgggcaggcatgaggccccctagtcagtgttggcctcaaggtcctagtacaggtaaccaatccctgtctcacggaaggggagaattgctgacccatgctgtgggagtctgcatctgaaaaggtcactggggcctgagagggcagctcccagaacagtgtgaagtgtccaggaggccagagacacctataggagaacctccagatattgcatctatttcgtctacatcctggttgtgtcgtgccccagggatgccagcctcacaccgtggctcttccggaaggtgtggggccaggcctgctgcacttactgctttgggctaatgattcagagagtgaagggtgctttctccccagaggaaggagcgaaggcctttgcaggagatgacacactgacgaaggtttcccatgccctctccaagaaaactgatggacaacggggctgcatcctgggcgggggcttacctgggaaccacgtgggaccaggtccggagaaccatcctctagccagctcgtcttggcaagtgtcgtccaacccagtgctagctgatagaaccttctgcaacgatgggaatgttctgtacctggataaccccctggcacagatgactactgggtactggaaatgtggccacaaggaaccaaatttttcattgtgtttcatcgtaatttaaattcacatggccctgggtggccagtagcgctcacattggacaaaacagctctatcgtcatcatctgtgctctaccggttttcttggtggttaatttgtaaactggttttggcttcatgcctgcgtaagaactgcaagcactagtagtttatgcctggttttacattttgtgcctgtcgaagtgacattataagaaaagacactatatggtcacttgagagtcttcgaggattctttttgtttagaagggaatagaaaagggttccagtgtgaggaaacatttctctggatgtcctggacacctgctctcccatcagctccctgctgtccccagtgatggggacatttcccgttaaaggtgtgagctgtgtcctcagcagggggtggtaggtggagggagacactggctccactctcaggaagtgggaggagggggcagatccatgcacactgtgtccttgaccaccagcctcagaagcaggccatgcccagccagcagccagcctgcctgtcctcttcagccatgcatcaaatatttagtgggtgcctgctgtgtgtcaggcactgttccaggccctggctgtgggagccaggcagcagacccctcccctggaggatctgcaactctggcggagatgacacgtgtcacagcacgatggtcatatcagtgctggggagggacggaattcctaggatgcttgctagagggtcacagggttggggcactcctcaaccacggggctgaggcactccaagtgcagaggcttggaagagccacagtggatccaggccctgatgcctgagaaggagccagctaggcagagccggggagg

SEQ ID NO: 914488 - DNA, 4001 bp, Homo sapiens
accataccaaactccaatttatgccacttcagtgcttgaagagactgtggtcccatgttgatccaagccaaaccaggaccaggagcccagagagaaagtcctattcaagtctcaccccctccaggaagcctccttacccccaccccctgccctggcttctcaagtgtctcactcttctgaacacctccccctgccctacatacacacacagtctcctgcacacagcgcagccgccagtccgtctctgtcccacagcactttccagtttgttccatactgtacagcttatctcccagaagatgcagggagccaatataatgcagcaccttcagcgtccttcagtgtccaaccctgcttagatatcgggtgcccacattgcccctcgcccccatcccaagccaagtgtgcaatggtatagctggattccagccaccagggcagaacagacccatgaaatctcatctggttataagccctgggtgtgactgatcctctctacagggacatggtagggatgggggagccctcattgtcagcaactcaggcctggctagttcacctctgtatcctctagctctctctagcatatagtaggtgctcagtaaacatttttagacttatttaactcaacacttaccaacctcaagcaacattacagaaaactcagccactctttgttccagatgacacagtcctcatccctcaaatagagtgatgttggtggcaggtggcaatttctggctttcacaaggtcaggaggggctgtagccaaccccatctctccaagaaaaaaaaaaggctcattccccataggaagcaagcccatcacctgcccacccgcatcaaagcagctgtcacagagggaggtctcactggtttcctggcaccttgctaagtagtgtatacacattattctatttagtgcttgctcctgctattggatattgtcattatccccattttacaggtgaggaaactgaagtttggagggggaatggaatccaaatcagtttgatcccaaagcccaagccttgaccacagaactatgctgccccgctactggggcccagcacagagcacccaccacctccaggaacagaacccgtcagccaagaaattaaccccgggtatgcttcaagggcccctggggccctgggcttgaccctgggcccaaggattggtggggttttcccttctcttccccactcaccagtgtaagaactgttccccagtttccaacctcctgctcaggccagctcacctggaaaagccccactgagtttccaacttgaagtcttagggggtccggctcagttgaactgttagaattggtgggaagcaggtgaggcgggaaatggaacctccctgctttggcctcctcttccccagggttggtgggttcgagccccaaccgaggaaacagtgcactctttaaagcaattcgcttctctcagtcccattttgcagggagagaaactgcagagggcaacgcgatgggaacacctgtggcgacctgcagcctgctctcacctgccagctctcaccttccggcgttttaagtgagaaagggcaacgggagcgtggaattcacctggttcacttcctcctgctggaacccgggaggtccagagccaggtagagggacggacccaggatcacgcagctgtgcacggccgagtgtgagaactgggggttcaggactggtggctaaagctccttttcacccaccagctgccccgacctgtcactagttccgaggaaagttgtccgagccggaccgcagaagcgggggctaaaactaactttgcctatggttgtccggcaggctaccccggcccgctgcccccttgctcacctgcgggttctgctttctgctccgcgctgcaggcccagcgtcacccgctcgtgcctcagtcggcgtcggactgcacagcccggggctcagtcactcctcggccccctcccggctgcagccggggaacgccgcggactcggcaggccccgcccccagaagacacgccccctccgccggccccgcccccgagccctttgggaaggcggtgcgctcccgccggccaggccccgcccactatggccgtaccccaaccagcctcgcccccgggcccagctggagctgaggccccgccccgctacggagtctctcctctatcccggcagccccgcccccaggttacactggggattaagcccgccccgctccagccctgtccactcacggcgctgcctaacggtcccgcccagctcccgcctacctcgtcctcccggtctcctcccgggccctcccagcgcccccgcctccttcactttctccttcgagcccaccccatcccccggccctagtagggtgaggccacgcccctccccgcaccagcctgggctcagcgccttcctaatcctgccctgccctgcccctctcatctcgggcgggtagccctggggcccccacgctggcattccagggcgggtgtatccgggtgccgccggggaacggcgtgggagcggtttgtgtcctaagtcggggcctctatcaggaggcggcctgggcccaggaactttttgaaaatactgactaccattgattgaatccttgccaggggccaggctctatgccaagcgctgaatacagttctagcccttgaattcccacaactcatgggtactctcgttgcgcctattttactaatgcgcagtttaaggctcagagaagggaagtcgagggctctgaatctcatggaggcgggcgtgagcgggatccagcctcaggtcctgagtcacaggcttgagctgccccagcttgcctggactggcccctggggaagtagcccagaacaaccagtgctggggcagtgcccagcagctgcctgaggtgagggaggaggtgtgggttgatgagaatagtggcaggaggggctgtgggcctaagccctcaaagctggctttctccctgaagaaaaagtggcccaaaattgaggtgggctgcaagagctctctaggtggctgcggtgcccaccctgcgtcccagccctctgccctcccaggctccagaggactagcctcaggcagattacctggttaatgaccaggggcattcacctgtgcagctgacaaagctctttcacttccattatcacaatgtcctctcacaacacaccgttgtgggagggtatgattatgagcgctttgtacgagtggagtaagggcgggagctggatcccagcccagcactgtagttctcacagcgtggtccttgaaccaggagcaacatcatctgggaacttgttaggagtgcgtattttgaagccccatcccaacttactgaatggaaaactgtgggacaattggttttaataaggcctccaggtgattctgaatcacattcaagcatgaaccactgttgagcaaactgtaaagaagtcagggtggtctgagaatcacacagacctaggtagcttcctggttgcgttttaaacccaggacaaggcaagatacttaacctctgggatgagcccttaaacagggaataataataaaatgagccataacaatcataccgatcttgatggtagctgttgaagattacatgtgacagcattcataaagtatttggcccaccgcttgaatgccgtacatgctcagaaaatgttctcttttcagcaaaaagtctccttcatagcattcccacaccaagtcagaaaagtgaggctggagaatcctttaaacccagcagtgtgtcatacccgcagagagacaccctctatcctgcaagtggttaagatcctaacaagctcctagatgatgtggatgctggtccggggaccacactttgagaaccactgtgccattctgtcttgggctgggtttcagatccctaccctacccagcccatgcaaaatgggcataaaattcctcctattccaccctactccacaccccgctccctccgagctgggggtgtttgtgatggtgtatggcagatgctc

SEQ ID NO: 914489 - DNA, 4001 bp, Homo sapiens
tagcccctgaaggcgtgagtgctcaggatgcctccaggcctgaccggctctctcactcccagccctgcctccctgtctggacgaagcttttgtctggtcaagaacgtcctctttcctcacatcccagatacctccaggaagggcaactccagccactcccaggcactttccaggcctggattagccccaggttttgggaaggaattgggtcttagggaggcaggagtgatcagtcaggatggggggcagctgtggtctggcgccctgcctcagtttccccctgccaggaggtaaactccctgccagctgggcgggtctgtgggtgggacagagagctgttccacaggtttatcaggcagaagcccgcagcgggggcggggtggaaacctcattacagaaattcattgtctctttcccaggtctgtgtgtggagctggggaggagcagccccgggcctccccgtgggagttgaagccagcaccatagggacccacccgccagaagagggccgaagcccaggcccacaggcaggaggatccaggcccctggacaggctgcctaatcctctggcctcccacagggcatgggggctccgggcaggagcagggacaagtagagacaagcaggagaggaatgagtcacagccctttgagttaccttgggagattgtcaacagagggcccccatgccggggtcccaggcagaggtgctggaggcagtcagggaggagcacacatgtgtgtgcaaacacacacacgtgtgtgggtgtcatggggggggtgacaacaacacaggcagacaggcatagcacggaggcataccagggagacaggcacagaggcaggggcctctgactgcctcgccctggatggaagggttggggctaggggacaactccctggcacatctaggtggcagcctccccctctaccccaggccttgtgccttcccagagctcaggagtgccaggaacgctagttgcccactgggcaaacacctgcctcaccccgccctggccaggcccccgtgccttttccccatggcccggcagggtgtgaccagggaaccctccagctggcgccagtgcccacagtgggttcagggtcaccccgggccagccactcccaatgactcagatgagtctaccaggaaaggtacagacccatctccagctaggcccccctccccggccccggcgccacagcccccaaggagcttggccagcagcctgcacaggccaagggttggagatcggttcctgagtccaggctgcagtggtcttgtacccagggagctgggggtgtgtgtgttggtggggggaaggtctgcaagtgtgcgatacctacagatctgtgtgttttgcagtgccaatgcggtcggggtggtctgcagcgctccctgggtctctccatgagttgtgtgtctcaatgcatccgagaggaaggagaaacagagcccgtgtatcagtgggtgacatgcatgagggtctgtgtgtgtcctgcgtcaggtgtggcctgtaagcaaggaaatctgtaagggactctaggcggtgcactgggtacatgcgtctgcggtcgatacctgagcacaagttggtatgtgtgtgcatgtgtcggggtctgtgagagggagagagcgtgtgtgagaattggagtgagggtgaggtgtgcaggcgagtgtgcgggccgcgggggtccggtggtacgcgtcagggccactgcagggagtctgcgagggaagcccgtgggggtgcgggtccctgcgggaaagtctgcgggtgcgggggtctcggcgcgatatccctaggcccgcccccgctccgtgccgccccgccactcaccccagctcaggaactgcgccacgctgcgctcccgccgtagggggccgctgctgagctcgtggtgcagcgccagcagcagatctaggaggccgtcgagccccgggcagccgccggcctcgccccgcgccagctgctccagcgcgcgcagccgccgctccatggctgcggccggagcctcgctgctcggctacagtctggccgcccgcatgcccgcctgtcgggccgtccgtccgcccaaccgtctgaggctctgtccgcgcgtcctcccccgcccctctcccgccctccccgctgtcaccttcctccgccgccgccagcgcgccctcacctgggcgccgcgccccgccccccgacggacgggcaggtgcgcgccggccaatgggagccgcggctagaggtgaaggtgggggcggaggcgcgcgggggcgggcccaactcccggccaggaagtgcgggggcgggccggggagaacaactgacttctgcgcggggcgcggtggggttctgcggggtcggaaagactccccagatccccgcgcggccccagacccagacttacctgggccctccctgggccctgacccaggaggcgcggagcactgcaacttctctcgccccctgggtcgcagccgccttgcccttggctaagagagaggggctagggacgcccgcggccccggagccggatgggaattgtagttcgctctctccatggtttgcccgcgcttggcacccatcgcccccccgcccccgcccaaaaaaaagtttctgaatcttactttgattgtatcattagagttgatgtgggagacaggaagttggggtagggatggtcacgcccatttggcagatggacacactgaggcttgggaaggaggaaggcgaattgaggggctgaggacaaggtggctcttaagttagaccctggggtggaggtggagctgggctggtaccaacaccacaggcgttttaagcttcagtaggagcagggcctgaggtctgacctggaacgtgaagggcaaggagaggtctgagataggctggaggaggttggggaggggaggggctggctctgtccagtggtatttctgatttctgtccagctgggatggaccaggcaccatgaggagagatcaaagggtgggacatattggtggcttcagacaacacttttttttttttttttttgagacagggtctctctgtcacccatgctggagtgcagtgatgcaatcataactcactgcagccttgacctcttaggctcctgcctcagcctcttgagtagctgggattacaggcagatgccaccacacccagctgattttttattttactttttggagtcaagggttattgttatgttgaccaggctggtctcgaactcctgggctcaggtaatcctcccaccttggcctcccggagttctgggattacagacatgggcaactacacccggcctagacaacacttctttctcttttttgagacagggtctcactctgtcccctaggctggagtgcagtggtgcaatcgtagctcaccacagcctcaacctcctgggttcaagtgatcctcccacctcagcctcccgaatagctgagactacaggctcacaccactaggccaggctgatgttttgttttttgagatggtgtctcacgctgtcacccaggccagagtgcagtggcacgatctcggctcactgcaacctctgcctcccaggttcaagagagtctcctgcctcagcctcccaagtagctgggattataggcatgtgccaccacacccagctaatttttgtatttttagtagagatagggttttgccatgttggccaggctgatctcaaactcctgacttcaggtgatccttctgcctcggcctcccaaagtgctgggattacatgcgtgagtcactgggcccagccatgtttgtattttttatagagatggggtttcgccatgttgcctaggctgatctcaaactcctggactcaagtgatctgcctgcctcagcctcccaaagcgctgggattacaggctgtagccactggccaacacattatttcattaaaagacctgtttaggggtttgcctctcctctcgtactgggacctcgctgagatgggggcaggatcaggttgagggaggaggtgttc

SEQ ID NO: 914490 - DNA, 4001 bp, Homo sapiens
aatcgagggtgaggccagcatcagcggcccaggggagagctgggaattacaaccctcacgccccaggaatttagatttggcaactgcaagaccctaggatccagcttgccacgcacagtttctcatcttaaagctcccagtcacggcatggtggggtcattacggccctttacagaagtcgaagctgaacctcagagatgttaagtaacattggcgacgtcatccagttaggaagtggaagagtgggtacccagcctggtccacgtggttcccatgcagtgggccacgcctacttccataatatgtttggggagcgggagagaaaggggctcacagctaggctgggaacagtgggtccccagatctcctccatctacatcctgacctttggctgcccccgtctgcccaactttcatgtgtccagagatatgagaatgaggtctccatcaggacagggctgtggggagctgggaggggagctccctgcagcagtcggggagcagataggagcatcctagctctctgtgattgccctggacaggagccctggacctcccaatgagaaaatgacttccggcaggcagggatcctcctatcatgaagaatattaggccacctcacaccccctcttctcctaaatcaggagactgtccttaaatccagctccacctgggacttcctcagtaaccttcagcaagacgcctctcctctctgggtctcacctttcccatctataaaatgggctgacaacgaagccaccactaaagggccactggagatcccactgcaatattgcaggtgagagcgccaatgtacaatagcggggttcagcgggtcactgtaggttttatcattcattcagcaaatatctacaaggccttccttcctcaagcacttcgattctccggggccagtgctttgaacaatagcaaaaacgaagggctcctgaccccaggcgtccacctcctcccgccctcctagacctcgaggatgcagagaccctctagcggccgctgggtctcccggggtcccggtgcctccggagaggtgcccggctccgcggccgccaggtggcgcgcgtgctcccttgatcgcctcgtgtcccggaggactccgagagcgcaccggggtctccagcgcccctcccccgggctccaggcaggcggtccccaaggagctgcgcgttcaagtaccagatggggattacctgcgagatctttttgcttcggggtttctggtcccacaatcggggaaaaagggggcgattggggaccctgccctagtctccaagctctgggaggagcctcccccctgtgctttccggcctgggcgatgtcctagtgtccgctcggcacagggccagagctcgggcgtgcgggcccccgcccctcccacgggtccggctccttagctccggctcgggttcctgcgccgacccctccccactcctacccgggcggagcccagcccagcccggatccgtttcaggacattcgcggccgcagctaaagataggagaacaactcactatcggctaaaaatacggcccccagccccggtggggatgctgggcggcggggcacccctgggtctcgggaggggggcgggggcccggacacaaaatggagggcagaacggggaattcggggtcgggatgcgttgcgcccccacggaccgtggcgggcacgggcgaggctgcgggaacccagatgcgggtgggaagccccatggagccctaggagccctcgaaaggaactgagtgaggtgagaggcagagccagggcgcgagctggggcggggcgccacagagatgggcctctcgggggacccccgcgaagctgcgaaaatcccagcccgaactcaccgtgaggcgcgcagacggcagaccggcggacagcaaggtctcaggagctggacagcgcggcggccggacccgaccggcggtgaacttacagagtgcaccgcggaccccgcagccccgccccggcccgcggagccaatgccggggccgcgccagccaagcccctccccatccccgcccaggccccgccccactccgggcaccgcccggggctcccggcgtgggaggtgccgctcccgggtccagcggtcgcgcgcgccctggagtcctgtcctggttctggcggctgagggccgggtggcgcaggcggcctccggctgtgcccatgggaactaaaaccttcggttctagaagagccgggggagaggctccgggaagaccgaattcttcagaaatcgcagagagaccttggaccggatccttccctgcagggctgcgtcggggaagcgccggcacaagtatattcagcgacttccttggaagcgcctacgttagaatactacaaacttacaagctagttgatcagtttacctcccactagaaaagacagtatgggaaggcagaggccgcgtggcctggacccccgtctttgctgtcaggcttccagagtgaaggtggggctcatattcagactagttcctggtccattcattctttcagtcagtcagtcagtcattcctacagggccagaaactttttttttttttgagacagagtttcgctcttgttgcccagactgctcaccgcaacctccgtctcctgggttcaagagattctcctgcctcagcctcccgagtagctgggattacaggcatgtgccagcacacctggctaatttttgtattcttagtagagacggagtttctccatgttggccaggctggtctcgaattcccgacctcaagtgatctgcccgcctcggcctcccgaagtgctgcaattacaggcgtgagccaccgcgcccggcccagaaacatgttttgaagggcaggcaccgcacagggtgctggagacagactgaaggaaactgcacctctcagtgactcaagagagatttgttgagtatctaccaagtgcctagcgctgttcttgtccctggggattcagcctctggattgggacctgcagcccagagaagggaaatgggggaaatccaagttcccaggtacatcatgatacccttccaggtgggtaagtgctaagaagagtggggcagaggaagtggtgggtagtgacggggtggacagacctcactttctagaggatgacagctatgccagctcagtgtgaccaggatggttggcttcaatgctgtcagtgtgggaagggcttttagggaggcagagccgggaagacctcagtgggggaggcaggatgctgggggtgggggaagatgccagacaagctgggaggtccggatgggaagaaggggatcatggtaggtaaaataacagcccccctaaatatgttcacatctagccaggtgctgtggctcatgcctataatcccagcactttgggaggccaaggtgggaggattgcttgggtccaggagtttgacactgacaccagcctgagcaacatagtgagaccctgtttctacaacaaataaattagccggacatggtggctcaagcctgtagtcccaggtactctggaggcttaggtaggagaattgcttgaacctgggaggttaaggctgcagtgagctgtgatcacgccactgcactccagcctgggcaatagagcaaaaacccatgtaaaaaaaaaaaaagaaaagaaaaaaagcccacatccgaacctgtgtaatctatgaatatgttttgttacatgagaaatggaaatgaaaattgccaatgagggctgggcgccgtggctcatgcctgtaatcccagcactttgggaggtcaaggcaggtggatcacgaggtcaggagatcgagaccatcctggctaatatggtgaaatcccgtctctactaaaaatacaaaaaaaaaaaaaaattagccgagcatggtggcaggcacctgcagtcccagctactcgggcgcctgtagtcccagctactcaggaggctgaggcaggagaatggcatgaacctgggaggcggagcttgtagtgagccgagatcgcaccactgca

SEQ ID NO: 914491 - DNA, 4001 bp, Homo sapiens
agccccagggtagcccttctcaaaaccattctccccacagcccccagaggggtctttcttaaaacactcaaacttgactcggtcactaccttacccagaactctccaaaggctgcccacagacccaagaatgatgcccaagccatgagtgtggcttttgtgcctcatcaggatctgctctgccttagggtgcttcctcccctgctgaggtctgctgcagacactaaacaaattgctattccccgaaccttgatttttctttaaattcccaatctctgcaaacatggcttctttgacctggaacaaacctacttgtctttttttttttttttttttttgagatggagtctcgctttgtcacccaggctggagtgcaggggcgtgatctcggcccactgcaacctccgcctcctgggtttaagcgattctcctgcctcagcctcctgagtagctgggactataggcacgtgccaccatgcctggctaattttgtatttttagtagacacagggtttcaccacgttggccaggctggtcttaaactcttgaccacaagtgatctgcccgcctcagcctcccaaaatgctaggatcacaagcgtgagccactgcacccggcctctacttgtctttaaagactcagttcaaatgtttcttcttccacgaaacattccctgagccacatggtctgggttagctaccatcatagcatctagtattccttattgcagtcccagtacacaacgttgctatcacttgtcattggtctttctccccagttgactctaagccctatcagctcttcaaaggagttcacatttctcagtcagtatgtcttcagattgtctattaatgaaacatcctttgataataacttctgctaaaactgtaaaaatgtcatacacatgacttatctcagaacacccatacatgaaagctgaaggcataatggattagaaaggcagtacgtggagttaagacatagctcagcttttaaaggaagttccaggaaaatggtagaaatacacaaggcataaaaagttaagtgtattaagtcttcagggagtaatcaagactggcaatgcatgcaggtgcccacaggcaaactgtttttgcagtactgcaaaacagctccctgggcagatgtgaggagccaatgtgtgctgtccagctctagagtgacccagattctacttaattaagtagatgaaagtgaactcaccctagggctcctgcgaggtgattggacagctgggacctgcgggggacaataccaattgatcacatagctggtccccagttttgcccgcctaaccacccacaacactctccttagcctttacctctacagcatgggccacgatcctctttaagacgatgggctttctgactgcagccgcactgggtgtctggagaagagggatgaacgtgagctcaacattaggtgaggggccacaaggggaggaagtgagaaatctggggctcaccttcggccagatttcagggaggatgctcgggagttcagagcctgatttccgctgggacctccgcagaggcttagtaggagatggggcccttggccctggaaagagaaaaaagttaagtggtagaggaggactctagaccttagagtccagagaacaggttctagagacagcgagaagattcccaaacaagcccttttaagggcgcctcctccggcggcggcagcgggagggaagaggccatctttcaccggactgcgtcccccaaacggctcgacctcacgtctcccgcgcgccctccgctcaccggagcgctgagcggctcctccggaccgcgttcgcctcccagacataacttaggctccgtctcgagctcctccagcgccgccgccccgggcgcgcgccaaccgggaaggccactcgctgcaaaaaacgttcgaattacccgccctgcgggaaaggaagcggaagtgacgtagggctagcggtctgcggccctcggaaccccgagtcttttccacccgtcttcacctctagcggcagcggaggcgtggcccaggggcgcgatggcgtcatcagcgcgcgccgcacccggaagagacgtggcagcggagggataatcggggcggccggggctgaagggagaggcgcaggagccctggggagagtggtccctgcccttccgcgcctcgagccatcgctaccgcccttcggaaccagtgcagcggccgatcagtaaacacagagactggggtctgtagagaaggggcgggacttggagggggtggggctcaggagaggtcttgggggcggggccggtagtatcggggagcctctgatggaggggcctggccgggggcgggatccagaaggattgaggggtcgccggaggcgggatttatgcagggggtgtttctccgcataaggagggacagtgggcaggaatctgagatcggggcgaatatgagaggtgtctgggggagttaagagtggaaactgggctggtgagagcgtagtggtggccaccagaacctgacttcctaccaactcatgcccctttcccaggatcgatcatggggctttgtaagtgccccaagagaaaggtgaccaacctgttctgcttcgaacatcgggtcaacgtctgcgagcactgcctggtagccaatcacgccaaggtggggccttcaggggagcgactgagcagggcactgggtgggcaaggcggtattggcttcctccaaatccatgaggggccccgcgctagaatgtaagccccacaagggcaaggacttgatttattttgttcactgatatatcccccgttcccaagagagagtctggtgcacagtatgtgctcaataaatatttattgattaaacaaacgaaaggatgagtctcctctgtggctagagaaaaagagacagtcggaccttggggtgataggccgagcagccccagcaccagttgtgacatctctctcccactccagtgcatcgtccagtcctacctgcaatggctccaagatagcgactacaaccccaattgccgcctgtgcaacatacccctggccagccgagagacgacccgccttgtctgctatggtgaggccttggcacctcggggggatcaggccagcctcaggggccagcttggtgactggtttccaggccctcctcaagcagcaggacagtgagtcccccgagtctcagagcccagattctagtcctgttaaagttccttacctgctgtgtaagttcaggcaagttattcttcctttctaggcctcactgtctttcctaaaaattaaagctcctagttcctctttcctaaaaattaagccctgccaatctggaggtttcagcgagaaccagtcaagcttacgggtatgctggtggccgtgactattagctagccagaccggcatgttgctttcagatattcaggatccaccactgattccaaggctaaacagagaggaagtgagtttcccacattaaagttagctaaaagaagtcagcagacatatgtgtcatgactttgacctgaatctggggtaagagccttagctccagtttttgaaggagctcatgcaagagtcagctccatatgtgtttctccttgtgagtgcatgtgtgtacttgcaggcacttaatgtacattgtgtgtttaaatgagtgttagtgtgttgatctgtacttggggtgaatgaatgggtaaatgtatgtatgtgaacatatgaacacaggtgtgttgtgggagtgcaagagaatgcatggttgagggtgcctgttagcaaacctgtgagtgtatagatgtgtatgtgtgagggctcctgtacccatagtgtagatatagggaatgccacttgtgtttgattatgtgcttataaggacatgtacatttgtgcccagggatgtgtacatgtatatgtgtgcctgtgtgtgtatcgaggaaccttttctgaaactgttcattattagccattagcccaaagaatatgatgagtgcaggcccagaga

SEQ ID NO: 914492 - DNA, 4001 bp, Homo sapiens
ggaggccgaggcgggcagatcacctgaggtcaggagtttgagaccagcctgaccaacatggagaaaccccgtcgctactaaaaatacaaaaattagccggccgtggtggcgcatgcttgtaatcccagctactcaagaggctgaggcaggagaatcgcttggacccgggaggcggaagttgcagtgagccgagatcgctccactgcacgccagcctgggtgacagagtgagactctgtctcaaaaaagagtctctctctttcagagacatatcccaagatatgtgcaggtgacgtgccgtggtgcatggagggcacagagcctgctgtgtgctggtaggtgagggggcctgtgctggcctcaggattctgcaattttccttaataaagccgaaaaaaatgccgccggtcaagaagcaggatgttgggggagcggggctgggatgcaacagggcatagggtggttgggatttctctgaagactgcagtcctgagccggtgagggaggggcgtgcctggcgggagccctgaggctgcagtggagcctctgcacagtatgtctgggtttgactcggtgagaaaggagccgtggagggctggggtgggctgggcagccttggtttacaacatccacaggggctgttctgccacgtggagtggactggggccagcaaagggcaacagggaagccggtgggccagctggaagtttcccaaaatgagtgctggtgtcccggccctgatgggactggaggtggacagactctggatttctgggtcgagctggggcacagccaacagatttaccagtggggggctgtgggggacacgtggggagggagggcgagtgggaaccaaggtggtccccgtgactggcaggataaaggtgcctcccttgtggatggttgagggagtgggtgggagtcttgggcacactggatggggtgtctgctggacaaggggtcagtgacggggactccacagctcagggcagagtctggactggaggaaatgtgggcatcaccctcgggggggtggaatttgaaaccacaccctagctgacgtcatcaaagactggtcctggaccggcagggcagagcccagcagaggtggccgggtggggcggggagagcggggcggggactcaccaatgtgcctccgctctgacacagcagctgagcctcaagcagtgacttctcctgtggatgtagacaggtctgcagtcaccgtcctgccccacaggtggggagactgaggccaagtgggcaggcgctggcccagggtccccatcatcagtggtcagtgctgagggtgtgggcccaggcagcttcatcccgaaatggcccagccttctagggcaggcaccaccaagcatgggtgtcagtggatgcccgcaggcatagaactcctaggcccccaagggaggtgtggcctgaggatgcaggtgcccttctcccgggacccccatatcccgcccgcctgccgcccacacctcgtaatcaggagtcacgttgagaaacagctggtttccctggatccgaaatgcaaagggggtggacaaggctccgagggtcacctcctggccctccgggacgtggatgtccaccagcggctcggtgacatttgtgttctcctctacttcaaagatgtccttgttcacagagcagtctgtaaggttgcagaggagggatcagtgcctcccagcccctggctccccgccgcccgtgccccacctacccctgcccgcacatacactgggcctgggccatggtccccgggggtcggacgagcagcccggtgaacagcaggggaggccacagcagggcccaagaccccatcttggcggctgtcacctggcaggagggtctgagcgggtctggcgtctaggactggcgcagttcctacctcagcgaccttcgccccagccagacgccgcccagtttatgatcctttacgaccggcttctgccaagggggctcccgctggccggctggtccagcccactgccagaaggaggggcagtcgtttggcccaagttggactgagtgcaggggtcaaccagggggctcaggtcacaggcaccgaggcacagggcagaagggactggagagcggctcatgggtgccgtgggggtaggggcagggcaggggcagggctagggtgtgggagagaagctgggggctgggggcgggggctcggcccttggtgtcggggtgtctggaacctgcctccctagcccaggctgccctggcttggctcctcccctaagatctccctcaggcaaagttcctaaggccaccccttgaggctcagaacccgggtgttccccagggagcacctccctccctgcctgacagcaggttctgaaggaaaaggctctcctcactgtgtcctggggacacccctgcctgccccagagacaagtcggcttctcagggcggggctggacagggccttagtgactgaggctaaggcggggctgtgaggggcagctgggagttcctggggggccctggtgcccgacagagggggtgaggtgagactcgacacttgccctgctcttttcattggccccccagaagcccccagctctagggagaggccactgggtagggtcggggcgaggaagtggctgtcgtgaggggtaggtggagttctcctcctccaggcctgtgcgccgaagcttctggcctctcatggctggggctgggctcagtgtcctaaccctgcacggtgccctcatggtcgccttcaagccctgcacgctccgtgctccacaggctctgaggggtcaagccactggtccgaggccacacgagacagagggtccggagtcctcacgccagagtggattcctggcaccccaggtgacacctccaccctcccctcttcctgcccgcctgagcccccctggccccttcacaccctccccactaccccttacagaaacactgaccacatgggcccccgggcaggagctgagagggtgtccgggatcccccgagccccagaatgtttcctaatggatgacaaggggtggggcggggccctgcagtacttagtcgaggtacaggaggtggccctgatgccagagataaggatgaggggccgccgtgcctgcaggtgtaaagggcagctgggtgtggtcagtccctcctgggtggatgggcctccatccatccctcagccccgctacacaggggttgcctcgattacactgagtggacacagacaactcccagcgtctgggtctgattcctcctttattggtgccaagtaccacccctccccctctcccccatcctgccccccaccccaaatgcagctgcgctcctgggccgggcaggtggtgagggggttccttcctcatctgggccgcaaggttccttctgcagcagcgccagctggttctgaaaccataggcccagggggcagccagggagaccaggtcccgtccaggggcatcctgcagagacagcacgtgagggtctgagggctggggctggagaccccggccccgctgctggaattgggcctccagtggccaccagcgctgacccggggaggccaggacagaaggaggggtctggggtggggtctggagtggggtctgcggtggggcgggtgctcaccaggcctgcaggatgggcatgttggaccctgacgggcagagcagacccgcgctgagcctggtccaggccatgctgttctctgcgtcctgctcgctgccccccgccccaaaacagagttagtcctggagctggggggtcgcgcgttgctgctggggcaccacgccaggaccccccaccccacccggcctcacctgcgcttccccaccaggccctgtagcagccgctggagccgcgcgccctcccgcaggcggctgagctcgctggtgaacgtcccgtctgagtgtcgccgggccctgcgggcggtcgggggtcggggtcagggcgcactgggggcgggtggggcccggggggcgggcgggcctggcgggcggc

SEQ ID NO: 914493 - DNA, 4001 bp, Homo sapiens
ttccatgctgccaggcatcaccgccaatccagaggaagcgccctccaggcccaggctgcccacagcgccaagggctgtggaagcagccaggccctgtgctgccccctggtggcaccacaggaaggcccagggctctcagcgccacggctggggcggagagggcccaggtcccaccaaaggctgatggcctacagaggcaagtcaaacctcatttaatcacaccctccccatccatagtctcctcttcccctgtctctgcctggcccacccaggcttagctgaagaaccagacccagaaaggctcagagctgagagcacaactccaaatcatcttttattaatataaaaagggcatatttagcaaaagacacacagataaaagagtcactatggctcaggacacaaggcagggaggtgccaggcctgtgcccctgctgggggagaaggaggctcgggacaaagtgggagaagtgctgggaagggctgagcggtaggggccacaaaagttccggtgggcaacactgtcggcaggtcatgggtgggactcatggggacctcgctgctaactcttgttgtgggggggtgtccttagtgctgccacctggagggccactccttggttcctggaggggacccaccaagggacacaggacaggaagcccaggatggttagtgcaactcgggatgaaggccagggagaagcgggtgctctgcagtggccggataggtccagacgctgaggccgaggcgcttcctgttacgtgcgggcgttccgctctgtctctgccaggcactctctgactagggcccgggcatggatgatacctgggggtggggtggggtctcagcaaccctccacagccccacccactgccctccagaggaggacccctgcctccccactccctttccactttcggcaaaagaaattcaaatctaatgacggctagatgaaattagaggtttggttaatcctcaaggttgccctgttgaaatacaaattcccatgctcttccctggaaatggactcaatttcaattcgattcaaaacacctctctggtagtaatactggacatcctctaggcttggctcaggtggcctccagatgtccttccttccctcatgaaggatagtccagtgtcggtttcctgagcagggcggcctggcctcacttacctctcttcaggcgctccatggcgctcttgctgccagcataggtaggccggatctctttgcccatctcctctatgactgacagcaggtccgtgtaggtgctctgggagccctgggcgccgggtggcttcatcgcctatgtcaaaagagaacagggcagtgagctcaggcacctggcggggagggggactccagtccgcatccataagcaaggctttggccccactcacctgcacgtagcccatggaaggcggtccaaagtcgttaaacagcggtctgaaaggagcgccggctcctggcactgagcccgacggcgacgggacgcttcctgcagcaacaggcgcgagtaagaggtcagcgcggggcagggacgccgcctcccagcttttccaagcccaggaccgggttcgcccgattccctccaaaggatgcttcattccatgctgatcaacttcagggacaaatccctcccactgcgctccacctacaagcccttacgtgaccacgcccacttcacaggccagcaaactgaggctcagcgagggtaggcggcaggcccagtattgcagaactcaggccgtcttctcttcgagacctcgaccgcccggcaggcgagcaggggtggagctggatcctcacctgtagggaccggggtgcccggcccaggggtgctggagccaggggtgctgctgggagcaggggcgatgggtttgtaggacatccccaactcctgggcgcggcggacgccagccggccgctcctcgggggttggctgcggggccgctcagccgcgctctgattggcaagcgggctgcacgcccctggtaaatagaggtctggccggaagggcgagcgggcacgaatgctccctcactcccgattggtgcgcgaagatgtcactcgagcctccttattggccgagacctgccccagcaggtcgcaaccgccgccgattggcctccgccttccggacctcgcacctgtctgctccggattgggcggtggccaccgccctccgcaattggcgagttcgcggcccgggccggcgcgctctcaatccgattagtccccaggccctagaggcggggccttgggaaccgggacccggggctgggctgccggttcgcgccgaggggtcttcccgggcgcgggcgctaccctcgcgcctcactcgcgctgcttcagacgtctgctccgctctgcccagtttcggcccagcaggggttgctgtcgcagctgccgtcgccgctgccaccggtgccttgcgcgcttctccgctctgggggccgaaggacgcagggctttgacgtcccgagccctgcgccccaccccgtgcgcttttacgtcacctttcaccggttcaacacccgctccccgatctgcgcatgcgcccgcccgaggcctgcgtttgttcccatggcaacaggcccctcatggatgccgccacgtaccgttcttcctgcggcttggctcgtcctcaggtctaagggcgacctcaaagacccctttacccgcacccccaaggccccgcgctgctgcctaagttagtgacaatggccgtagggcaaaccttcgggattacttgcgtgccgggccccggaccaaactggtcaagagcaccgactggagccaaccgtctgggttcaaatctcagcaccacccccactagcgatttcccccaggcaagtttctcacctcagtatgcctcagtttccccatccgtaaaatggggaaaatgacgatctcattgggttgtgtggattaaatgaatagtcataaagtgcttgttgtttcattctccgccttcctgtcccacagggcccccatacctttccactccaccactcagacccctcccctcaagtctcactccccacagagttagacctcagaccctcctccactccctaaccctttctcccaggctccttctccaaactcaaacttctctggccttgtgtatcttcatgctcccagctttgtagatcttcatctctaggacagtcattcattcattcattcattcattcatccaacaagcatgttctggctgagcgcggtggctcacgcctgtaatcccagcactttgggaggccgaggcgggcggatcacgaggtcaggagttcgagactagcctggccaacatggtgaaacccccatctctactaaaaatacaaaaattagcggtgtggtggcgggcgcctgtaatcccagctacttgggaggctgaggcaggagaatcgtttgaacagaggttgcagtgagccgagatcgtgccattgcactccagcctgagcgacagggcaagactcggtctcaaaccccccccccaaaaaaaacacacaaaaaccatgttctgactccctcctccgtcccatgccttgtgctgaacgctgaggttacagaaatgaacaggccatggcctctgtactcaaggaggccttatactctgagacagggaagcaacgtcttctttacattgcagtaagtcaatggccacaagggataacgggacaggatgcattggaacttagaggaagggcctgccgggtggcatcacagaaatctctacagactaggtggcatttgagtaggtgggggtggaagcggagaccgaggggacactccaggtagagggactgtcatgtgcaaaatcttgggaaatgggagagcacaacatgtgtttgagaaccagccttttttttttttccttttttttttctgctggagagttcactgggaagtggaggtggagccgtggaaataaccacagggtcaggaaggggaccttaggtgacgtggatgtaaggaagctgagttgaccacg

SEQ ID NO: 914494 - DNA, 4001 bp, Homo sapiens
ggactcatggggacctcgctgctaactcttgttgtgggggggtgtccttagtgctgccacctggagggccactccttggttcctggaggggacccaccaagggacacaggacaggaagcccaggatggttagtgcaactcgggatgaaggccagggagaagcgggtgctctgcagtggccggataggtccagacgctgaggccgaggcgcttcctgttacgtgcgggcgttccgctctgtctctgccaggcactctctgactagggcccgggcatggatgatacctgggggtggggtggggtctcagcaaccctccacagccccacccactgccctccagaggaggacccctgcctccccactccctttccactttcggcaaaagaaattcaaatctaatgacggctagatgaaattagaggtttggttaatcctcaaggttgccctgttgaaatacaaattcccatgctcttccctggaaatggactcaatttcaattcgattcaaaacacctctctggtagtaatactggacatcctctaggcttggctcaggtggcctccagatgtccttccttccctcatgaaggatagtccagtgtcggtttcctgagcagggcggcctggcctcacttacctctcttcaggcgctccatggcgctcttgctgccagcataggtaggccggatctctttgcccatctcctctatgactgacagcaggtccgtgtaggtgctctgggagccctgggcgccgggtggcttcatcgcctatgtcaaaagagaacagggcagtgagctcaggcacctggcggggagggggactccagtccgcatccataagcaaggctttggccccactcacctgcacgtagcccatggaaggcggtccaaagtcgttaaacagcggtctgaaaggagcgccggctcctggcactgagcccgacggcgacgggacgcttcctgcagcaacaggcgcgagtaagaggtcagcgcggggcagggacgccgcctcccagcttttccaagcccaggaccgggttcgcccgattccctccaaaggatgcttcattccatgctgatcaacttcagggacaaatccctcccactgcgctccacctacaagcccttacgtgaccacgcccacttcacaggccagcaaactgaggctcagcgagggtaggcggcaggcccagtattgcagaactcaggccgtcttctcttcgagacctcgaccgcccggcaggcgagcaggggtggagctggatcctcacctgtagggaccggggtgcccggcccaggggtgctggagccaggggtgctgctgggagcaggggcgatgggtttgtaggacatccccaactcctgggcgcggcggacgccagccggccgctcctcgggggttggctgcggggccgctcagccgcgctctgattggcaagcgggctgcacgcccctggtaaatagaggtctggccggaagggcgagcgggcacgaatgctccctcactcccgattggtgcgcgaagatgtcactcgagcctccttattggccgagacctgccccagcaggtcgcaaccgccgccgattggcctccgccttccggacctcgcacctgtctgctccggattgggcggtggccaccgccctccgcaattggcgagttcgcggcccgggccggcgcgctctcaatccgattagtccccaggccctagaggcggggccttgggaaccgggacccggggctgggctgccggttcgcgccgaggggtcttcccgggcgcgggcgctaccctcgcgcctcactcgcgctgcttcagacgtctgctccgctctgcccagtttcggcccagcaggggttgctgtcgcagctgccgtcgccgctgccaccggtgccttgcgcgcttctccgctctgggggccgaaggacgcagggctttgacgtcccgagccctgcgccccaccccgtgcgcttttacgtcacctttcaccggttcaacacccgctccccgatctgcgcatgcgcccgcccgaggcctgcgtttgttcccatggcaacaggcccctcatggatgccgccacgtaccgttcttcctgcggcttggctcgtcctcaggtctaagggcgacctcaaagacccctttacccgcacccccaaggccccgcgctgctgcctaagttagtgacaatggccgtagggcaaaccttcgggattacttgcgtgccgggccccggaccaaactggtcaagagcaccgactggagccaaccgtctgggttcaaatctcagcaccacccccactagcgatttcccccaggcaagtttctcacctcagtatgcctcagtttccccatccgtaaaatggggaaaatgacgatctcattgggttgtgtggattaaatgaatagtcataaagtgcttgttgtttcattctccgccttcctgtcccacagggcccccatacctttccactccaccactcagacccctcccctcaagtctcactccccacagagttagacctcagaccctcctccactccctaaccctttctcccaggctccttctccaaactcaaacttctctggccttgtgtatcttcatgctcccagctttgtagatcttcatctctaggacagtcattcattcattcattcattcattcatccaacaagcatgttctggctgagcgcggtggctcacgcctgtaatcccagcactttgggaggccgaggcgggcggatcacgaggtcaggagttcgagactagcctggccaacatggtgaaacccccatctctactaaaaatacaaaaattagcggtgtggtggcgggcgcctgtaatcccagctacttgggaggctgaggcaggagaatcgtttgaacagaggttgcagtgagccgagatcgtgccattgcactccagcctgagcgacagggcaagactcggtctcaaaccccccccccaaaaaaaacacacaaaaaccatgttctgactccctcctccgtcccatgccttgtgctgaacgctgaggttacagaaatgaacaggccatggcctctgtactcaaggaggccttatactctgagacagggaagcaacgtcttctttacattgcagtaagtcaatggccacaagggataacgggacaggatgcattggaacttagaggaagggcctgccgggtggcatcacagaaatctctacagactaggtggcatttgagtaggtgggggtggaagcggagaccgaggggacactccaggtagagggactgtcatgtgcaaaatcttgggaaatgggagagcacaacatgtgtttgagaaccagccttttttttttttccttttttttttctgctggagagttcactgggaagtggaggtggagccgtggaaataaccacagggtcaggaaggggaccttaggtgacgtggatgtaaggaagctgagttgaccacggagtccagtgcttccctaactccagccattaggaaaactccatcagttttgccatctatttaacatttccttgtaattaattcacttttacaaaatcttaaatagaaaggaaaaggcataatgtccatttaatcatgtgctcagtatttatagttttctaatacatattcagactcaactactgttaaaaagaaaaggtgttgatcaggtcacccaaggtcttctgctcctactggtggcactgagggtgcgcttcagagaaatctactgtggatagtaggtgaagaggagccactgagggttatacctcctttggaaaccaccaagccccaactccttctgttacaggaaaggggtctggatccatatcccaccagagggttcttggatcttgcacaagaaataatttagggtgagtccacagagtaaagtgaaagcaagtttattaagaaagtaaaggaataaaagaatggctacggacagagcagccccaagggctactggttgctcatttttctggttatttcttgatgatatgcta

SEQ ID NO: 914495 - DNA, 4001 bp, Homo sapiens
cacagttttcaaaatttaaaaacaaaaccgaacgctgctctgcggcagccgccgccggttgctgctacatgaacggtcccagccgaggcccagcgcccttccaacgtccgctgccccggcaggttccctcggggctctttgggctctaaactgcgaggagaggggcggtcagcaaagccggcggggacccggcgggtcggccctccgcgcccccccaggtgcgctgtactcacttggctcaccgcagcctcttgcgcggggtctgctccaccgagcccacgccaggggcggcgcttggagagggacacggcgcggggacatcgcccgacgacttctcaggcgctgatctcttgcgcttggcgaagaaatctgcgggcgacagcgcgcgcggccggtcagggcggggccggcccggagacccgagagggggccgggagagggcgcggggcgcgggccggccggggtgggggcgccgtccccgcccgcgccgaggtccgcggcgggtcagctttgtttacgtcgccgcgcaatgtgctgtgtaagcatttccccttgtcccgcggccaagccccccggggccgccgccgcgcttaaccccctccacgccgtgctcacggcgcccggccgcgcccggggaggggctcccgcggccgggggcgaaaactgcgctcccggggggtcgcggccgggattcagcctcccaccccgcccgcgcgaagccgctggagggcacaacaacggggcggggaggggggtaagggcgcagccgcgccctgagcgctgcgggccctttaatgccacgggaggaggcgggaacccagcgaggcccccgagggctggggggaccggccggccggacaaagcggggccgggccgggccggggcggggccgtgcggggctcaccggagatcagaggcccggacagcttcttgatcgccgcgccgttggcgctggcggccgcggtgccggccgcgggacgtcccgaaatccccgagtgcagctggtcagcgagaggctcctggccgcgctgcccctggttcgcgccctgctcggcgctctcttgaggcgccgcgtccggggccggggccggggcgggggccggggccggggccggggccggggctggggccggggccgcgactggagccggggccggagccggagccggagccggggccggggccggggccaggaccgcgaccgcgaccggagccgcgaccggagccgcgaccggagccggagccggggccggggctggagccaggaccgggactgggggcggggtggacgccggggccgggaccgggacactaggcagctgctccggcgcctcctcgaggccgtcgagggactcagcggccggctcgaggggcgggctgacagccaccgcgaccgcgacgggccgcggcgccagcagcaggcggcagcgccccacctgcaccgtctcgcggtagaacgcgggcaccgagtcgctgtccacttcggtccactgcaggcgtccagggccccgcagcggcatgtcctgctggaagtcgtaatcccagcggttctggtcctcggcgttcagctcggccaggcgggcctgcagctcgcggctcagctcctcgtggtccaccggcccgaagaggctgcggcaggcgctggtgcgcactagtactgggaaggtcccacgggcgacaagacgctccatcgtggatgtgctgcggagggacgcgtcggacatggcccggggctgcgcaaacgcgggcagcgagagaggagaggacagcgagaagaaggggaaaggagaggaggagagggcggaggccgggcgcaagggagaccccgcgccgcccgactctgcgtgtgcgagggacgcggcggctacctggctgtccggtggtggactcttctgcgtcgggttcgcctgtctcgtccggacggcagccgcgccccctcgatgcctgctggctagctcgctcgctcaggcctggccggcacccctcgagcacagcgcacttggcctgtggaacgcccagcccgcctgcgccccctttatacgcgcgggccccacccccgtgcgcgcgggcccggccgcgattagcataatgtagtattttcagtttcaacaacaccacggcgattggcggccgccccgctgccccgccccgccgcggcccggcccccgcgcaccgcccattggccgcgcgcacacccaccgggggcggggcggggcgcgcggccggggcgcgcggctgattggcggccgcggggcgagcgcgctgtagcaggggaagggggcggtgagcggggcgggggcgggagttaaagggcgctgcgggcggtaacgtgacaccgcgacgcccgccccctcgccccatcccccctgcaacactcccccacccccccggctcccgccccccgccggctcctttgtctgcaggcgggggcctcagcccagcgcggcaggggccggctcctggcgggtccggtgtccggccaggcccaactcgaccccggcccggtccggaccccggcgcccagctccgtcccgcgctcgcccgtgggcctcctgcgccagctgacgaggcttggacccgccgctgccagctcggccctggcctgcgccggatggggtcttcggctgcccccgcgcggcctgctgctgctgggctggtgtcccttcgagggctccgcgcgcctggagccctcacacacctgctggccctaaggccctcgagtcgggaggggggacaggggtcagctccactctttccccgagggaccatgtgtgggacaccttgagagactcccaccagccccctggagctggagtctgaagccgctatctgcggaggcccaccctgcccagtagatggaacaggggctgagcccatcatgtcactgtcgggggtcccagcccttctcagccttgggccagaccactccagccccgggatctgcctgtccaggctggctggaagctgttgtactgggtaaaagtgaaagatctgcccgaggtcataggggaaggggctgtgaaggaccatgcccctcccccgcctgcagcccttcctggtacagacctcggtcgtgcgcgcacgcacacacacacacacacacacacgcacgcacacacacggtgcttcaccccagccaggccagaccaaaagagaccattatttcctgctgcctcccttttggcccacctaccatgaggcagggagccccctcctcaaaccaggagcctcccagatcgggatggggactgtcagacacctgttggagggtccagcagcccatgagatctaagcccctatctcaggtgagcctgtgagccagcagagagacctctgggagggagggaaggtgcggtcccctgaaccccaaccagcctgcctttgagtcccaagacacccccacccccatggaatgctgtggcagtgtgcagctgcagctgggggagcagggcgggtcttctgggtctcagggaagcgagatctgaagtgaggggggtgaactggatgggacagggcgttaacccaggagaggggccagggccattcttggctcttgatggtggaaccaaaagccatgatttatgtgcaatttcatattcttctctgtgcacaatttacaaatttcccgcaacaagcccagatgtcacaattttcatcttaggaaaacaaagagaagctgaagaaggctccccaggccctgcgaacccctcaagcagggctcatatcaactggcctgggggcagaaagaggcaaagtctagtctgctccatgcccctatgctgccacctccccagagactaggagcaaagggctagagtgggtagtgacctagaggcccccggatacccacactccaaccatcaggactcattggccttggtgacaccactcagagggtgtagctgccatcatcctgtgttatagaagagcagcagagaccgcgtcagccgctgaggccgcacagctggaaggaagcagggctcagaactcccgggctgcct

SEQ ID NO: 914496 - DNA, 4001 bp, Homo sapiens
taacagagactgcagtatttggtgcttctcgggttccaaagaatgctttctagttaagcactaatttaaaatttccagaaaattttttgaaggttttctttcatcttatcttaaaagttgaactatccccaaattttcagctaaaaatagactgagggtgggggagaactacaaaatgtcatagaatgtttagaattatgctgacaataaactcatttcattttctaacaccctccccaccttcctctccttggagacactgtccactaggtatgccaagtgtcagttgggaatttgagggttatgttatcagcgccgaaaggaatcagaattcactgacttggcgtctttcatctttactggcataggcctgaaaataaatctcatgtgagcttttagtccaacctcctgtttttcaaggtgtctggtttgggacacaaaggctgactttctgttgatgaggttctctaaattctggattcccactggaaagcagtctgcccttaaagcacctgccaccctctgtcgtcctgatgaggaagggcaggcattctggaaacagctccttttggagagccttccacctgatttggtggggttagggagaacaatgaagggaagggcaagagagtctatctatccccctcagtgatttattgctgaaattcctagatgtggagagaaagcaacaaaggtctggaagctgccgactgaaataaatagcgagctgtaatgtatttagcaaatgataatgcaatccacagaaagctttacagaggagaaggaaaaatacactccctggggctgggaagtcagtgagtcttgtgaaggcagagaaagatacattgtgcaggaaatttctcttgcttctccctacacataaatcactgtctctcgcgggcgctctgcagggatggagattgagagaggccagggacccggctcccttgggaaaacgcgcgggcgccctagctccccgctctgcggcatctcacctgcccccgaggaccatcgtcaagaagaggtttcgtcgtgtcactgacacctcaccccgcctcctcccgcgaggtgcctccgagcccccgaggacgcggaacgccggggctccccgccgggcaagcatcagcatccagaccccgcacgcagccctgcacccccacgccctccagggaacgccggcccgcccgtccccgggacctcccgtcccctaagccaaggccccccaagcccagtgcccgcgcgccacccctccctccgaccctgcggcgggacccccacccccgcacctctccgcggggctggctaagcctccagacctcctgcgctgcagccggctcggaaagccacccccaggtcatccccccgcgcgcgcgcggcggcggctacggtggcggcggctgcgatccgaacgggcccctccatgcaccgcgcagggcagaggagggagcggcgcctcgcacgccggggctggggcgctgggcagggcgggcgggcgtggggtcccgggtctcctcgcacctagccgcgcgagccgggctcccgggctcaggggaggggagctgaggggcggagtcaccggggcgcgcccccgcggctgcgctcctccccgccggggagcgcgggcacgtaactcggagggtgctgggccggcccggagcacgcgagcagcgggaggagggaccggggaatgactgacggaggcgggccgtagaggccgctgtgccccgccggcccgcacccggccggagtgtgcgcgcgcagcctgccagatcagcggcgggggcacgggccgtaccaagtgacggaggggggcacgctctgggcaggaccctctcctcgtcattgacctgcctactctgcaagagagataccccaggggagcatagaagaggcttttcttgggtgtaggacaggtaagggtgagttgccttaccaagtcacggagattcccatcatgcctgcactcacgctcccctcacctttcattcccttggagagacggctcttctggcaggtctccaaatggtcgactctgtcccccgaggccccgccctagcctcgttcgggccccgccctagcctcgttcgggccccgccctagcctcgttcaggccccgcccctcgccccgccccgcccctcgcctctacctaagttctctgagccgccaacgggtgcatcccttctcccggttcttgcctggtctctcttagggttccagcggcccaccgcttatacctccttcgcctttccaccactttccatgtttaattccttaggcagcttcatctgattcccccaccaccacccacccgccctgcctgcacataaacgcaagcaggtagcaaaactcaggggctaggagaggcgtggtgtgagcctttggccccagagtctttccaactcgtccgttggacctgccccaagttatctgaactcaatgaacttcagttgttcaaacagaaaaaggaaaaataaatttctattcaaaatgttgctgtgaagcgtaaatacgatactttgtgaaaagcacctgccactcagtgggcattcaaggactgtaacttctttataaattgttattattagcagttagctcttttttttccccatcatcattacttactattagcttaactacaaaaggatccctaataatagttaagtttataaatactcagtactgaacttcaggagaaatatgccagtcctcccttaccttcttacgtgaattttaaaaagaaatgctttgaaagtgtggtattgttcaagcaggttagctttctgcattagctagattcagggtttttgtaaagcccctggaaagaaagtcagtacaggacggaaaaaaaaaacacaattttttttcttaagacggagtctcactctgtcgcccaggctggggtgctcttgttgcccaggctggagtgcaatggtgcgatcttggctcactgcaacctccgcctcccgagtgcaagcgattctcctgcctcagcctcccaagtagctgggattacagcacgtgccaccacacccggctaatttttgtattttcagtagaaacggggttttgccatgttggccaggttggtcttgaactcctgacctcagatgattctcccgccttggcctcccaaagtgctgggattacaggcgtgagccaccacacccagccagaaaaaaactcttaactctagtttgtcctccactgttctattgttcacttttggagaccaagaatctatatgttattaacaagctatggtaaacgatttttcattcggcaagtaagtctttctatagaggatttaactgaaatgagagttttgtgtggatgttaatagaagtcttgcaaatttattgtggctacagagaattccaggttcttctcctgggacataatgcactttgtgcacctccagatctcacagtgccatttgaattcactatgcctactgttactcatagtcagactaagaaaaaaatcacaatgtttgttgatattaattacttcctctccccctttttttgtaaagcagagaaatcatttcaggtgtaaaacagtttttcattaatgaatcattcatccatttgttcaacattaagaaacaatgtgcagtcccaagcttcaaagagctcacagtctaactgtgatacagacacacacgtgggtaagtacaaggagacatcttcagtgcaatgaacagggagctgtgtgaacacaaggtcagtatagtattgagtatagtattaagaggtgatagtattaagaggtgatagtattaagaggtgatagtattaagaggtgatagtattaagaggtgatagtattaagaggtgatagtattaagaggtgatagtattaagaggtgatagtattaagaggtgatagtattaagaggtgatagtattaagaggtgatagtattaagaggtgatagtattaagaggtgatagtattaagaggtggagactttagaagctgactaagtcatgaggaccacc

SEQ ID NO: 914497 - DNA, 4001 bp, Homo sapiens
tgtcttcctttacatcaattcctgcagcagttaccttttccccaaaatggttttcagtgtgtgtctgatatgtgtaagtatatcccacatatcaaagttaccacatttccatttactagtgggagctttcttacccctgggaggactttcatgttgtgaagagcattctgagcttctaatgcagctttacgggtgtaaaatgtaacaaaacagcaccctgcaataaataagatttcataaaatcaaactttggaaagcagagaattcctagagcaatccttcctccactgacagatcagatcttaaaagagggctgggtttattaaaattagtgagagggggagggtagtggaaaagaacgaatagaatatctagcagaggaataagagattattttctatacactttattgttttagtctcctcctagttagttacactataagtcttatttagctgctcatgtaacttctctggaaaatacgacttctcataaagaaaggtcatgtgccatttgactcaacctaccctacttggaacaccaggtggtatatgagacaagaagacagatggggctctatacttttgcagcctgtagtctaccaggaactctttctttccctgctctctcagaataaaccactccctacttcgtagccagattctaccatatgcctcaaacataattatcacttattaaattataaaatgacttaagagcaagcacctcttaacatctttttttggactcttggttctcatcaaatataattaagcttctaaaagcacatggtgctgcctcagatctgtagattttgtgctttgtatctttattttgggtagtaggagaggaagtatatcttgtaaatcttgggcttaaatgttctgacactcccatattctcatgagatacaatatagatttttttttaaatcatgctgcagcagttagaactacaaattactgaaggttatattgccagtcatgttcagaaactattatactttatatttttagttaaccatgccaaaaagagaaagtaattcctctgcttctagatcctctgctattaagctagtttcaatatgataatcatgcttgcttacatttgcactgttggacagctttcacagaaaattatttgaaaactggtaaaatggaaaataagaacatgtctgtgtgtatatacggggcaaagttaatacctatctaccatcagtcttgtgaaacttccactctgctaggcaattctggaagcagctccgcctttcctctcctgttcactttgtggcaacagcaaacaagctgcctaaacaaatcctttctatttgataaactatcccgcaaggcctctgtaatactaacaagaaaccaatgggtatgtggacagtctttctccttcagcttatgctagcccaaacactaaagaaaactttatgtggtttaacttcaattttatctttgttatctgttcccaaggtcaaataagacactcacgtgagtctgtctcttaaatttagaaccctcacaaaggactgcccaagacccaatttacaaattatcctcatgctaacaccttaactttttaaagccattaaatatgtttggattacaagatattactactataaaaggacagattttttccaatagacagacagacaggagtattctggcaatgacagagagaatgcacatgaaagaaattacatataaaaatccaattttttgtatcctgttaaaaacccaaagccctcacctgctctgagagtcagtggaaaaaataagataaaccaaaacccaaagccctaacctttgctctgaggcgggttttggctcctatcccttaggacgttgatttcatacacagcaccatactgttcgaagagttcccgcaagtccttttcagaccaggtccttggaacctggcccacaaacatcttgatagcatcaagatctggttggtctgggtggtccagggtgccgttcattttctttgagctgtgtgagataaaatgaaacttctattatgtaataatgttgctttccagaggaaattttcttttctttaatgatcttaactagttctgagaacgtaagggaaaaaaaatctacttctttcactacttccattcagtttaccagagttccctggttctccctcaccatggccacccattccatcagatgccaaactaaagtcaccattctgattgggacatcccagctgttaccagggaactgacagtgtacatttcttatctagcatgagaattaccatgctagaggaggaacttaaagggtaaaactcccaaaacaagatcaagttttaataacttttaagcatagttaacaaaacaaacacttaaaaaaaggcccacaaaataacaaaggactattgattacaaataagattcagaacacttcaatgtatacaatgacaggtgaagtttcctttcagtagaagttagaaaagaagcacttgattttcaaggattaaactaaggactagaatgctggcctttgaatgtagctgactcatgtataatcataatgctcgagttaggtctccagaccaaaacagagctccacctcttatatttccagatgattgtgcgatgaacataaacaatgttaccatcattttagattttctgtttctgagttatccaatttactgctattactctaagaccagttaagattcccttactgagggcaaccattttaacgatcccaagtttctctagtcctatcacattgtacttgtaattctcctatttcagttttattacctttagaacctgaaggataatcagctattttaataccttcattcctatcttgccactgtaaacaacctaggtgaattcttacactatagatgtttccactcagaacataccatcttgttttttttttttttttttttgagacggaatttcactcttgttgcccaggctggagtgtaatggcctgatctcagctcatggcaatctccacttcccaggttcaagagattctcctgcctcagcctcccaagtggctgggattacaggtgtctgctaccatgcccagctaatttttgtatttttagtagagacgggctttcaccatgttggccaggctagtctcgaactgacctcaggtgatccacccgcctcggcctcctaaagtgctgggattacaggtgtgagccaccacgcctggcctcataccatctacttcaaagtccttcgtcctatttgtttctaaatttaactctgaacatttatctaaaccattaataacttaaattcccaatatctagcactattagcttttctgttagtatctgcttaatctaaaaatcatatacaaaaattgccacgttctaatatccaatcccaaacaacatgctagttttttttttttttttttgaggctgactttcactcttattgcccaggctggagtgcaatggcatgatctcagctctctgcaacctcctcctcccaggttcaagcaattctcctgcctcagcctcccaagtagctaggattgaaggcatgcaccaccatgcgtggttaattttgtatttttagtagagatggggtttcaccatattggtcaggctggtctcaaactcctgacctcaggtgatctgcccacctcggtctcccaaagtgctggattacaggcgtgaagcactgcacccagccaatgtgctagttctctttaaacaacaacaaaaaaatcatttttccaccattgctatcttctgaatagtgtctgaagatccttaagaatgctgaatctatgaaagtagctcaccttcttttaattactatatattttctttcttttttttttttttgaaatggagtctcgctctgtcgcccgggctggagtgcaatggtgccatctcggctcactgcaacctctgcctcctaggttcaagtgattttcctgccttagcctcccaagtagctgggattacaggcgcgtgtcaccatgcccagc

SEQ ID NO: 914498 - DNA, 4001 bp, Homo sapiens
caacctccatctcccggattcgagagattctccggcctcagcctcccgagtagctgggattactggcatgtgccaccaagcctggctgatttttttgtatttttagtagacacggggtttctccatgttggtcaggctggtcttgaactcccgacctcaggtgatctgcctgcctcggcctcccaaagtgctaggattacaggtgtgagccaccttgcccagctgaaattttttttatcattaacacttgaagtaggccgggcatggtggctcaagcctgtaaccccagcactttgggaggccaaggcaggtggatcacccgagatcaggagttggagaccagcctggccaacatggtgaaaccccatctctactaaaaatacaaaaattagctgggcatggtggtgggcgtctgaagtcccagctactactacggaggctgagtcaggagaacccgggaggcagaggttgcagtgagctgagattgtgccattgcactccagccttggtgacagagcaagattctgtctaaaacaacaacaacaacaacaacaaaacgccaggcacagtggctcaggcctgtaatcccagcactttgggaggccaaggtgggtggatcacctgaggtcaggagttcgagaccagcctggccaacgtggtgaaaccccatctctactaaaatacaaaaattagccaggtgtggtggcatgcgcttgtagtcgcagctactcagaggctgaggcaggagaattgcttgaacctgggaggtggaggctgcagtgagctgagttcgtgccactgcactccagcctgggcaacagagcgagactccatctccagaaaaaaaaaaaaaaaagcaaacttgaagtaataaaataggcttcatttatttaaaaaaaaaattgggtacctgagattattccaaaatatttcctagcaggagggggaagtgaataggtaagaattctggcagcaataggctgacagatcttgcacctccaactgggcctgttagagtccagtatatcttcattatggattaccaaaccacttgttctgagaacacttatttatgtataaacatttattcattccttccatcaaaccaaaaaaaaaatttctttcatgaagctttcaaaatggacacactggaaaaatataaactaataaaatgagaccagggaagttataaattttaaaaaaggccaagaacaaaaagaaagctagaatataggtgtgctaatcagagtgtcacttactgaggctgagctgtaaaatcaaagagctgccactgattttaatctccaatgacaggctctacatagggtgcacaatgattcatagtataaatgggaaaacattaggacagtaaaatgagaagggcactaagaatagccaagaaagagaagatgaagcagatataatgccacactcaaaagaatttggaaagtcagtaaatatacaggatccaggagaggctaagcaccaggtcctagaccctaaacaaataagcatccaaaacctacaatgcacaaggtgcagaagagatccctaagtgattcagagccagaatacatcagtgtatagtcacacagaactctgcatccataccacacagccacagaagaagctgcctcaatcaaggtgtttctccagcatttaataacgtcctttcctctcctcattgactacagttacaaatagtatgggcagagaactgtctcatccccactcagctgacaagttctattcccaacactgcatgcttatgactcatgaggggatgggggaggggagtgaaaggaaactgtaaaacaaagcaacaaacttgaatttagacttacactgaccaggagtaagaattcatcactgtttaattagaatatctcataacaaaccaagaaagtatccttttaaaatacagtaacaaacccagtatcttctgaaaataacctgaaatttgtctacatgtcatgtcttctgctattccttaaacagacatgacaccaaaaggcattacaaggcctctgtaaggccaaactttacaaagcactcaaacagcgcaaacagcataggttgctgtggggcccaaagcaacagggcattccccacagttcctttcctggcagacagcgaagtcaacacacttaacccctactgcactctttcaagatgtgcactaaatcatttcttaaaggggtggaggtgcctcatctttttatactcaaattttatgtcaaaaaatttgagtgccaggaaaggaattcaataccaccccaagagctgatctttgtgacctgtaacaaaacaaagaggaaaaaaaaaacactaccacttcaacaaggtatgtttctaagggaacccaaagaccatttctgacatcacatttccctgtttggtaccctctcgccaagacggtattttgttaaatacaaatcttgtctcctcaccccatccctaacaacctgaagcattctctacaatttacaattgacaaacctgaacacagcaaaacaacaaagacaaacgagtcacctctttcacttgaaaacctcagtcctccacagagacgcacacagacagacagatggatgcacgtaagaacacaaactgtgtgccctggctgagtcctgagcaggtctgagccggtgcgggtgccaaagggtggccacacggcctagctagtgggctgctcctgctgttgctgtacaaatatagcaagctaaaaagtggaacagcagcttcagcagaacagattctgctccgtgctcagagagggaggagcagggaactgaacagctttacccatacatggttgctgaaagggggccattagtgaaagcccaattatctcacacacatgcattctgttcacatgctccagacaaaaaacagaaacacacaggctggtacttgaaataaggtttgagatattctatttcagtcaaggaacttccaaataatttcagtcactgacaccaagaatccctcagccacgggaaatggaaaagacatttgaaaacctttactaggtcagattcttcccagatcagcagtagtggtgaggctcaatttatcatttaaatcctaaaatttaacatgcaaaaaaaggttattctccattcgagtgaacaatgttaactttcactagttccttgctgctttcagaatgaaggtctcattccaactgtgtatgttttgagctcttttttattttatggttgatacaagttaaaataaactctaatataatttttaaaatctatgtctgaggatgatggcttatataaccagaagccaaatatttgtgttccaaaaattattttacttagaacaattcatttagattcacttcaatgtgaagtatgtgaaaagcttaattgctgaccagagtgaattttccaacaataagaaatgcatggctgattggctcaaatgattctattcttcagcccttactgaagtacttagtgcataccacctatgtaattttattccccccttatagagatggggtttcaccatgctgcccaggcgggtctcaaactcctaggtacaagtgatccactcacttcggcttgccaaagggctgggattactggcatgagccaccaagcccagcctggttatgtatttattcggtatcataggggctacagcacaaatcaaaaccatagtatcagtgacctccaatctaattcctagatgagattaacatgagatattaataataaaggcagacagtacatgactactgcactaaagcgtggggtacaaactataaatgctatacacattaagagaagagaggctggccttgatagctcacatgtataatctcagcactttggtaggccaaggtgggtggaccacttgagcccaggagtttgagaccagcctgggcaatgtggcgagaacccgtctctatccacaaacaaacaaaaaaacaaacaaaaaaaaaaaaggaagaaagaaaagagagaagagagactgagaacaga

SEQ ID NO: 914499 - DNA, 4001 bp, Homo sapiens
aatagaagttgaggcctgtgatctgggccaaaggccattcttaatggaaacaggtggtggactgtcatgaggaaagaaccactaggggaaccataaccttcctggttaaagcaacaactgaaagctccagctttgctttaccaacagtgctgcttcaatcttggctaactcatgatcagaaaccacatactaggtaagtaaagcctgaagaatataaaaattaacatgagaagaaaatcactgtagcaacagtttgtgcatgctattgtaattccatgattttctaagtggactctttaatgctaaaacagaaagggtgattctatattgagacgccttcattctcaccaaggattaatagagaggctgaaacttccaaagcgcttggagagaagctacacttgtgggcaaggggaaagcatccaattaaagccttcccaattcatgggtaatcaaagacagtgaaaagaactttaaaaggtgaagttccgggcgggggcggtggctcacgcctgtaatccccagcactctgggaggtcgaggcgggtggatcacccgaggtcaggagttcgagaccatccagcctgatcaacatggtgaaaccccgtctatactaaaaatacgaaaattagccaggcctggtggcacatgcctgtaatcccagctacttgggaggctgaggcaggagaattgcttgaacctggggaggttgcagtgagccgagatagcgccactgcactccagcctaagcaacaagagcgaaactccgtcttaaaaaaaaaaaaaaaaaagatgaagttcttgtaaaagattcattatttgtaacctcttacactgcacacattataaagcatttcatgctctttaaaactgttatacagcctttttactcgaaggtaataaacctacagctctctcctggcgagaaagagattccattttgcggaaacagattccagtcaaaatcttaccacattcccctcaactatgggtatgagcctaaaccaatgagaagctccttggtgcatgtgtaatggtctccaagaattacaacaacatcctacccggaggaccacaaccacgacaccactggctttaaaatcaaagcctggtccctagcgaagaaagcgctttaatgtgctcctcccgctcccgggtgcgagattcctgcccagctactaggccacgactgggtgagcacctgatgtggggggagggcgagccaaggccgtagcggatctggggcgaggaacgaggggctctcgaggctcgggaaaagcgctgccttctaggggcgcggacccttcggcacccacaggagtggacactaagaacacgtgagacgacaggggcagagatggggtgtcccgggcaggtagcctgggtccagcacggcagccagaaagacgaggaaaacggagctggccctgggcagggcacgaggcctctgagcctagagagtgaaggtaaagggcgcggggagaggaagcaaagccacgaggagggcgggtctccctgggcgcgggggcacgcgctgggcaaacgcgacaggacccggggagccggggaccccgacatgcaggaggagatcgcagccctaccccaggacgcagggaacgagaaaaggccgcgcccggagggccctgtgacccgcggcctccctaaccggacccgccccgcggcgcctccctcttgccttttttcccctccctccctcccgcggcccgttatcctgcggccgcagcactcaccagcggctgcacctgagcctgccgctgcctcagttgctgcctgcgcctccgcagccgccgccgccgcctcgctgctgaggccgaatcccgggggagcctccgcgtcccgccgccgctgccgctgccgccagagcagaacaccccaaaatggcggcacttccggcacctaccaccggcggggagggcagaggaggagggggagcgcggcgagggggaacgtatcaccgcggcgccgcccgcagcgccgatgcgagcggagcgcggcgtaggggcgggccgagcgccgggcgctgcagcgccccctcgggctgggaagtggaggagcagccgcacctaagcccctggggccgcgggcggagccctcaacctagggagctgcaggggcgcatctctttgtctccgatccctactggagggaagagccaggcctgggaatctgaagttctcgactccgcccatcgcacccacaggagctctagatgaccctggtgggcaaggaggcacccctactgggcactgaataggagcataataagatatttgttgaataaatggatgagtgagtgactggtgcttggccagcgttgggcacatggcacgcccctttttgccccagcagacaagcaacagcatccaggccttccttctttgctgggatgtgaatatgtgtgttccaagtgcagggagtgctttttagcaagataatcagtgtgaacgcacaacctggcaacgatcgctgcgacataaggaagttcacaaagattctattaagagaccgattgcccagccataacctgcttttaccgaaaaaaaaatatatatatatatttttttttcttaactcaggttaggtctctaaagacttcctcctgagttactctggaatccctgggtctagatggaacgcaagcagtacaatttgttgttgttgttgttgttgtttaagccaacatttattcctaggttccagaccttgtgaggcagttaaatgcagattaagaaagaaaactttgttctggaagcttttggccccatcaacatgcaaataactcatgggatggtttctctctaacatcatctggcttcccagagaatataatttttatacccacaaatactgattatatcctaccttaccacaaacaacaagtgggcttccaagcagaagcctcaagggttttcctctttcgcctttgggggggaaaaaaactaaccagagtttttctggtaccatatagtccttaaattgtacatgatcatattccctaattgtactgggtagttttatatacattcataatgctgatatatgatcttgttcttgttaatagttttatgtgtagttgactgaaaacatcctatatttatagaccattatagcttacagaatgttgtcacaaatattaccatatatttgctgctataggttgtagaaatgtttcaagcagagagtctgtctccttttgtgctccatagaatcatgtggatatccacatggctcacttcctcacctccttcagactttgacttaagtgtcaccttctcagtccagtcttccctaagcactctattttacactgcttgcatgcatggcatgtgcacacacacacacacccatgctttcaatcccactttcatttttatccaaaacatttatcattatctaacacagtttttttttttttttgagacggagtctagctcttgtcacccaggctggagtgcagtggcgcgatctcggctcactgcaacctccacctcccaggttcaagcaattctcctgcctcagcctcccgagtagctgggattacaggcgcgtgccacgatgcctgactaatttttgtatttttagtggagacggggtttcaacccctgttggtcaggctggtctcaaactcctgactgcaagtgttctgcccgcctctgcctctcaaagtgctgggattacaggcgtgagccactgcacccggcctcacagtatattttgtatttatatattttacttgttttattgacagtagcccagaaggtaaaccaaaggtaaacttcatgaggatagaggttttgtctgttttatttcactgctctatcctcagggccttgataatgcctaatccatagtacatgctcaataaatattgttgacttactgaataggtatatctaggtgccagatatggaaaacaaaatgttgcgcctttagaagcttcttggaacctgcccatgagctaaataaggaaaggcaccatg

SEQ ID NO: 914500 - DNA, 4001 bp, Homo sapiens
gagttcgagaccaccctggccaacatggtaaactccgtctctaccaaaaaatacaaagcaattagctgggtgtggtggcgtgcacctgtaatcccagctactcgggaggctaaggcacaagaatcgcttgaacctgggaggtggaggttgcagtgagctgagacggggccactgcactccagcctgggtggcagagtgagatcttgtctccagaaaaaaaaggcagccctatcactagtgaaacactggctccctacaacctgtcccgacaactttaattaccagttgtaatagcattttactagaatgttgctaatctttcattctatttctattctagagtgggttaacaaagaaccccaatggtgcccagaatacattttgataaggaagctgacagctatttctgaaaagcagttttatcaatctgtattacggaggcaactgctcccagattgccccttccctctgttgtttgtgtgccaattctgaacttttgcatcctgtttagtgctaaagcataaacacaagtcaatatatgtagattacagtttacccaaaagtttagcagggactcaagattctagagaaatgtcatcctttgctcttctttagctctccaaatccttctctatttttccaggtctacctacaccatgaacctccccttccctgtttatataccaattcaatagccagaagactcccatagagtagcactgttcaaactgtggcccaagaggctggggacagtgactcacctgaggtcaggagtttgagaccagcctgaacaacacggtgaaaccccgtccctacttaaaaaaaaaaaaaaaaaaattagctgggtgtagtggcacacacctgtagtcccagctactcaggaggctgaagcaggagaatcacttgaacccgggaggcggagactacagtgagccgagatcgtgccattgtactccagcctgggcgacagagcaagactccatctcaaaaagaaaaaaaaaaaaaaaaaaaaaagggcgtgcacacacacaaggtgtggcctaaggaccaggggcaatcttcaaacttaactctttggaaatttttacagaaattagactgagcaattttgtatttgttcagtctagtaataataaatgtaaaatacaagctcataccttattttttcccctacatcattctcattgcattttacaagggagtgggggtggggagagatatggtcccttaacacagcttgagaagcactaccaaggtatagcaacaacccgcatgtatacccgtgtgtatgtaataagcagtcacaaactttctctgatattgtgtctgaagagaaacaacactctccctcttccacatatacttccaatatgcatgttgtcattatgattaaaagtaaccattgtattaaaaaagccatctgggtacacatcagctaccacatcatccatttactctttgtatcattaaatacattctcaaatttgtaccttacttccccattcaatggagagttatgtatatttatcatctccattcaagaaccagtgaattcagcagttccctggagaagtatctatagtgtccctgtcattcctaagaggcaagtctatggaaattcctatttcctggggcagtactgccagccctgacctgggaacaggatagaagaaaggcaaatcagggcctgcaagaatgtgaagaggaggaagatcagaaagtggcaagtgttttaggggaaagggatgaaacctaccccctctctttttatgtttctactactggcagcagaagcagtaatagtaatacctgaggaggtagttactctcattgttgcttctgctgccattattaagaatgagcaactatgaaaattcaggacaagaggttacttcgtctaccttgatttctgctgaaacatactatgagaaaatacaatagggatacaattgggaagagacacacgagggaacaaaaaagagctgttattttcaaagtatgtatttgttcaaaattcttgaacactctcttctctttctcctttcttttcccctctcaaaatttccccaccccaggcctatctcaggggcagcacaaatgttctattccaaatttttcccatcctctggccccaagtgactaaaccatgtggtgggtcttaacccaatggcaagctgatccattggctggccagaaacttaagacccttgacctatgcttaaaacaaaaacgggcctggccaatcaagctcctttatagctgcactgagcaatacgatgatagccactagccacaagtggctatttaaacttaatttaaaaaactaagttcttcagttgcacttgccacatgtggctagtggctactgtatgagacagagacagaacattttatagttgttgttgtttttgtaaagacaggggtcttgctgtgaaacccaggctggtctcgaactcctggcctcaagggatccttccatctcagcctgccaaatgctgggattataggcacgagccactgcccccagctgcgatacagaatattttcatcatcacagaatgttttatttgacagcactactttacagaatctggaactggttaacagaaacaggcagttagtagtgaagtcagaagtggaaaagttgcaactagagatagcatgggttaaatggagaagctcaaagtgctgtggtcaaaagacaatgggtcatgctacaacaaagaccttgaaaacattatgctaagtaaaagaaaccagtcacaaaaggccacatagtatatgttaccatttatatgaaatgcccagaacaggcaaatctacagacagaaagtaggttggtggttgcttaggaatggggatgggggaagggagacatggagaagaagaggggaatggttgctaatgggtacagggtttcttttaagggtgatgaaatgttctgcaattaaatagtggaaatggttacacaactctggaatatactaaaaatcactgaattgctcactttaaagggtaaactttatagtatgtgaattatgtctcaatgtgaaggggagggagaagggatccgaagaaaagtcatgttgcaaccaaagttataaggtagttaagagtagaaaggaggtacatgtagagtgagcagttatatatcctggagtcagaaagatacactttctaggtcttctagctgcagagctcctgattagattacagttcagtccacctgtgtccttataagaaagccctttcatatatgctagcttgagtggacatctgttccttgcagccaaacaagaccttcaaacgggacctgtttaaaaataattcctgaaacctttcattattttttcactccccctttctcattacctgttgacttccctttaattatacaaaaagaaaaaattcagatacttaccaatccctccacctccccagcaggcaaaaatacttgttgcattccaaacttctgctaccacccacccttatacaaggtccctctggctcacatacagtgctgtggaaaaactggaacagaagtgcgtgagaataaaaagggcccagaaacactggcctgagttacttaccagctgctccctagtgagaacaagacagaataatacatttatgctgtgagaaagttaattttcatttggataaaggtcaatcttcctatcatgtggggtgttaggtactagaaaaagctatctctaaggacaataaagacaataataatttaaagtcaccatccaacaacagaatagctaacaatatgcttttaaaggttttcagccttcttccctgaggtatggagataagatctggagatcttatctctgcaatcatctttaatatcattcattcaactgtaattcccaagcttttgctatggtgccagatactacacactatagggctctgtaagactgagcaatatgtgcccttgaggcaatgtcactgaaaaagtagaagggcacaactataatcctctacaaatc

SEQ ID NO: 914501 - DNA, 4001 bp, Homo sapiens
ttattttttccggaccaggaaggccacaccgagaatcagggctatggctgccacggccacacccccagccaccagcagggggttgaagttctcacaggaccagggacctcggcccccaggccccccactggcagcctcatcttcctccgccccgtccccaggacccttgggctccggggttgcatcgggactgctggggaccgtgggggctggcttcaggttgctgtggttgttgagaagggcagggtcggccttggccgaggtcttcttggcaggtgccgtggtgggggctgctggcggctgctgcttctcggccggggcctccttcttcgagggcttggtcaagggggctttcccatcggctgccgggggtaccttggcctcggtggtgacctggggcaccttggtgtcgggcttggggctgctggctgacttccctctggactccatggtgggcggggcgtatgggacaggcaggtggctgcaccagaggggctcaggacagtttgtcgcccctgggcattctatgggcctggagggagacacaagggaggctgcgcgcgggtccagtcccccctgtgctgccccgaccacctggtccccaggcagcccctgcccagttctctggactctctggagccccagctcaggggcctcccgtgggcctctgacacttctctttcacggcctggactccatctgtccatgaccactcctcaaggggcccctccagccgcagaggcaagggccacgcacaggtgggaggaggtaggggaccccactgtgctccataaaatggcccatgcaaatgccacatcctcccaccagccgggggcaggaggctcttggtggggaagtaaggatcaggcccagagaactcgaaggaagagcattctcccctccaaggaggtgatcggagccccagtgggagagctgactgcatcccctcctcaggagagcattcctgctttgcagagatggacactaaagcacggaggctgtgacctggccagggtcccagggggaggagggcggggaggggcaggagctgggatctcaggcagccatcagggtgggtgggcccacaagaacccagacttgagaaaactggggtgtctctccaggaagtcagcgtggggctgtgcttccaagggccgtctgcccctccccagcctctggggccccctcctcagcatgggccgtgcctgcctccagccctggagcagggagtcctcgcccagcccaaggctgtgctgtctctgtgggcagagggttcctggcgttaaacagggtgggcacatgctgcacttggcccgcgggtcagggcggaggacagggttctgggctgtgggaaaggcggtgcccagattctcaatgaccgaggcagaggtgggaagggccctgggggcccagccgccctgaacctgagtgggtcttgccccaaagccccagaggccgcctgtctgcctctcccagggaaggatgagaaatgccctccagacctgcagagaaagggaggcacgttccccaccccccgccaggtgcattgaccacactgaaggtcacccgaaggtcacagcatgatgagggcgtctccagaagaggcccagctgctgccacctcccagggaagcccagccgtcccttcacccctgcagttctcggggggctcagctgctgggcatcaagtttgcaaagagcaggtggtctgcccccccaacctcgctatttgtggcacttacatcccggccgccgcctccctctcccgggatcaactgagccctggagaactggggggcccgcgcgcaaacccagtgaccttcaaggcccggagccgcctcctcgccccgcaggacgccgcgcccgccccgcccgccccgcccgccgggagccccccgccttacgcgtcctccggcctccccggggctgcgcgctcctccgcgggatgacggcggctgcgaacgcggaggagagctcgggagtttcccacaatgcactgctcccggcgcaggagggcggggagggggaggggcgaccgggccccgccccgccgggaaccgtgggatccgcaaacccagctccgccttagatccaggggtagaaacttagggtccgagagagcaactgcggggtccaagtcccatctgggactgccagaggcaggaggcgggtcccgctcagcatcccctctaggccagggtgccccttggtcggtgggtgacgggtcggtgggtgaggggtcggtgggtgggtgcgcaggcctagccctgcagtctgaagggagccagttatgggaagaggggactgccctcccccgcccccaaacagacccccagacagacagcagcatctacttagaatatttatttattctctgacatgacaagacacaaaaagttacaacttcttaaaactcttcaaaagaaaaaaatataattctgtaagcagcagcagcagcttccaaggttctgatgtgacgggaggggcagctcccaggagcaaccgtgaactgggggggtccaggcctgagccccaggtagtgtcgctgggaaggggcctctgtggagggccccggttttggggacacagcaccagcacatcagggtctgtcaccaacacgatcacatggccagggcggggcagggagagcttcggctcacagcagggatcgcccggtggcaggggggatggggcttctgaagtgtggtcaggggccttatgcccggaggcgggaaggatggggcttctgcagtgtacccaggggccttatgcagaggctgaaaaaggagggtgggccctgagaggacttgggggtgtggcagctcctggccctccctccagagcagggcaggcaccctcaggctccacactggtcccaatgcccgccctgctccctggccaatcccaggccagggtggaggactcaggagagaccaagctgggtaagttagttcctggacggggtcaacagagcctggggcacacacagcacacagagcgcctggccacggcgggaaggggggcagtccccagcagccccatccccaagggccaggccagatccccacaacacacacacgcatgcacacacacatacacacacacatgcacacagacctcacaatctgggccccagcctggggtgggagctgaggagcccaccagaaagtcccacagtgggtggcgggcttgccccaagagtcagacctcagggcaacccctcacttgggattcctggctcaacagagagggcaggagaccccagtcctcttgcaaggctggccagggaggcagagtcaagtcctgccaaggcgacaagagcggctggggaaggacggaagggctggagagccgcttgggtccagcagattcaataaataggtttgtgtggggtgcctgtgtgggccaggatggctgtggagactggagctggtggactgggggtatggtccagcctgcccggcccaggcccgggggcccccagcccagagaccagctctgtccctgggggtgttcaggccagggcaggattggggcaggggctagcttgaggaatgtaaagatttctgcattttctacataaatgagacattgatcccaacggtgcaggcagcaccccggggggcttgcgtgtgcaccacctatgtggaccctgcaccctgccccctgctgcccctgccgacgggagggctggggaggggtcttcccttgctccgtcctgggctagctgcctggctccagccccacaccggccctgcccagctggctggggtggagcgggtgctgggctcaggcctgggggtcctgcagcagccccagcagggactccgcgatgcccaggaagtagaccacctgtgcgatgccgaaaaggggcgcgatgaccagcgcgcggcagtaggcgcccttcaggaaggccgaggggccctcgtgccgcaggatcttcctgtggaggaaggacgaaagggtcagcccggtacgcaggcccccaggccccacccgccg

SEQ ID NO: 914502 - DNA, 4001 bp, Homo sapiens
acaataaaacagacaaaggaaaacaaaagctggtgaggatatggagaagagggaatacttaaaatgttggtgggactgtaaattagtacaatcaccatggaaactgtatggtggttcctcaaaaaattaaaaatagaactaccacacaatccagcaatcccactactcagtatatatccaaaggaaatgaaattagtatgttaaaaagatttcagcacccccatgttaactgcagcattatttacattacccaagatatgcaatgaacccagctgtccaacaacagatgaatggaaaaagaaaatgtggtatatatacacaatgatataacattcagccataaaaaaaaatggaatcctaccatttgcaacaacatgaatgaacctggaggacatggtgttaagtgaaataagctaggcacagaaagacaaataccgcatgatctcagtcatgtggaattaaaaaaaaaaaaagttgatctcatagagagtagaacagtggttaccagattgaggaaaagagagcagaagatgggaaaaggttggtcaatgagtataaagttactattagaaggaataggctgggcacggtggctcatacctgtaatcccagcactttgggaggtggaggtgagtggatcacttgaggtcaggagttcaagaccagcctggccaacgtggagaaaccccgtctctactaaaaatacaaaattaggccagatgcggtggctcacacctgtaatcctagcacttcgggaggctgaggtaggcagattgcctgagctcaggagttcgagaccagcctgggcaacacagtgaaaccccgtctctactaaaatacaaataattagctgggcatggtggcgtgagcctgtagtcccagctacttaggaggctgaagcaggagaattgcttgaacctgggaggtgcaggttgcagtgagccgagatcacgccactgcactccagcctgggtgacagaaaagactccatctccaaaaaaaaaaaaaaaaaaaaaaaaaatctatctatatacatatatatatataaacacaaaatatgccaggcgtggtgacacatgcctataatctcagctacttgggaggctgaagcaggagaatcacttgcacccgggaggcagaggtttcagtgagccaagatcgtgccatgcactccagcttgggcaacaagagtaaaactctgtctcaaaaaaaaagaaaaaggaaaaggaggaataaattctggtatcctattgcacagtagggtgacaatggttaacagtaacactgatacggtatatttcaaaatagctagaagagagacttttgaatgtccttaccacaaagaaattataaatgcataatgtgggccgggcgcggtggctcacgcctataaatccagcatttgggaggtcgaggcgggcggatcatgaggtcaggagatcgagaccatcctggctaacatggtgaaaccccatctctactaaaaatacaaaaaattagccgggcatggtggtacacgcctgtagtcccagctactcaggaggctgaggccggagaatcccttgaacctgggaggtggaggttgtagtgagccaagatcacgccactgtactccaacctgggcaacagagcgagactccacctcaaaaataaataaataaataaagtggtggtcatgctaaatatcctgatgtgatcattatgcaacatatatatgtatcaaaatatcaaattgtactccataaacatgtacaattaaatgttaatcaaaaaacagtaacagccgagagcaatggctcacatctgtaatcccaacactttgagaggccggggcaggaagatcctttgaggcctggagttcaagaccagcctgggcaatatagtgagacccaatctcttaaaaaaaaacccaaaaatttaaccaggcttgatggtgtgtacctgtagtctcatctacagaggctgatgtggaagggtcacttgagcacaggaggtcaaggctgtagtgagccatgatcatgccactgcactgcagcctgagtgacagagcaagaccccatctctaaatacaaataaataaacaagcattttaattctgggaaaaaaataactttttattctcttttttatactgtttatttgggctatacagaaaactactcacatgataagaaaggaaaacacttgataatcctaccaattatttaaggatacaaagatataaaatgttccctctacactttcaatccactttatttgaaactgcaaaccgccctcccatctcctttctctattttatttttctctatagcacatatcaccatccaagatactataattttatttctttactgtctgtcttcctgcattagagtgtaagctccatgaggacagggattttacatatcattgtatcctcagtgcctaaaatagtgcttagcgtgtagtaggcactcagtgtacatttactgaatgaatgaatgagcaaactaaggaagaaattaaaccctacacttcaaaggaaaccactgttgacactgtgggtgctatcttccatatttttttatgcttatgcagatgtaaatgtatatacctacatatttatgcatatatgcacagcccattctttttaatttttacagaaatgagatcataatgttattgttctaacatgtgctttttttttttttttgatacgtagtctcactctgtcacccaggctacagtgcattggcatgatcttggctcactgcaacctccgcctcccgggttcaaacaattctctgcctcagcctcccgagtaactgggattccaggcatccgccaccacgcccagctaatttttgtatttttagtagagacagggtttcaccatcttggccaggttggccctgaactcctgattcacgcgccttggcctcccaaagtgctgggattccaggtgtgagccaccacgtcaggcccctgacatgctttctttaacttgtcataaacaggccgggcgcggtggctcacacctgtaatcccagcactttgggaggccgaggcaggtggatcacgaggtcaggagttcgagaccagtctggccaacgtggtgaaaccccatctctactaaaaacacaaaaattagccaggctggccaacatggcaaaaccccatctctactaaaaatacaaaaattagccagacatggtggcacacgcctgtaatcccagctactcaggaggctgaggcagagaattgcccaacgtggtgaaaccccatctctactaaaaacacaaaaattagccaggctggccaacatggcaaaaccccatctctactaaaaatacaaaaattagccagacatggtggcacacgcctgtaatcccagctactcaggaggctgaggcagagaattgcttgaacctgggaggtggaggttttagtgagccaagactgtgccactgcactccagcctggaaggccagtttataagaagctatcccattgtttttaatggttacttaggatttcattgaacaaatgtcttgttccctatttaattttttttttttttttgagaccgattctcactgtcacccgactggagggcagtggcgcaatctcggctcactgcaacctctatctcccaggttcaagcgattctcctgcctcaacctcccaagtagctgggattacaggcatgtgccatcacacctagctaaatttttttttttgagacagtcttgctctgtcacccaggctggagtgcagtggtgcaatctcggctcactgcaacctccacctcccgggttcaagcgattctcctgcctcagcctcccaagtagctgtgattatgggcacccaccaccatgcctggctaatttttttgtatttttagtagagacaggatttcaccatgttggccaggctggtctcaaactcctgacctcaggtgatccacccacctcggcctcccaaagtgctaggattacaggcttgatgattatttttggttt

SEQ ID NO: 914503 - DNA, 4001 bp, Homo sapiens
aaaaaaaaaaaaaaaaggccaggcgcagtggctcacgcctgtaatcccagcactttgggaggcggaggtgggcggataatgaggtcaggagatcctgaccagcctggccaacatggtgaaaccccgtctctaccaaaatacaaaaaattagccaggagttgtggtgcccacctgtagtcccagctactcgggaagctgaggcaggagaatcgcttgaacccaggagactgagactgcagtgagccaagatcgcaccactgcactccagcctgggcgacagagcaagactctatttcaaaacaaacaaacaaacaaacaaacttgcccaaggtgtcacagctaataaacggtagagcagaatatgtaagtatccatgtctgactccaaagcccaaactcttaaccattctgacatgaccagagtgcaagggacagtgggaggagtggcaagacagagctctagaatgaaaggcaagagcatattataaagggcctggaagaacagaggctctatcctgtaaatgatgaggggccatcacaggatttcacaaaggagactggcatgaccagatctgtaggtcagatagacgattctagccaagaatagtggtgcatgcctgtagtcccgtctactaaggagactgaggtgggaggatggcttgagggcaagagttcgaggctgcagtgtactagggtcacaccggtgaataccaactgcactccagcctgggcaacataccaagaccctgtctctaaaataaataaatgattctgacagctgcataagaactaattacaggaggacaagaactgaggcagagagaccacttaggaagttatcctgaaagcacaagcaagaaattatgaactaagtcagtgtctgtgaggatggaaaggaagcgccagattctaggggaattaagaggcagaatacaggacttgaacttcgggagagaggagggaaatcagagcactaaagccagaacactgtgactatcatttctagatgtgttcatttctatgcctcgtccaataggcagccccacctactacactgcctagaagacagggcatgtccgacaaatgtttgctgtatttattagatgaataaattaaagggacagacttggctgagtgaatggtgaagcccttcattgagataaaaaaatacaagaggagaaacagatcggagggaccggggaaggctgacgatgacagtaagcaggtctgagctcaggaaagaggtctggctggagtagtttggcgagtcaacgctgaaaagctgataacgcaagagatggagtgcgccgagtagaagggagctttctactgccaaggactgagttaggagaacggacagggagtcgctgaagccaagtgaggagagcggtgccagaggtagagggacatttttaaatccaatgcaagaaaaggaaaaaacaaaaaagctttccaactttcccagctggccaaagatggcataagattgggctagccccggatttggacccggggggaagcctgccacagaagtatcccagcaagcttcggaaggcctggcctcactcgccaacgatgaacagagcaagcaaaccagggccccgtgcccagtgcccctctcccgcgtcccgacccgctgctcactcacccgccagacccccagcccgggcccggtggcccgctcaggagccggcgagatttcaaacggaggaactgtcgcctggcagtccgattttcacttcttccctcagtccccgcccacactcgagcgcatcacgctcgttggctcgagagcgtgcctcgggtcccccgccacgctcgctcccttccccgccgcccaacccctccctcgatgaggtcctcaactatcccccaccccggaaggctccgggcgaggctccgggcgaggctctgggcgaggcgcagctcccccaacgccacccaacacccacccgctcccccagcttccagggacgccggggtgttgccctgcagcgcgcaacaaacacttccggaaaaggtaccgcctagcaaccgggagtcccgcctccagcaggagccaataggtcgccggctgagagctgtgacaatggattggctcgaagtcccttcggtgcacgcaggagctctgtccgttttccgttgcacgatgggagtgtagtttaagatagataatgggaatccgcaagaggttgaaagagtgtagtttaagatagataatgggaatccgcaagaggttgaaagagaacctcatcggctgggcgcggtggctcacgcctgtaattccagcaatttgggaggccgaggcgggtgggtcacctgaggtcaggagttcgagaccagcctgaccaacatggtgaaaccccttctctactaaaaaaaaaaaaaaaaaaaaaagaggaccccgagtttagacgtgaggatttctgccaggacagagaaggactatttagagtatttatactaatgtgaattatctaattatctaattgatcatttgttaggagtatgattaacatcaggtgaataatacagtggtcatcaataatcaacccattgttactttaatcaacaaaacaaatgtgaatgtaaggtaatggagacgcgtccactccccatctctccccgcaaaaaaactggctctcctgtgctcctattaaaccagtgagcacctgaccaggagttaaacctattttctactatccatcttttcaccaaagcccagggttcagtttgtatgtctgcaagatggggatagtaatgtctgtcataactatttcaaagagtctattgaagaagaaaaaaagtgacacaatgtgtagctcctccacacaccctgtcgggcagaaaggttgctactaatataattccgaagagttttagttttgcttgcacggagggcaaatcttcctttctctcatatgtctccaacctcctagagaagttaagaggggcaaagaaagttctggccattacatcaataggaaaactgagaaacagacaaatacagatgctgctagttgaggaggaaaatgatgaggccaagctcatagagccgctcctgataggttctagagatgtagctgactcaggatagtcccagtgccactcagaggctgattccaggatgagaaactcagattgttggaatatacagagcatattccttgtgaaaattatcaaaatcaaaatagagtcatttgttttaaaaccctgacaaatggagccagggaagaccatgaagagagggttctcacgcatgaatacctgataacaaaaactatcgaccgggcctggtggctcatatctgtaatcctagcactttgccaggcacagtggctcacacctgtaatcccagcactttgggaggccaaggcgggtggatcacctaaggtcaggagttcgagaccagcctggccaatatgatgaaaccccgtctctactaaaaatacaaaaattagctgggcatggtggcacacgcctgtagtcccagctgctcaggaggctgaggcaggaggctgaggcacttaaacccgggaggtggaggttgcaatgagcccagatcaagccactgcactccagtccagcctgggtgacagagcaagactccgtctaaaaaaataaataaaataaaaattcctacttgagccaggcacagtggctcatgcctggaatcccagaactttgggaggccaaggcaggtggatcacctgaggtcaggagttaaagaccaacctgatcaacatggagaaaccccatctctactaaaaaatacaaaattagccaggcatggtggtgcatgcctgtaatcccagctactcgggaggctgagagaggagaatcgcttgaacccaggaggcggagtctgtggtaagccaaggtctcgacattgcactccagcctgggcaacaagagcgacactccgtctcaaaaaaaaaaaaaaaaaaaaaaggtcctacttgcccagcctctatggcatgtgtatacctattgcaatgctac

SEQ ID NO: 914504 - DNA, 4001 bp, Homo sapiens
tttgccctttccccagcttctccaaatgtcaacgtcttgtacataaccatggtacaatgatcaaaatctgaatattaacactgacacaatattttttactaatctacaggcagtattcaatttttgtcaattatcacactaatgtctattttctggaccagaagccaatccaaggatataacacattgcatttgttgctgtgtaactgtgtgtcatctaaaaagcagacgctaagatgggagtaaacctgcaaatattttattaggagaaatgcgtgtgtgagggaaaatgggagggagctgataaaagttacaagcgcctcagacttcagtgtaagtctaacactgaatggagggaagtaacaatgggtagacccctcttagacagccatgcagtataagaaatgttcagcaagaacccgtggggagattctcaggaacaggcctgccactgtcagtggctaggagcagcccatgggaagcatggcctcagtgcaaatggagatttcagaatgcaggagattaagatatgtgagttacattctcatgtcaaagttgtcatgtcccccttaatctgggacagtttctcagtctgtcttttcaagaccctgtcatttttgaaaatactggccaagtactttgttgaatgtccctccatttagatttgtctaatcttatgtgattaaactgaggttatgtatttttggcaagaacaccacagaattgattaggcaccttttcagtgcattgttatcaagaggtaaatgatgctgaattttggtcacttggttaagatgatgtccaccaggtttctcctctgtagttactacttttcctttataaatatctcatgaagacagagtagaggctacagaaatatgcttttcatcatacttttgcccattgacgttagtatccattgatgactgttgtctgaaacaactactgtggtgtttaccaaatagtattttctatttccattattccttctacaattatcaatcggaatcctgctgtaaggaagttttccctgctgccccatttacttgtttattaattatttattcttagtaatatggatttttaaattctacattttattactatccaatattgaagattatactacttatcttgcaagatttcgtcctgaggattaaatggctcctggtacatagtaatcacaaaattaacactaaacttggaagatctgggttcaagacccaacactgccacttattagcaggaagatactggccaagtcactgaagtcactttggtttcgttttcttaaactgtataaagggaataataatatctaccccaaaaggtttgttctgacgtctatgtgacttagcgtgaagtcttcaaatacactctaagtattaaggactcaaaagttcaccattgttttaaaagttgagtttgtgacaggattgaataactgtgagattaaggtggcagacaccaaaagagagcgtgctctttgcatgaaacgatccaggcaaggctcttttaacagctaccaggtggcaggccatgtccgcgggtgatctgggggaagcgcccctcccccgacacggaagctccgcgacaggggaggctgcgtgggaagctcgcgcgacccgaccccaggagagcgcgcaaagcctctcgcactgagttaccgggtctggtccggacactccttacagccgccagcccgaccgcgggcagggcccacggcctgcggagcctgagaaacgcgagccgtacctgcgttcgcaacaaggcgccttcctgggatcccattcctccggaatacaatcccagctcttgggcctcggggagtcatgctcctacggggcgactgggaagccagtgcatccctgactcacctgagaacccggggcctggacacagtaaccgcagctcagagcaagccagcctggtaagctcctgcccatcagctgcccagcagccgtttctgcgcctgcgggagagccatcgccgagccgccgtcacttccgtcattcaaaccgcccgccaatggccggaccaaaccgcgggaataggccctgtcccgccttcctcgggggccgccgggaaggctgcgcggtgttaaaaaccccgcgccccgcgcacgcgcacaggcacgcgccagccccagcctgcctaggggcccattatttgtcacacctgtcaggctttgacgttttcccgtatgggccgcgctcggtggctcgcgcctgtaatcccagcactttgggaggccaaggcgggaggatcacttgagcccaagagttcgaggttatgtatttttggttatgagttcaagaccaagtccttttaaaaacatggtgaaacctcatctttacaaaaaatacgacaacagcaaaaattagccgtgcgtggtggtgggcgcctgtaatcccagctactcgggaggctgaggcaggagaatcgcttgaacccaggaggtggaggttgcagtgagccgagatcccgccagtactgcactccagcctgggcgacagagccaaagcctgtctaaaaaaaaaaaaaaaaagtgcagagccatgagggtgacttttgttttaaggccccatcatgaagatatcttgggatatgcatccttttctgtactgactacggaattcattggtactattatgcgcagttaacgtcttatagctttcatttaaggcctccagctcataacaacaatgagccgtatgttaccctgtgcctccagaggtacagcgcacggagagcacctcacggatttatctgctgtaaataaccaataatcaggcggtgagcacaggttaatacctattgagtatctgttatgtgccgagtacattatgttactctggatggattatgatgcctatactagattttgcagtctgggtcatgggggttaaacatcaggaatcaaaggattaaaaatggggggtggggatgggaagttgctgacacgatcagatctggctgcacagtggggaaaaggtcagagagagtgaagacagaaggccgtatactactacagaaagtgaaagataatagcaatgagaatggagagaggtgagtagattgaataggaagccaaacatcaggaattggtggttacctggttatgggaggcacaagaggagaaaacaagggtgatgcccaagtcccagatacctagcacctgggtagatagtgataacatcctcctggaacacacatgaagagaaccaggagggagaagtaataagttaagctttgaatattttgaatttgagctgtttatgagatatctagacaaagggatgcatttcagaaacttaggacacaaaattagcagtacttgacaaacaattgcatgtgagattgagagaaaagggaaagtgaagttgatttcataggccactagcttgggtagcagtgttgattcttgattgtaaagggagaaatcagaaatggcagttaagtgggtagggtgatgagccaagctctgtgtatattgaacttcatgtgcctgtagaacatccagtgatgtactgtaagcagatgaatacatcggtagatagcccacagaaagaactaggctaagcataaagggatttccttgttacatgagtaataacaaacgctagcggaatggatgagatcacttagggagaatttgcagagtgagaagagcaatgagcaaagaaccaaactccgaggaacaccaaaacttaaagggatggagtaggaggaaggaaggtacaggaagaaatagtgtgattccacctcagatttacagatcaggatactgagttacagagagattcagcaacttggccaagggcacatttcagtcaagggtgaaccaggactagaattcacgtttccttcccaaatattagggttcttctcagcctctctccccatttcctgtcacatttatcttgaagaatatttgtattcattttaaacattttttcagcatcctccatacaggcacggagatactcttccatacccgat

SEQ ID NO: 914505 - DNA, 4001 bp, Homo sapiens
gtcgcccaggctggagagcagtggcactatcatacctcacttcagcctcagtgatcctcccgcctcagcctcactagtagctggtattacaggcatgagccacgcacccagactcaattcaacatttgtaagagtattccttgttcggtctccaagtgcttaacttttgagagccgtgaaaagccctcttctcccaagtttaatcacatctcctataaaatctcatccatctgctgacacttccaatagttttttacttttttcttttactgacctaatcctgaataaccttaaattgctgctttccttacttctccttaacttccccagacctctctgcaaacttctaattcccattcggctgaaacactgtaatacttctagtcccattattacaaattctaacaagtctccaaaagctgaaactgacttctccaaggtgaccaggctttcttagcgtttccaactctttccccctagatcctagaaaataactttaccctgatactcttctagttccttccctcaccatccttcttttttcacgtttttacctacgtttccaattcacctcatccagctctacctccgtattacttcttctcattccgaactatctcaagtttcctaaaagcacctactgttctagcacatactccaaaattcccgcactgcctttttctcctttctctactcttgggacaagcaatcacaattccttcgacacgcaactagctccatcttcccttctaggaaaccttctctagcctacccaagcactgttaatcactcccctctagattattctactacggtagcacttcctaaactatactgcgcagtaatcactaattacgtgtagtttctcttcagtgtttttctccttcaaagcagggtttctattctgttcatttggaccctaacagtataccaggcatcgaacatttgctaactggagaaataagagctccaacatttacttcctatcaaagctttccaatgccgcggttttcaaaaacctaagcattcgacactccaatttgagaaataccagtgaataccagtaactaaactggatggtgacatttgatgaggcgaaaacaatatttaaaatcaattccccctgtcgcctctccaaaagggcatttccacattgaagttccagtaattctaggtgacaggaagcgcgcgttctggctacgagcatcacacaacgaagttaatgtggatgggagtgggaggcactgcagggataggaaacagcataagcaacgactagtaagcgctcgagagacggcggactactattctgcaacgtctcttaaacacactggcgcgcctcacctgatctggcgagtttcctagaggggccgctgaacccacgtgaccaaaagagctacatttttgcaggccagggagtgggcagttatcccagccggcccttgggaatgttaggcaaccggggttggttgctacgccaaaaggtgaataagggctggggaacaggggcggccagcccagtttcactgggagccagagggtgcagcttcgacacagccacagtgaatggaagcttggggagcgcggggcaatctaggcattcccgccgacctccagaattgcgtcagaagctggactgacagcgccctgaaacgtgaggaaactcaaagaggcgcttagggccgacgtggggcccactcgcgccaactgcttcttaccgacaagtgagaaccagaagccgcagagacagacgccgccgccatctttcagcctgcccagggggtctccgcacttcgggggcggtctaggttctcgtgctcttctccaagactcgggagccgcccaccagcggggaccctaggctgaacccctgatggaaaagggcaagggtgctggtgctgggcttggaaacccctgcaacacaccccctcagggccgcctacgctcacagcttacacagaaagggcaacacgtcctaacggacgtctttcctagccaatcaaaacagcagacgtctttctgtagtaggagagaatccgcctcttccctggtgacgtcacaaggtagcgcgtaacggggcccgctggggcagacaacgccggggttacaggccggctctgcggggattctacggagggtcgggcctcctccagtaagaagcgtgggcgagtagtggtgtcgccagtggcaactgaagggagtaatggagataaaacaaaagcgaaggcgaagttaaagcactccacgagttccctcggattaaacgccggagagagcgtgaatttgcctcggggacgcctctccaggtgaagtatttaccttttggccaataacaaataggattaggagggacttaacgatttagtccaatagaaagcaagggaaaaaaagttgcggcagagaacgagcctttcgcgaacatttgctcaattggattggggcgctctcagccaaacctgggactggctgttagaaatagccgcgaccgcagacctttgggcggggcaggttcaaagcggatttcgcgcgctgagagctccgggatgtcattggccggcgacatcctccctttgtgggcgcttcctgcgtcgcggaagttgggagttgggaggagccatcgaatgacgcgatagccttcgcagccaatcagggatgggaaagggaggccgagaaggaagcggatccacggccgcacagctaaacagcaaccccctacccgcttcgtctccctccgccgctatcggggcctaagcgggagcggctggcacggcgtcactgggtgggctggggcggaagtggaggcggagggagacggtggcgtcgtccgcggggccctgggctctcgcggcgaggccctggtgggcgcgaggcagggggagggggaggaggaggagcccgcggcccgggcggcggcggctctcgggttctccgtagggccccgcctcggagcgggcggcggcggaggaggagactgaggagcaggatggcggcctcggccctgtacgcctgcaccaagtgtacccagcgttatcctttcgaggagctctcccagggccagcagctctgcaaggtccgtgggctccgggaggcgggcgggatgggtgtcctcggccgtagccggagggggccgggtagccgctgcactgcagcccctcttcgccggcgcctcaggggtttgggagtctggagccctcgcctccccactcggggacccctttttctgggggcttgaacattagctgggaacggaccctgaaagggaggcagaatcgtgcccttttccaggcggcccaggagggtgccgggccccgtcagcgtctgggggtctcaggagtggggttgagtgaggcagccacctgtctatgccgcagagacccaggggtggagatgttttcatctcggttttctgcctggtctgtcctcttcttccaccaggaggcaggggacggtttttgcactttcttgctaggaacccgaagccgcaaagctgatggcatccttcttccctgtccaggaaagcgaagcgactggtttgggaacagaatgctctgatttggagctcctcccatcccattaaagcctggatgctgtctgtgagcaacggtgcaaaataataagtagtttcacatttaaccaatccttgaaataggccctgacagctttcttaatttgtctgtaatatacccccacgtctactaaagacaaagacacctgtgccttccctaaggaattatattgtgattggccacttatatgataaagcatccagttctttacgttggggccaggttttataaatgttttagactttcactaggttgggtaaacagttttctaccagaaaagtgagatttgggactttcagaaagatactgactaatgtattgtcttattacaggaatgtcggattgcacatcctattgtaaaatgtacttactgcagatcagaatttcaacaagagaggtttgtatactgaatagtttttgactgttaaagacaag

SEQ ID NO: 914506 - DNA, 4001 bp, Homo sapiens
cactagtgcccttcccaaggcaagtcactagttttcccacccaagtcactgtcaaagaaccagatgggacacaacctcagaatggcagccatggcctctgatcacctagttcaacaaccccttccctcattttacaggatagaaatgcaaaactcgtgaaaagcagaaccttgaccaaaatgtgaacccagaattaaaagatccaccggctactgactcatttgctactcacagtacttgctctcagcctttggataaaactggtgatttagaacttcggatatggaggacccaaacacctgagccaagactcctcttcagaaagagccaagaccccacaatgctagatgggaccccaaggacaccgaacagttacaacaaacccaccagaactgcttaatacagttactacacaaacgacccctgttcccagctaggctctttcccaaccaagacaagaattgcaacccccattaaggaccctgcccgacaactcccttcttccgggaatggtgctaggccccagaagtcgctgataaaaattaacatgccaaactcaagtgcccagaggcctcgaggtctttaaactcttcctactctgcgtcgtgcttcggggtgcccgagccaggagagggaggggcaatccaaggtaaatctggtcccccaaactccccggaactgcagaagaagccggccacgtgactcggccgcatccggagtgggcggggacaggagatcggctgggcccggccccctcaccaatgcagaaacgcgtatccgagaggcagcagcatctccaggtccctaaccctgtggaatcgccctaaaacaacgggtgtatcagacccatctcctgcaggcaggagcctgggcaagctacataaccttcggttttctcagccctcgggccgtatacagggggcggggtggtttccgggcggtgcccgcctgggtcacttccctaaactcggctccaccctcactcaggcccatccgggaaggcctcgctggcccagggcttcggcaccggcggccgggcctgagcgtgcgcgcacgcgccgacagacagcgccgttccagccctcgcccgatgcacgggtgagaacgcagctcgttagatgcgctcccgaacgggccgcggtctctgcgatgccccctccaagccttgcggtgcaaggccttaatcgcaggcacccacgccccaaccgggaccccgtcttcccagcatcacccctcgccgcgccagcacccgcccctcccgggcgcaggcatccctgccacctgctcccgagacggacccggctgccgagggagggtgacgcgcagacaggaacagccttgggtggggcgcgcgcgccgagacctctcgcgcgctttttcctcgccgcccccgggccgggtttggacgccgcatgctccagtcgagagcgcgcccctaagaagaaaggcgcgacgccggccgttccgcgaggggcgccccagcgcgcgccccgaacccctccccccgcggccggtgtccgcgcgggcgcaccagcgggtgggggaggggagcccaggcggagcgcgagcgacgtccagaccggccctccccggcgcccacgggcgcgcacgcgcattccggcaccgcccgccccttcgtgcgagaccctcatcccgcccggggcgctgggggagggggtgcggacgtcgctccccagtcgcttcccgcgcgcaggcgaccgacccgcagccgcctccctcaggcgccgtggcctgccgctcaccatgtttccggaaacgaaaaggagagggcaccgagagccgcagaagacgagagcgctgcagccgctgccgggacccgactgaacgcggcctctcccggccccttccgtttagtaggagccgcacaatgaggggtggggcgggcttccggcgctcccaccgcgagccgacgggaaatggagtccgctggccctgcgccgccgcctcgctcgctgggtaacggagtcttcccgccggccggctccgagctgcagtgcatgtagggaaatgtaggcccaggtcctgggcggcaccgcagcgcgcagcgcgagcccattggtccaatttcccaggaaccgctctgagcccggcgaggcggcgctcagtaaaatgacccgaaaacgatccccgactaagcggctctttatcccacagcaaaacggctttcttaagacccatctggtattatctggatcccttggcctgaaatttttgagtgaggttagggttttgcatttctgaatcgaagcaactattgattagcctggaatcccgacctaaagcaaaggaaatcacaagtatgaaggcgtcgtcagtcggataaacactagtactctgcatgtgtaaagccactctcgtctcctgaaaaaaggccatgtccaacgtcagtaaaacaagaataggaggaaaaggcacaggggaaaggtacaaggaaatctctgagagctttgttcttgtttaaagatgtttggcaaagtcatgaggcgttaaagggtaaagacgagggtttgtgcattcaattcaaggcttctttacatgcctttacgtgccaatgagaagaaatagatattaaaccagacttgaacccagctctcgagttgatagccaggtacatggttattctaacatccgcaaaactgagacaagttctgtggtagtatatgccttaaaaaaaaaaagaaacgagcgggggactccgggatgattttgttgttctagaacagtgaccacagcctcacactctgcaggaaaagactgggtcgcaaacaagtcagaggcaaacccagaaagggaactgggggccctaatcctataaacggaattaagggtgtaaacggagagcgatgcctgggagtggggtaccttgcagagcataccgggggttgtagtcggggacattccacagcaccgcccccgcccggactcccggcgctccaggtggagacagcagcttgaccccgcctcccgcgagcgaccctacatgaatatgaggctagcgcccccttttctgagccttagagtttccaagagcaacggggagagagaggggggcttcgcagttaccctggagacgcgctctcgcccgcccccagccgcgggatgccctagatgtccttattaggacaagagactcgagggggcggggccagcccgacagccggcttgaggctccttataaggccgcggcgggcgggaggcgggagccggagcccattggtccaatttagcttggctggggctactgcgccgtgggctaggcacagtcctgaggggcgggactggagctctggcgcccacctctcccttcctcgcaggctggagacctgcgtgttgcgacttccggcatagcagctagaggccgggtgctgcttcaaaccctggcgggtcgcctgtgtccaactcagctatacgtgtctttcaggcttctcaggttgaagccctttgtagggtttccatcttcaacctccctgagggtctcccacttccgattagccacaaaaatgacgaagtgttctcccctctacctgtgtctgggcttcttaacccgcagcctgctcctccgctcccaaacccaaccgcgtgcccatctcaggcctccccaactgccaggatgcccaagcacctcttacttacagtcctccttcctctaggcctctgacccccgacattccgagttctattttgggccttctcggcacgtccccgacttcctctccaccacacactctttgccctgtatcccggggatgaggatcaccatttcctccaagggtcctgcagctcctcctgccttacctttgtgtcctcatccccggcacccatttctgggtgtccctcccaccaatacgtttgcacccgtttgtctcctagcccccgcctctcctggactcttttcaagaccagtctccatctccagcctccttcaagcttgaggctgaagctgacaatcttaagagaccttagagccgccaagctcaggt

SEQ ID NO: 914507 - DNA, 4001 bp, Homo sapiens
gatctgaaaccaggcaggcaatctccagagtctgctcatttgctcattaaccgcaatgcttaaaccctgagaagcaatttgtgggcatggaaacaataacttcgtgtcccttccagctctctacaaagaaaacttttttttttaaagggaaggaaaaaatttttaatcctagcaaaaggctgtgtaacttcagttgccaaaacccttggatctcaaacatctactttctaaatcaccagagtgtgagactccaaaacaatgaatatgcactcagaaaacgaaggcaagcttaaaagaactcactctccataggcaccttctcccagggtttgcaccaagtcccagtcttccacaaagggcactgccatgactccaccgagcacctcggctgtaaaaggcaggaatccagaaaagatgtagagtgtaagatcaccagtgaagccactgagccccgcctctccccaggattgcccacgaaaattaacagctcttgccttccccttctatctcatccacatttatccaagtctttcaaccacgaacaactattctaaacctgaccattttgtcgtgtaaatcacaatcgccactcccaagcacaccgaaggttgaaattctgccctcctcaggccccagaggaaattaattgttgttatgaagaggtgggagacaaatgctttccggcgaacgactggggaaggaggagggagaggtgggggtctggggaagagaggaagaggatatagggagcggtatggggcagaaaacgcctgcggcagcgcctcctcccaattgctcaattccaattcccatccccatccacagccccacccgtcccaaaggccggggcggggccaaactgcccccagaggcgaaaggaagggctgggactcttccttggggttcttagctagcagcgggttagtccctcctgcccccgcccccacaacgggaacctcctggtaccattcctccaccctccgaaaccgcccctccgcaggagtctctccaatcccctgcgctagtcaatgctaactttctcccaccatgccctccctcactaatctagaccccgaactccttctttagaaaccttccctactctaccggccgcccttcctcaccggactgtcctttgcccaccactgcaggaatccaaatgcagcgcttttcccgccaaaacttgagggcgtcacgctgccgcaaactcgcgcacccgcgccgtaaagcaagacagcgcgcgttcccgtgtcctgcccctctgaatgtcggcggctccaaaagggtgacgtggagatgttgccgctcccgcccagggctgctttgcagtcggggagagatcctggctgaagagatttaaggacggcggaccgcatcggcgcgaattgagctctgggcccaaatatgaagtggcatccggtgtgaggctcgactgggcggtgctcgagcgctgctgggggaagcccaggcctccaagcctcaggggcgcgcgaccgaccgcgctgcgcttccaggcggggctgcgggcttcgctcctggccgctctgggcctgaaaggctgcaccgccacctgcgtgaggccaccggacaggactgtgaggatcacagtcggtgaagcagagtgctttgtaaacctcagagtgcggtactcgtggtgctggagccgagaaaccagcagcagctgctgagagccgactgtgaagaaatgggaggaactccgtgttgggagcgagaggcttcgaaagaactggccacgcagtcaagtgtgtgtggcggggcaagtttcccggagaaagcgagcagtttatgttggagcttgaagtcaggataaccagttttgccttttttctgtgaaccagctccaaaacaatgctttacttcagcccggtctttttgcaggaagaccatctgcttagcttagttctacaaactttttcatttttaatgtgcaaagaacaggcggggagagccaaaataaatcttacaacgcaaatttaaaagctgcgtacgtcatttaagtggaaaagtaaattctgaggaaagagactcaagaacaaaataggaaaaatggaaataagtattctctgacagtaaactagactggaactcagggataggcaggatcatctccattacattctccagcactggccgggcgcagtggctcctgcctgtaattccagcactttgggaaggcgaggcaggagaatggcttgaggccaggagttcaggaccagcctggggaacatagggagaccccatctctacaaataaaaaaatttaggaattagtcgggcttggtggtgtgtccctgtagccctagctacttgggaggcctaagcagaacaatcgtttgagtccaggagttagaggttagtgagcactactgcactccagcctgggcaacagcatgattccgtaggaaaaaaacatatttttttatatgtatatattttatatatatacatatatattttcttagtccttaagactgggccacatacaaacactaagcataactggctattatgataatagtaaagtgaaacaagtataaaatgttactcaaggccggggcctggtggctcacacgtgtaatcccaacactttgggaagctgaggcgtatggatcacctgaggtcagcagttcaagaccagcctggccaacatggtgaaacccccgtctctactaaaaatacaaaaattagccgggcacgatggcgagtgcctgtaatcccagctacccaggaggcagaggctgcagtgagcagagattgtgccactgcactccagcctgggcaacagagcaagactccgtctcaaaaacaaacaaccaacaacaaaaacacacatttcttttaaagaagcaaagtcaggaacaaaaatcaaggaaaaaactcttaaaatgcttatgtgtatagttttgaatcatgacatcacagattaggcttcatgtaatctttttacagtttgttgtttttggagacagggtgtgttgctctgtcacccaggctggagtgcaattgggcagtcttagctcactgcagcctggaactcctgagctcaagtgatcctcctacctcagcatcccaagtcactgggattacagaagcgagccacagggcctggtataaaaataaaagcaagtttttatatcatttatcccattttctcttgtttcctcactgtgtgctgaaaacaaagaatacgaagaggaagacctgcaaatttcctgtgtgtctgatggagtctttttagcctgaaaaaaaaaaaaaaaaagatatacagactccagcagaataccagttaaagacagaatacatagaaatagcctctattctcttctgaaagcccactaaaatattttaatagtaaaggataccaatatttaaaagaacccataagaacagagtatgagacacattttggaaagcagaaagcctttagatgaaaggtaatgaagatgaatcccaaagctagcaatggaaagcagaattaacatcacagaactctgaaaaagctcaagttgaactggtgacaccaggtaactgaaggtggaggtaaaaatggggctaaaaggggtaggtttaaaggctacataaaaaacaaatagatccccgtatcccttccctttctatgtaaccaaggaactgtccctccccaaagctggtacgagatttaagagggtaaatgcacagtatgtgaactggagaccattaggcacagttaaaagcttgggcaccttactgaaaacggagggattaagtttaagttttatccactgaaggttgagcctgttacaacttctttccctactctactcccagaaagctgactgcctggcttacatccttgagtaagagaatatgcaagccttctcaagggaatcttacctatgcaaaagataaaaatctaaaaatcagtatcatggatttcccaatgtaacagcccagccagatcacagtagattgaaacccacattattaatccccatctacacc

SEQ ID NO: 914508 - DNA, 4001 bp, Homo sapiens
tctgaaatatcaatcctttgattctacatcgaatatttaagtattaatagcaaacatagaatttacttaatatacaaaaagcaatcctagaaaattctcaattatttcatgtaaaccaagaggaaacagcatgctattttagatctgtaaatgtataaaatgtatacaatgatttcatgtaactagaatgtctacaaagaaaaaattgtgtaggcaatacattgcatttaggatacactgcatttatgatgtaccataaaacttgtttgtcactcttaaattctgtaagacaccaatcttaaatcaaaatcacttatataacttgggaaagaagttttctttcattgactctatatatgcttttatgttattaacaccaggtggaaaaattttttaaagataatgtattccaatttcacagttgcatgagcaattttgaaaggacaacgaccaaatagcatgcccaagatttaaaaaacaaatttaaaaacttgtttaaaataattatcttaaatttcttccatacctattctgtcaaaaagctctcctccactacagtactccagaaataaatattggatattgccttctctcctgtgaccatagaattttactacattttcatgatttagcattttattgatacagatctctttcttaatattttctggacagtctacggcacgcttcatatctacaatcttcactgcgactgcttcttcagttactctattcacagcaagttgaactctaaaaaggaaaagagttttaacattacagaattccatttcttctaaaacttccaaagattaaacatgactcatccaaaacgattttacctctattactttttccacaaaggagaaaccaaggaagtggtttctgctatgttctcaacacacactactcttttctaaaatgtgaaatacaatagctaaccctccaaagacgtcattatgctgtcacacaagtcatttaataaacgcttcataaaatagattgagataattctaagccacatcacatatatacatgttctactcatatacttttaagagcattaatcccatactatatgtgcttgtgtaactgactgtcctaagctcctatggggtagatgcgattattgccaccctaaaggtagtgaaggagaggtacacaatgacattaagaagcttgcctaagatcacaaaacaatgaccagtatgtgatagagcaaggatctgaaaccaggcaggcaatctccagagtctgctcatttgctcattaaccgcaatgcttaaaccctgagaagcaatttgtgggcatggaaacaataacttcgtgtcccttccagctctctacaaagaaaacttttttttttaaagggaaggaaaaaatttttaatcctagcaaaaggctgtgtaacttcagttgccaaaacccttggatctcaaacatctactttctaaatcaccagagtgtgagactccaaaacaatgaatatgcactcagaaaacgaaggcaagcttaaaagaactcactctccataggcaccttctcccagggtttgcaccaagtcccagtcttccacaaagggcactgccatgactccaccgagcacctcggctgtaaaaggcaggaatccagaaaagatgtagagtgtaagatcaccagtgaagccactgagccccgcctctccccaggattgcccacgaaaattaacagctcttgccttccccttctatctcatccacatttatccaagtctttcaaccacgaacaactattctaaacctgaccattttgtcgtgtaaatcacaatcgccactcccaagcacaccgaaggttgaaattctgccctcctcaggccccagaggaaattaattgttgttatgaagaggtgggagacaaatgctttccggcgaacgactggggaaggaggagggagaggtgggggtctggggaagagaggaagaggatatagggagcggtatggggcagaaaacgcctgcggcagcgcctcctcccaattgctcaattccaattcccatccccatccacagccccacccgtcccaaaggccggggcggggccaaactgcccccagaggcgaaaggaagggctgggactcttccttggggttcttagctagcagcgggttagtccctcctgcccccgcccccacaacgggaacctcctggtaccattcctccaccctccgaaaccgcccctccgcaggagtctctccaatcccctgcgctagtcaatgctaactttctcccaccatgccctccctcactaatctagaccccgaactccttctttagaaaccttccctactctaccggccgcccttcctcaccggactgtcctttgcccaccactgcaggaatccaaatgcagcgcttttcccgccaaaacttgagggcgtcacgctgccgcaaactcgcgcacccgcgccgtaaagcaagacagcgcgcgttcccgtgtcctgcccctctgaatgtcggcggctccaaaagggtgacgtggagatgttgccgctcccgcccagggctgctttgcagtcggggagagatcctggctgaagagatttaaggacggcggaccgcatcggcgcgaattgagctctgggcccaaatatgaagtggcatccggtgtgaggctcgactgggcggtgctcgagcgctgctgggggaagcccaggcctccaagcctcaggggcgcgcgaccgaccgcgctgcgcttccaggcggggctgcgggcttcgctcctggccgctctgggcctgaaaggctgcaccgccacctgcgtgaggccaccggacaggactgtgaggatcacagtcggtgaagcagagtgctttgtaaacctcagagtgcggtactcgtggtgctggagccgagaaaccagcagcagctgctgagagccgactgtgaagaaatgggaggaactccgtgttgggagcgagaggcttcgaaagaactggccacgcagtcaagtgtgtgtggcggggcaagtttcccggagaaagcgagcagtttatgttggagcttgaagtcaggataaccagttttgccttttttctgtgaaccagctccaaaacaatgctttacttcagcccggtctttttgcaggaagaccatctgcttagcttagttctacaaactttttcatttttaatgtgcaaagaacaggcggggagagccaaaataaatcttacaacgcaaatttaaaagctgcgtacgtcatttaagtggaaaagtaaattctgaggaaagagactcaagaacaaaataggaaaaatggaaataagtattctctgacagtaaactagactggaactcagggataggcaggatcatctccattacattctccagcactggccgggcgcagtggctcctgcctgtaattccagcactttgggaaggcgaggcaggagaatggcttgaggccaggagttcaggaccagcctggggaacatagggagaccccatctctacaaataaaaaaatttaggaattagtcgggcttggtggtgtgtccctgtagccctagctacttgggaggcctaagcagaacaatcgtttgagtccaggagttagaggttagtgagcactactgcactccagcctgggcaacagcatgattccgtaggaaaaaaacatatttttttatatgtatatattttatatatatacatatatattttcttagtccttaagactgggccacatacaaacactaagcataactggctattatgataatagtaaagtgaaacaagtataaaatgttactcaaggccggggcctggtggctcacacgtgtaatcccaacactttgggaagctgaggcgtatggatcacctgaggtcagcagttcaagaccagcctggccaacatggtgaaacccccgtctctactaaaaatacaaaaattagccgggcacgatggcgagtgcctgtaatcccagctacccaggaggcagaggctgcagtgagcagagattgtgcc

SEQ ID NO: 914509 - DNA, 4001 bp, Homo sapiens
agggaaggaagaggaaagggtggaagaggaagacagtcctgccagcatgtgtccagcagaggggacactaggagaacctaactgaacacaaggccagggtactgcctctgtccactcgcgcttaacttgcccgctctgtgatggagtgcttggatacaggctgctcacaaatgctgggctgcttctttgacttgccatggaactttccagacaactgccccagggagatggtgtgtgtgatgtgtgaggggtgctcacactgcaaccaggcccttgtctgggctttggtacctctcccgctccccactgctcaccggccgctcggctctgaggcccgtgaggacactctccatcatgctcttcacataacacagactcccaggttcacacacactgtgttcctgcatcaaaccgtttcttccccaaatgccaatgaccttcccttgggcagaacggccccgcacacaaagggaatgtgttgtgttatgaagaggcacaggccccgaccctggtcacccaaaggggtcccagaaaccgctctgtaacaagataaggtggagcgctactgctcccactttcctgcgctcccagtccgtaggtccaggacctcctcggtggtgttgatggaaatgatgggagtcacagcaggggctttccaatgcttttcatggagaccagcagtaagaaatgcactttacgtcacagcccagcacacgtgtatgtcatgtgtgcacatgtgttgtgcatgtgtgtacatgtgtagagcgacagcagccaatcagagctaactctattctgcgatggacgcactgacaactcctgttctgttgtgttttgaagaactaactggtgcatggcggctctggcctgtgatcctagcactttgggaggccaggagtttttgactggttttggcaacacagccagacctggtctctacaaaaaatatttttctgccgggcagatcaccccatcaggagttcaagaccagcctggccaacgtgatgaaacccagtctctaaaaaagatacaaaaattagctgggtgcagtggtgtgcgcctgtactcccagcaactcgggagactgaggcaggaaaatcccttaagcccagaagcggaggttgcagtgaaccgagatcgcgccactgcactccagcctgggtgacagcgtgagactctgtctcaaaaaaaaaaaaaaattcttagctgagtgcgctggcgcacacctgtagtcccaagtagctaggaggctaagagattactagagcccaggaagtcgaggcggacgggcgggcgggtcaccctccagtttggacagtcagcaatggaagcttcaagggttggggctgaaccaagggtgggtgggatcgcgtctgatgcgcccacccttcacggggaccgcgtgcccctcactgggagggcagcccgcctggagccctactgcctctgctccctctgggggtcctggggacccgatggccaccactctgccacacgagccgcgcgctcacacactcctcacccgccggccacatcccttgtctgcgcactcaggccccttccacccagcgcgcctagctctcaggcttgctcgccccagcgcacgcgctccacctcccactcgcggtccccccgacacgcgcccccgtccacactcgccctccacccccgctctcgctcaccctcgctctcatagcaaccctctctcaccctcgtcctcacaccctctcacacgccccctcacacacttgctctctctcacgcacccgcccggcgtcgcccgcgaccccacgcccgtcctcccggggccgagcctcgctgcccggcgcgcccactttgcgggagggaaactgaggccgtgcaaggaggaggagcaggggccggccgccgcggggctcacctgcatgtcagggaggccggacggccacaaacgcacggccggaaaacgctccagcgcgccggaagtcccgccccaggcgcccgcgcgccgccgccgcgcacggcacgctgggatggagaggggctgggccaggacaggggactgggcagggctgcccgaaagtcggggccggggccggggccggggccggggcggggccgcgccgggggcggaccccgggcccggcgcgttcaccttgagcgcccctggtgctcgcgctggagctggttatcaggttcccggcccaggggtagccgggttcccagcgccacggctcttaggcaggcctggcgcccttggcgtggggccgcgcggggccttgggctccagggcctctgcccggctcggcggtgccgggagaaccgcgcggtgggctccgccccggcacgctcccccggggacccggagtcaccactcctggcgtccccccgacccccgcctgagtggaccatctccatccccaggccgatggcgcccactgcgctgtctccagcggggactgcccgaaacgcgcgctctctcggtccgcacccccgccttgcacattgcacgagccggagccccaggaggcaaaccaagttcccaactcagcccctcgcgcttggatgaacgagcgcgtggccagcacttttgagtcaccgcgcattctacgcggcacaggctgtccgacccccacccccagccctagccgttcccagcgcagtttcctacagaaaaccgcacggccgggccccaccctgccccgctcagccgttcccggggcgcgcgtgggctccaagacaccctgcacagctgcttctccatttctgctgcttgggagctttctccttaaactaagctttgtctttctttctagtcacgtttccttctttcccttcccggtattttctgccagctgacgcccacgcctttcctagaaggggctgggggctgcatgcggtgcgaggcacgtcccccaccagctgtgggctcttactcagcttagcactcgctctcagcaaacggcctggatggtggcctgaagcctgacctttgggggtgaagacctcaagtcggcagagctctggagagggtcccagtaagctatggcaggtgtcctcagggacatatgcgcagtcctcccaatgctaaggaggccatggcaacatccaacttctcttaggaaaggcacttagccattttaggatctcattgaggtcagaggtctttggcgctaaagaattgcagaatcgatcgggcagccgccgcctttaatcctagcactttgggaggccaaggcgggtagatcacttgaggtcaggcgttcgacaccagcctggccaacatggtggaaccctgtctctactaaaaatacagaaattaggcgtggtggcgcatgcctgtaatcccagctcctggggaggctggggcaggagaattacttgaacctgggaggctgaagttgcagtgagcagagatcacactgcactccagcctgggtgataaagtaagactcggtctcaaaaaaacaaaaaaaagaattgcagaatctacttagggttcactctgggccagaactacagacctcaagagcagatggggcccgcagatgggaggataggaagcccagagccaggcccctctgcagagctcccaacggccgggttcctgggggagtcttgtcagttgccagcacaaagcggtccgcttcccaatctgcatagtttgtgccaatgggccccgtgtacctgcattgaaaactgacttcttggctgggcgcggtggctcacgcttgtaatcccagcactttgggaggctgaggcgggcggatcacaaggtcaggagatcgagaccatcctgattaacacggtgaaaccccgtctctactaaaaatacgaaaaattagccgggcgtagtggcgggcgcccgtagtcccagctacttgggaggctgagacaggagaatggcgtgaacccaggaggcggagcttgcagtgagccaagccattgcactccagcctgggcgacagagtgagactctgcctcaaaaaaaaaaaaaagaaaaagaaaaagaaaactgactt

SEQ ID NO: 914510 - DNA, 4001 bp, Homo sapiens
gttaagttgtatgagtttttagccaggtgcagtggctgacccctgtaatcccaatgctttgggaggccaaggcaggaaaattgcccccccccgcaaaaaaaaaagtatcacaatgaaataaggtttcactctgtcacccaggctggagtgcagtggattatggttcactgcagcctccacttcctgggcttaagcaaacctcctgcgtcagcctccccaaatgctgggattatagacataagccacctcaccaggccaatgcatgagttactgaagcacccgagattctgttatcaattcagacaacctaaagcacgcaaaaaggagtgaaaagaggcttcatttataaattgtttgaaatgttgaaaattgcttaattgagtttatagatgggaccaaatattatgcagaagcccctttaaagtgactgcaggccaggcgcagtggctcacacctgtaatcccagcactttgggaggccgaggtggacggattgcctgagctcaggagttcgagaccagtctgagcaacatggtgaaaccccatctctattaaaatacaaaaaagtagccgggcttggtgatatgcacctatagtcccagctacttgggatgctgaggcatgagaatcgcttgaactggggaggtggagattgcagtgagctgagattgagccactgcactccagcctgggcaacagagtgagactctgttaaaaaaaaaaaaggccaggcacagtggcacatgcctgtaatgccagcactttgggaggccaaggcaggaggatcgcttgagcccaggagtttgaaaccagtctgggcaacatggtgaaaccccgtctctactaaaaatacaaaaaaaattaatcggacgtggtggtgtgcacctgtaatctcagctcctcaggaggctgaggtaggagaattgcttgaacctgggaggcggaggttgcaatgagccgagatcgcgccactgcactccagcctgggtgacagagcaagactccatctcaaaaaaaaaaaaaaagtgactgtaaagtcttctaggcttaaaagggaataatagggggtttgtaaaattgaacttaacaggttaataaattgggttttgaatttctaacttcaatgtattgaaattaaattttaataaatcaaatcctaattgttgaaatttaatataaatccaagcataaccaccttgcccaggcactaaaccagccctcagcccccattcccagccctccttacccggggtgggtgtggagtgccctggcggaggtccaggctctgccctgtaggcccaggtctgacctgccctgaggccctcctgcttgcccactgcctgtctgccgtgggcatgggggggacagagtagggcaggggcaggccggtggggtgaggaggcctgcagagatgagtgtttctgctgctgactggatccctgctttaggagaccccatgccttacctgggatattcctgggtccccagcctgaggatgcctctcacagacatcctcaaaagcactcgaaggctgggagtggtggctcacgccgtaatcccagcacttcgggaggctgatcacttgagcccaggacatcaaggctgcagtgagctgtgattgcactgctgcactccagcctgggcgacagataggaccctgtctcaaaaaaaaaaaaaaattactcacacctggttgttggaggtgcctggtggctgtggggcctttggggctgggtttgtgtcttccccaggctggccagtgctcctgggtggggtcgcggcggctctgggcgactcctcatttgcagagtcagcacaggcagggcccttcccaacagtggcagcctcgtgactctgtcctgttctaactaggagaccttggcctgggtcacccaagggcaggacctgggccactattgctgaccacgtcctgtcactcctaggccttgaaacattctagttcagaggccggaagcccaggaagagagggacacacaccagcactccctgctgcctagccctccccacctgtggacggagacatcctctctgggtgctgggataagcaaatccagggcaagcaggagggggaagtggcacactcacgcccagcggaagcttctggatccagtgccagagccagcacagcagttctctgcctgtgttccacgtgtgggcccccgctggcccagccggccctggccagtgacagttgcgtgtaggtgtctggttggttgctgggctgatgctgagccccgaggtgggcatgtgtggtggcacgtggccctagctttgtgtatttgccctttgcaaaggctgcgtgcgtcacggcaccattgtgggttttatacttctcactatcacacagccaacttaaagtaccgcaagctggctgggtgtggcggctcacatttagggaggctgggacaggcagattgcttgaacctcaggagtttgacaccagcctggacaacatggtgaaacctggtctctacaaaaacatttataaattagtgagtcctagtggcgtgtatctatagtcccagctcctcaggaggctgtttgggagggtcatctgagcccagggaggtggaggctgcggggagctgtgatcacaccactgcactcctgcccaggtgacagagccagaccctgtctcaaaaaaaaaaaaaaaaaaatctaggctgggcatggtggctcacgcctataatcccagcactttgggaggctgaggcaggtggatcacaaggtcaggagatctagaccatcctggctaacacggtgaaaccccgtctctactaaaattacaaaaaattagccgggcttggtggcgggcgcctgtagtcccagctactcgggaggctgagccaggagaatggcgtgaccccgggagttggagcttgcagtgagctgagattgcgccactgcactccagcctgggcaacagagcaagactttgtctcaaaaaaaaaaaaaaaatctgaaagcaaaggggaagggccggctgcctggccttgatgagatcaagaggtagtatttctccgtggtggtgggttgaatggcagcccccgaaagcttgtctaagttctcactcctgtacccatgaatgcaacggtgcaaccatatctagaaataggatctcagccaggcgcagtggctcatgcctgtaatcccagcactttgggaggctgaggtgggtggatcacctgagatcaagagttcaagaccaagcctggccaacacggtgagaacccatctctactaaaaatacaaaaattagcctggcatggtggcgtgcacctgtagtcccagctactccagagactgaggcaggagaatcccttgaacttgggaggtggaggctgcagtgggctgagatcgcgacactgcactccagcccgggaggcagagtgaggctcttgtctcaaacaacagcaacaacaacaaatagaaatagggtctctgcagaggtatctagggtgaggatcttgggatgagatcattctggatatagggtgggccctaaatccaatgacaggggtccttgtaagaagagaagggaggtcgggcacagtggctcatgctaatcccagcactttgggaggctgaggcgggtggatcacttgaggccaggagttcaagaccggcctggctaatatggcaaaaccccatctctactaaaaatacaaaaattatctgggtgtggtggcacacgcttgtagtcccagctactcaggaggctgaggcaggagaatcgcttgaacctaggaggcagaggttgcagtgagccaaggtctcgccactgcactccagcctgggcaacagagtgagactccgtctcaaaaaaaaaaaaaaaaaagggaacagaagggagaggcagcactgagagagatacaaggggtgaacgtgggggtggggcctccagaaggaacgaaccccactgacacctgcttctgcctttcgaacggcgaggccagaatgcgtttctgttgagttgcagcc

SEQ ID NO: 914511 - DNA, 4001 bp, Homo sapiens
agccagccagcaaatttctagatactgcacacaacctgtcagccaattaaaagaaaattggcagaaaatgacggaacacgttctttgtttttgtttttttgagacagtctctctctgtcaaaggctggagtgcagtggcgtgatctcggctcactgcaaccgccgcctcccaggttcaagcgattctcctgcctcagcctcccaagtagctgggactacaggtgtgcgccaccatgcccagctaatttttgtatttttagtagatatggggtttcaccatgttggccaggctggtctcgatctcccgacctcgtgacccgcccaccttggcctcccaaagtgctgggattacaggcgtgagccactgcgcccggcccgggaacacatctttaaaggtctcaatagaaggatgcacacactacgttgaatggttatgtcttcggagcagagtggtgaaagaaggtcagacttctgttaagtctgaatacctacacgcgtacttctgtaattcaaatttaagattaaatattttcaagtttaaaaaaaggaaaaaatggccgagcgcggtggctcatgcctgtaatcccaacattttgggaggtcgaagcgggtggatcacctgaggtcgggagttcaagatcagcctaacgaacatggagaaaccttgtctctactaaaaatacaaaattagccgggcgtggtggcgtgtgtctgtaatcccagctactcgggaggctgaggcaaggagaatcgcttgaacacgggaggccgtggttgcagtgagccgaggtcgcgccactgcactccagcctggggaccaagagcgaaactccgtctcaaaaaaaaaaaaaaaaggaaaaaacatttctaccttactcttattttaggagccacgcctcccacctttgtctagtaacacagctatagtgatgtctcttaggggatgagaaaatgctactcctccactaacaatgactcttggagagggaacaagacatcaaatcgcgaactcgaaaaactaacagaaaaaagttaaaaagtggtttgtgtttttaaagccagccacaacaccttcattcaaggccctaaaccgcagagactttctagacctatcttaagcgtcagtaccacacgcacttcgtgatggaacggtattgttctcctagaacagacccgttttctcatgaaaccgacgtttttacaaaagcctgtttgtggacggcctgcggcggccgcgaacccgcttcccttggattacccagggctgggagaaggagggctttcgccggctgcggtccccggtccccggcctccgccccggccccggctcccccggcccccgacccccccggcccacgccccctgcccggaccccgccccggccccgccccgcgtcacctgactgtcccgcggcccccagacccggcgccaccgacctgatgacactgatgtggaactcgtcctcgcggaggccccgccaggcgccgggcaggaactccttgcaccacagataggccctgcgccgcgtccggggctccggctgctcgtctgcgggcggctgcggcggcgggggctggggcagcggcagcggcagcggcagcggcggcggagggggcagcgcgagcggcggctgttggccgcccagctgcttggactcgaggtcgctggcggcgtcgcgctgctgccccacgccgggcgccggggccgcgctgccgctaccgcagctcagcagcagcccgagcggcgagggctccgcctcgcccccggtgcagaatttggttttcatgcccgacaggcggccgaggaggcgcgggcggccgcagcgcgagaggactaggctcagagtccggccgggcgccccctcgccgctctctcactggcaggccggcggggcagggggccgcggcggttgggcgcgcggggcggcggcggcggctgcggcgactgcggcgactgtggagcggggatgtgctgctggccgctgcactcgctcctctgccgccgccgcacgaggagcgccggccgcgtcacagcccgccctcgcgctcgccactgattggccgccgtccgccggcccggcgcatcataaccgccgccgccctcgccacaccgcctccccattggctgcggcgccgcccccaacccagagcgctgcggcctccgtgagcggggcctgggcgaagggggcggggcgtcgagggggcgccccggcggtcgcagggaagggggagaggggagcgaggcgcggggggcgccgggagagcgcctccgcggtgggacggagccggactgggccgagcgagggaggctcctgagcctcggaggaccccggggttggctttgggagctgaaagtttccttggacccctcggaagccccgtgacatcagaggccgggcctggcaggggcaggcaggaaacgtgtctggaggctactgccctctccgcgtgaccttgggcgagcagcctcctcctggggctcagtgggtgtgattttgtaacatttcccagcgctgccacaggcgcgtctcgccctgtccaacgcggagcccgaagaattactaagaaaccgaggtctgaaggagggaagaggtgacgggctcgaggccacacggtgggccaggctgggcccggctgcacgccggctaccggggcccagccctctgcacgcctcccgcagcctcagtttccctgtccgtggtactgaggatgctcgggcctagaagttcagggctggaggcccagggaccgtcgagggaggggcatcatccccgccatggggccgccgcaactgcccagagcacaggccaaaggtgcgtgccacggggctactggcgttgtggacgctgcccctgcctccccatcccccgcaggaaacagccttgtgaccgtgactaacgcacctttgccggggtagaggggcaagggcccctgctaccgtttgccacacactgccccatgtccctcactgctcccgtccttcctagaagtgaggtgctgatacatataaaaattatggatcccattttatgggacatgagctgaaacaggaggtttcctgggctgccaggggcttaggaaatccagtgcctgatacacaggaaatgcttctatgtggggagttcacagtcttccagaagcaaaaatgttttttggttttttttttgagacggagtcttgctcagtcgcccaggctggagtgcagtggcacgatctcggctcactgcaacctccgcctcccgggttcacgccattctgctgcctcagcctcccgagtagctaggactacagacgcccgccacgacgcctggctaattttttttttttttttttttttttttttgtatttttagtagagacggggtttcatcgtgttagccaggatggtctcgatctcctgacctcgtgatccgcccgcctcggcctcccaaagtgctgggattacaggagtgagccaccgcgcccggccgcaaaaatcttttagagtgtgtacttggctgaacttgctccacgcaaaatggtcttatttaaggataaaaatgaaaggggacttttgtaaggctgctgtggcgacaggcctggaagttgacctgcagggaggtaggagagaccaaggcccctgggacggaggccggccactggatgtttgaaaggctgagaagccaagggcttcaatctggggaggccgtttggataaaggagccaaggactttctctaaaaataccggctcacagggaggtggggccatgccaatggcctgcccaggtgacaagccctttgtcccactgtcccctggcaccagtctggtaatctcaaaggaatgccagaaatctggccaggaggaagggacactaaagtaaggagtggccctctataatttgaaataactctttctggcatctgctggcttttgttaggaaaagcctcagacatttttatgggatcacagttccctgtgggaggaagaggttgcctcaaggccaggcatggtggcttatggc

SEQ ID NO: 914512 - DNA, 4001 bp, Homo sapiens
ctaaagtaaatatacttattggaatttctctgctgtaactagtactgctgaccacccaagttttgagacggttttcctggtcgctttctgtttcctaggcactgcaccaattcacacatggatacagacttccaacaaatgactatcgcccctgaactttattgtctcataagcaaagcgtcagtctttcccctgtattctatattaaagtagaatatctgcagacataagtgcaattaatgttttacataggctgccaacaccaaagggctttaaaatcgtttctcgattttgtcatcgactgaaatctcacaattttcctcatgagtagcatcatatttgcatcataaaaatgtcagtggcggtaacttgagtattgcataggttggattttccttttccttaaaactctgtatcaatggtcttattttaaataacgctatcaatttacctgtgtgccaaaaataagtatttcaaacatctcagaggtgaagagttcaaaaggcatcagttttcatctcctccacaataatgaaggatgttattaatacaacctcattgaactgagcttctctatcaaatgggtctaattaacattacatgcgtcccagggtggttatgaagattaaataagataaagcaataatggctggcatgcagaaaatataaactaaatgctagttcaatctgaaaacgtgttgtcacttctcacgatacgcaaggaatcatctcacttctttgtcaatcaaaatttcaattcactgatcatttcccgtccttcacctaatagtcattttcgctttggatccttaactcgacatctaggtgctgtagatgacattcactcattttatacgggagtaggcatggtagtaaaacgtggaggccacaagaagaacaagcaacaaatgccgctagtaataaaaagataactaacgtaccaccaggatgaacctatcaaaacagcgtgaagatacagagtaatgtcccttaccaagaacacttgtaagaggtttgtaacagcggatcgactgaacacaaacttctacaaggcagagcttacatgctaggacaacccgctgctcatcccggccacctctccctctcgcgcaggcaatcacagccatcactacttcgggaactacaaagcaagctcaccagtacctcgttaatttttgcttccccagagactggagggccagaggagaaacgtgttcgttctaaattccaggcgacttaaaaggagtgcggggacgacgggggaaacacgtggatccatgggagcgtctctctccgcagtggcagaggacagtcaggcgccggggccgggcgctcgccaagggaacgcggcgcaacagaggggcggccggcgggctgcgcgggcagccaagggaggcccaggaggggcatggacctggggccgcgcgaggacggctgcaggagatccgcggacaccctccggcccaaagggcctcccctgctgatgaggtggaggggagggagggctggcggcgcgttcctcttaccgtcggaattggtctcaggatcgaagcgctgaccgcagccccggttgtagcacagcaaggccattttcttttcccaccgtcacaggcaaggcccaaacaccgggaacggcaagaggatgcgtttgccactcccgtgtcgctagcaccggtctgacgactgaggcggctaccggcttccggaaacgatccgttgcgtttcaggaaccttcgcgaattttccggtcgcgcaggcgcagaggagaagggacgaggcggaggtagcggcgggaggctggcactagcccgggccacgataggtcggactacagctggtagcaactgggggtcggaagtggagcccagacaacagcggaggagaaatttccggggcagaaaatgaaggtgtccgagagactgacaattctcttctgacttcctcagtgctaactggctttgggtatctcctgcagcaaagtggccgccccgccctctcatcccctgcgacccagcacccttcttccttgccttgaggctgcgccttagacagcccggtgggtatctgtttaccccttagcactaagggataagtgcacagtaagtgcagaatcatacagtgtttccaaatcctcagggtagacgtgtgagcttagtaaatgagaggaatagcggacgaacctctccgtgtgtttgtgtctcgagtgccctcatctcaggagcaattttaataacttaacagttgcggtcacattactttgaaaatacaaaaaacgtagaaatcagagtagcaaagaaaattatggatctgatgctgtgccagaattgatcacagttgctctaaagccctggggtaatagttaatatttcatgtgagcctccacttaaacgatttatcaatactcagtacaccactcttggaacagctagtaaaacttcaggtgcattataaaaagtacagtaatgcattggcttcaacttgcatatttcccaaacatgggcgtttgcaagaaaagcaaacactttttgataacatatactgaaggatcttaaaataagatcagcagcttataagtgaacctaaaaatctatacactgtttccattgatctcaaggttatttagagatctgctcacgtcctcctacccctaaagactttttagtttttcatattctctttctcttcttctacctagaagtattaaattttcatattgtgatccaccatagataggtatgttttcttcatttaacctaacgtgagtatttttctattttgtttcatagtcattgttacaaatgacggagtattctgttgaataaatgcactgtaatttaacctttctctaatttccccaactttattatatataagttacagtgctcaacctgtgtattgtttttcttatttcgaatttccccctttaggaaaatttttggaaagcgacagttctggggtaaagggcataaggctttttaaataactttaagattttaaagatatatagagccaattgctttccgaaaggtggtaccaatttacaattgcaccggctgtgaatgtaatagaccgtagaaattgatcatacacaattggaaatgagtaagtggagagctctaaaaagttttagttgtgaccaaatctgttgtcttgagtatcctagtatcaatgcaacattaccaggattgttagtgaactaaaccttttaaataattttaatgtttatttctagtttttcatctgtagcattttacaatcagaatataattgcttatggtagataatttggaaaacgcagaagtatactaagaacaaagtcaacaataattccaccacccagcaataagtactgaatggctaaaataactctttggtaaatttattttcagtgtttcctgacaccccaagcatttatagatatatatgtttaaaaagagtcgtgttatatataggagtttatgttcctcccttgggtattttgagaaactataaaattaaatcattcttatgattaagaaaaacagtgttacagcaacagcctgtttcaatcccacctccacttacatttccattccaacacttcagtgctgactaacacccactgtttgaaaaactttctagaatttacatgtatattttatatacactttgaatatatcttcccttccttctttacccccatacatatcaaaatatgctttaactttgactatcttgttattaacaaaagacttaaataaatatgttaacttaaaacaattgtcaattattcttggtgcaaaatgaatgtttatcatactactctctttttctgcatttaaaaatatttcttaaaacaattcagttaagtttaattaagctccattatcttgggctgggtgctgtggcttacggctgtaatcccagtactttaggaggccaaagtaggtgaatcacctgaggtcagaagtttgagaccagcttgaccaacatgacgaaaccctgtctctactaaaaataca

SEQ ID NO: 914513 - DNA, 4001 bp, Homo sapiens
ctaagaacaaggtgtcaagtggatgggaggcaggcatggagggcatcctgtgcaaagtctcttttaagaaataggaggcaggtgttaggaggaaaccctcagggttcaagaaagcggaagagacatttattaagtacacagcattgtgctgggcactttaatccgttacctcctttaatcctcccaagaaccctgcaagttctggattagtatctctcttagacagattaggaaattgaggctcagagaagttatgacttacaaaaagtcacacagctctaaggggcacggccaggatttgaatacaacactgagctaattccattacttgttctatgtaatggaaagacttatgtgagtctcatgctgctggcaggccagagacactcagcctgctctcatgagcagaaacaagaccgtaacaaagtccagcactaccagctccagaatgtcacgtgcaaaagaaaggcatagatggaggagctgagctggggagaggaaagagcaccagactaggagttgggaacgcagggtcttaatcccaggctgtgccatgtatgtcctggagaaacccactgcttgaatgaagctcctttcttctgattaagagaatgtggtttggttttccatcctcacagcattctaagagattggctgggcatggggaggggggaccaccagcctattgtgggcgcagtgaggaaactgaggctcagattgatgatgtaacctgtttgatgttacactgtatctatgtggaaaagcataattgggaactgattttttttggaagctatcaagcaccagtcttgtgctagctgctttacctcttttctctaatttaatcctatcaactctcctaggatttttacttccgctttatagattaggaaacccagggtcagagaggtgcactctgtgacggcctcccagcagctggcattcagcggggctgggatggtgaagacgctggtctatctcactgtgccctgccgcctcccagagtctcacactgcaaattcagggttccttctagacaatgtgaggcagggaataaagcatgggatctggaactagagttctggctttggatggcttacccgctctgtaagttttagcaagttcctccttgctcagcctaagttttctcatctgtaaagtgcgaatgataatacccacctcactggagagttgcgaggatcaaaagagagaaaagaatgggaaggttatcctaattacctctcatttctgtccaatggctctttccaaaggcaaaaagccttttcttctccatcacactccttacctgtagccagacatacccgactccctcctaggaacagtaagtcctcccccaacccaaaacacagtgccctgccctctccccccgctgcccttggtgcccctcctcaggtccctggcagcagccctctctcagttctgagttgtgccgagttcctccggtcccccggcccatactggtcctcacggagtctccacccctccggcacaggtgctgcctggacggctgtcagaagagcttggggtccaggtcctggcgctgtccctcacattccaggggccgcatccctcctctgcccacccagcctcccggtctacttacgggctcgagcgtgggagtccagggggaaccagagcagcgcgagtcccagcaaggaggagaggaccctcacctcgggaaccatcctttccccagggtcaggccgctggtccgggagcggagtcgggaggaagggagacgaaaaggacacggaggcacaggggccacagatcaacccacagaccccaggaggtctgctgctagagcggggtcggagaagggccaggaagcagcggtgggcaggaaaggagggcaggaagggaggtctaaggtgggaagaagagaaaggtggaaagagaacgcggggaaaggagggagagatggagagacgaaggaaggtccagcagaagggagaggcgatcaaagaaagggggaaggtgagagggagaggaggagaaagcagggagaggaccggcgtctgccgagcgcgcagcgccgggcgaggcgcgcgggaccagcgggtgttgcgggcgcgcgggctagaggcggccggcgccccctgctcggtgggctcggggtcgggccgcgggggcctggggcccggcggggcggcggtcccagcagcggcggcggcgcggcggccgcggagggaggctgagcgcgggccggctgtgctcgccaagggcttcaggcgccgcgctcgggcgcatttgtactttgccgcgggaagcaggcagcccggcctggcgctggcctagcgctggcgcctcctctggggcaccgcgggctcggtggattggccacccgagaaacaggcccactttttcccctcctctcttgtgcgggtctccgggacggacgctccaggcgcggcgccgagtggaggcgagggggctgcggagggggaaggggccacgcgggccacggggtttaacccctgactccccgcgacgccaagaatgcaggagggcagagttgagggagacctcaggtggaactttcaggtggggaaggctgagctgtcggggctgcgggtaccgggaaggctcagggtaaggcgctcggcggtgcgtgcccggaactccgcagatggatggaatcagaacactggcgttcttaattcagtttgtggtctacagcacgccaccggagagtctgttttcccagctttaaaatgggcattttaagatcttaaaatatctctactatcttcccacgagtgttgctaagatgaaataaggtaatgaacgtcgaaacactcaccccacaaagagaaggggtcctaattccaggtgcctacaataccagtggcccctgtccccactccgtctgcccatgcgccattctcaggaaagtcagcccatagggatcctgtgccttcccctggaggtcttcctctgctccccgctcccactcccgaatcaaggcaagatctctcctttgcctttgcaggtgaggcctgcacttctctgggagtgatggtcaccttcagtcatctttagggagagctgattgtcaaagagttttctttcccaccagaaggggagctccctgaggacagggccctgacaccctccagccctcaaatggtgctccatctcttgtgttgaatgaacacatgcactaataggacactaagaagagaatagccagctctggccagaccagaaacacacaagctctgaaatcaaaagggcagagtcactgtcctggctccatccgtaacttgttgggccactttgagtaaatacatctatccttgctttggacctcaactttctgcccagcttctcttgaagagctaatggagactccaaagagtgccagaggagtatgaggtgggaagggatgttgagccatatcccactctggtagggaatcatatttccgggtttaaacacttggctggctggctgtaaaggtatctttctgggccaaggctgggctccccattgcactgtgctttcagggtattacccccaagatctccaccctccaaaagagagcagtaggaggaaccagtgatccccaaactggcccttcctagggctctcaggatcagggacaaacatgatctgtccagtgcccttcaggcttaatttctactctaatctggccagtctcttcctttcccctgagtattctttattttaacagatagtgcaagcttatgcatgtcaccatgcttccctttttgcctttgcttccagggatctcagagttaaatcctgtgctgcttaattgcataaacaatctcatcccaagggtttgggacagtgatcttttcctttctctttgtttaaaatgtgctgtgcacatatattcatgtcttagatgtaagaagtggattaagatgggttcccctacatcctgcccatcatacttcaaaaaaggcctccaccatctcagccctcctgtccatccctattatccccagagt

SEQ ID NO: 914514 - DNA, 4001 bp, Homo sapiens
tcctctccgcaagccccctgctcctggctccttgcactctcctcctcatttcctttcttctctctccctccctcctccatccttgtaggcatcaccatggcaccacagcagagcagaaacccagcgcaattcacccacctctccccgcctgctgggagcccaagcttctgcgtctcagagcttactgcgccccctgctctcccaccccatcttcctgctcatggaggcggcagcgcagtgttgtgctgaggatgcggagaaggggtccgagccccagctggatccctacatatcccttctccgaccatgagcatgtccctttccctttctcagcctcagtccctccatacaatagaaagcctcctttctaggtctgacatgacctctggttagccccttcttgacactttggactccccattacacttcagaatccagttctcagaactccaaccgccagctgtcagctgcgagccaagacccacatcttctgcagcccatttcactatctccttccctttcatatctcagccgcgatagcgactgcagcttgcctggtggctgaggtcagagggcagagaactctcatctgacagcccactgaacagctgattaccctgagaaaggagactgtctggctactggagactgcctgactccttccagccagttgggcaggggtcttgggtcagtctgggtggagctgcaggtgtgttttgtgcaaagatgtgaacccctctccattggctctgataacctctaagctgcacatgtctggatgacctaatgagagctgacgaccccctccccagctggcctgcccaggagctgacaactctacaagcatcagagttcctggcccctagcccatccccatgttgtgcagtctgcgggcactggggtgagtacctggcgtgggtgcccattggtatccatgcattgcctggatataggactgagacccaccctgcgggagcccaagatactagaaacataaggagggtcctctgggcccctgcgcacgtcagggccaccttccctggctagtgtggccacccacatgcccatttgtccccaaagagccctggggctctttgcctggtctcctgctggcttctggcctgacacccaccttggcttctagcttctctatctggccagcagcctgattcagtccatcttgggggagctgaggtggacgggggtggtgggtttcagggtgccctgagggaggacaggaggttctgggactggcacccccatcaagatgggggtcaacctcccacaggatgctggtggcaagggctgcttcctggccctttgcccttcccactctgcccctagggtgttgggggttctgcttgctaccaggcagcctaatcccttctgggcctcaggtccagtttcctgagggggatctccatctcctctgccagcagaagcccagaaaaacatcagctatatccactcaaagccaggaggccgagtgtttggagcagtcagtgttcaatgctacagagcccccttgccctctagacccctccctggcctcctcctatctctgtgagtccatccctatttccatctcatcctgatccctgccctcccccgctccccaggaccctcctaccctctaccttagtgcagcccctcccaagccctcccaaatgtactcaccacggggctgaagaggggtctgtagggtcctcagccccactgcctccctgggggcctgcggcgtctccagggacccaaacacctggctcccagggggagctgcgccctgtgctggcagcgggagaggcacagccagtgattggcatgtcccaccccctggcacgccagccttagcggggagggagaaagggaaagagagggagggaggaaagggagaaaaggaagggaggggagctggagggaagcctcaggcagcgtctggggttggactaggttctggagtgtgcccccctccttcaccagggcacccaatttgagccccaagagggaggagaaaggacatgaggaaggcgagcccaggaaggctaaaagtcccggacgggagagaaggcggatacagggagacaaacacccacacccactgcacagacccggcggcacacacaccctcacaaaggcacactgtttccttgggctcctccccccacccaaccttagagcccccagcccctgtgcaccatgccccaacacacatgccctggtattcacatgcctgcttccctcgcacacacgccctcccccctgcacatgcccacgcacccacccacccaactacacaccctgctcttcctccctgctgtgagagagctagattccttctgtttggaaatgacacattgggcctcacgtgagaggctccaacttggaacagacccagagggctggcgcacccgcccgggggctgagtgaacgtgcccgcatgctgggctgtgtgcgctagcattgggctatgcatagcctgttgtgagggtatatgggtgtctgcttttcggggatgagtagagggccaggtgcctgccccatgtgcggctgagtgccttgcatatgtgtgtccctgtgtactcatgtcaccatgcagcctgtgtaagtgcaggtgtgaccctatcagtctggaggcaggacgcgtgtgcacacgtgtgtctgtatctgatgtgtggctgagtgttgcccaactgtggaacttgctaattctgacaagtgaggcagcctctacctgcctgctccaccccaagcttccacttggaagacagacaggcagacagacagctctcctcccagcttgtcaagctctgtctcccctgactcccactcagggctcacaggtgtgtacctgggaggagatgagccctcctcccaatctccctcagccctactgggtgaggccagcatccctccctgccaggctggtctggacttctgtgttgagcttcctcagagatagaacccctggggggccgtttgccctagagatgtgggtcctgcaccgcctctgtttggccctagagacctccccgggagctgactggggaggagagttggaggctgcagggactgccttctggggctgctgtgttctttgcccactgggctgtgtcgaagtcttggggtgagaggtgggaaggaatgggagcatcaattatccccattttgtaggtgagaaatctgaagagcagaggtatgattagcatgtggtgggcaggtgtttgggctcaggtcacttggctctaagcccagggctctggagtctggggcaggggtttcccctactcatttccccaccaagcgccgccccccgcccccacaaccccgccaatgctggtgcctgagggtaacctggggctttctcacccaggagcccagttggccaatggagccaagtggagctgaaactggagttcctggggtttggtcagcagctactggtgggcacacgtggcaggtacatgtgggggcatctgtgcttctcaaagccagctggggttccagcaggcacccagtcctcctccctgctgaagtcaagcagacgctgcagcttggagagaaatctaagtgagcatcccctttccatcccagggtcacccagccggtcagggttgggtcagaacttgaccagtccctacccttgggcgcggactcgggatgccccctgctgggctgccctgggtttgcggctgcggcttgggcggcgcggtggggctgcgtgtacttgtgcgcgtacacgtggctgagtgtgggggtgttaggcctccacgctcaacatccatttccgaatctgaatcaggctccctctttgccacctccccccagtctccttggtctcccttttctcttctcccaccgcctctgcacacgtccctttagaaataaaaacacttattttgtgggcgggtggggagggtgtccagctttcccctgcctcctcctgagtgcccccctctgtcccacgcggctttcttctgaagtctgtgcagtcgcggacgcag

SEQ ID NO: 914515 - DNA, 4001 bp, Homo sapiens
ctggcctccatcatacccacccagaacctggctaagtagctgcagccagaggagatttctgcccctggagtgggatttggggagagggggctgagcctacatgcggggtgcaagggggcagaaagcaccgattacagcagaatgggggaccccacccttctactcccttcccaagcctccttttccaagcactggcccctttgttcttcctgagggggccctgggcttcggcccccatccagatgtccattcttccagcactgctgatggttggtcacagtggggcaggtgcccacccaggccagtgccccgcagctcgctgaagcagggccacagaggtgggccaggcagccccagttcagacactccctggggtgagcctcctcagcctgagcagagatctggtctctgaatgcagccacagagcctcttctgaacttcctcctcagcaaacgtgaacgcagaatggtgcctgcaactcttccccacagcaagtgagccgtgtggtccccccagcacacgcacgcaacaccagcacctcctagggcactcctgcctgcctacctggcagtgccgatgttccgatactggcacagcagcaggtgccggaaggtctttttaaaggtggcgttgcacagagcatagcaggcagggttgatggtgctgttgacgtagcagagccagtagccaatggaccacaccgtgtcagggatgcagctctggcagaaggtgttcaccaggaccatgacgttgtagggcgtccaggtgaggatgaaggctagcagaatggcaaagatcgttcgtgtcactttgcgctcccgggccgccatctgccgcttcttgcgcacctggttgcgagcgatgctggcgaacttgcgggccacgttggccgcagggcgcatgccagccggcgtggcaggcacaatctcaatggctgtcacacactcattgcctgtctgcttcgtcacaatctggatcttggaccatctggaggctgggttgagggcccgcggctgcaggggaggggcgggcatggcgggcgtggtggcctctgtggtggacagctctgtggctgggcgttccttggtgttctgggtggcactgcctgagctggactcattggaagtgtccttatcagccacggggcgcggtggcggtggcagcgctggcgggggggcctcctccagcttgccattgcgcagctcctcccgggcggcctccccgggcgggggcttcttgacgctctgcttcattagtgggctcttgaggaaggccagcgtcttggctttcttctccttcgggccctcgggccggtgcttgtggactcggctgcgactggccagggagatgtggatgtacagcaccgtcatgatgaccacaggcaggtagaaggcagcaatggctgtgccaaaggtcactgctgggttggacaggaactggatgaagcactggttgtcgggcaccgtccgcttacccaccacaaactgccagaacaagatggcaggcgcccagagcacgaaggacagtacccaggcagcagcaatcatgaggcctgccatcttggtggtgcgccgggcagggtaggtgagaggcttggtgacgcagaagtagcggtcaaagctgatgatgagaaggttcatgacggaggcgttgctcaccacgtagtccagggccagccacaggtcgcagaccacggcgcccaggggccagtagcccttgatgatgtacacggtgtagaggttcatggagaaggcgcctatgatgagatcagcacacgccaggctgaagaggaagtagttgttgactgtctgcagctgcctgttgaccttgatggacagcatcaccaggatgttgcccacgacagtcaccaggctcagggagcctgtcactgtggcaatgaagaccatttccaccgtctcatagcgattgtgggatgatgacgtgaccaggcgcacggactgattgcccgagctgccattgacaggtgtgaagttggccatgttggttgccaggggtgggtaggccgtgtctggggaggaaggggagagaaaagcatgaactacaggagggaatgggggagtcatctggaggtacactggattcaaggtgacagagggacattctctggcagaatgccttgagagaactctgtcccgccatcccgcatttgcccattcattcaacattaattgagcacctactatgtggcaagcattgctcagggtgctgtggctacagaagtgaataagacacacatggccccctgcctcatggggggagacatgcaaacacgtgagccacaaaagaaaaaaaaggcagggtgatgagagagtgagtcagaaggcaggacaggcatgactccttgctaggtggcctcacccaccaggtcatctgggtgatgaggagccagccacaggaggagctgtggagagtggccctgccaggggcagtagccacagcaaaggcctggaggcagcgcaaggcctggacagaggccagtgctgggggagctcagggaagcaagaggaggaggagagtggtcccagaggcccacgagcatgtgggctctggagggaggtgttctgttcatccatttacccattcggtcatttcttaacacctgctctccaacccctgtagaagacactgggacaaaggcaataatcggggtatgtatgagcacctaacactgatggtctactaagtgccaagcacttttgacacttaaaaaaagtgtctatttatttatctatttatttgtagagacagggtcttggtatgttgtccaggctggtctagaactcttgagctcaagccatcctctcacctcctgagtagctgggactccaggcgccatcatgcctggcaacattttttatagtgttaactcatttcatcctcataacaaacctatgaggtagataccattttttctctactacttacagatggggaaactgaggcacggagctgttaaaagcctgaccaaggtttcacggcttcttgcactatgttgctggtgggattaagtgcggggtgaggtggtgagaggaaggcagtcccgtaacttaagagctctggctgaaggaggccaaagagctccaggagccagaaggctttgcaggggaccagaggcggtgcatggagctgggcaccccagagaggaggagagtccctgcagaaggggcttcaggaggtacctgcaactgtcacatccccttcaaggagtcctcagctccagccacagggcatgcagctgggagggaggcagtgcaggggtcactaggttgtcagagaaccctgaggcccaactggggacccgtgaggtgaaagaattgtcccagagggaagagaagggctgccagggccgcctctcccctccacagtccactccgcacaccgggcggcgccctagctggagtccccaccacaggcccttccctgagcctgccctccctcccaccaggctcctcttagctctcctccccctcttcctcttccctccatgtgagggaggcccacgccagctctgagtgccagggcagccgctcagcccagcctccttcacacccgccaacacacacaccgctccacagacgcacgcgggcccatcacagccacgccagcccagcaggcatggtcggatacgcagttctgtgcgtctgtgtgtgagaggaagagagggcgcggcagccggctgtggaggaaggagcactaacccgcagcctgggctctggctctgtggcctgagacgatccactgccccttcctgcacctctttctcatttgcagaatagagaggatcctgtcctgggacatcctccccagcagctatagggattggcacctaaacttgatctctatacataaacacaaaaatgtactgcaggctggggccaagggccagggtaactgccccaagtctgaccccagcccttctattccaccgtcgcagatacagacccagcctcctagcctgatagttcaagttctcctgttct

SEQ ID NO: 914516 - DNA, 4001 bp, Homo sapiens
tgtatatgcatatcctgccctgtctgtgcacactcccctgcagggctctggtcagcacccacaaacctgacttgtccataccgtccagttcccacccagacctgaccttgccatgtgaccttagtgggctcttctcttttctgcccctgtttcctcagcaggaatatggggtgagaatccctgcttagcagggattcagtaagttcaggtgaacaaaatattgggcacgaggtaggcacccaatactcagtacccaacagtcagtacccaacagtttgtaactgctacctttgttaatattaacatttacagaaaagaaattccatggagaataatcccagtctctcaccccttcatttcttgacactgtgacaggtaagactccacagctgtaccaccaccacaacgcaccatgtcgatgatctgggacagtgtcacctccagggtcacattcagagtctggtctgtgtctgccacaggtctcagggcacttgtgtagttggcaaagaggtcacggaacagcttgagagccagccggccctcagctcccaggcactctggagggtcagtaaggagggttgtccatcccaggccctagtcccagggcctctgctcacaccctccactcccagggctggggccctgtccttatgagtgtcctcctggtgtctgccttctcttgctctagctgtggctctagttcctccctggcctgcctgcagggacacatgaggtaaaggccatggagtgaactggtactatcttctggcgccaggctgacaaatttctcctccaccctccccttttcaaggacctggagtctgcctgcctctccacaaatgctagaggggcccaaataagccacaagagtccagactttcacccagggattctaaaccccactgctctgccccctccagtatctctcaaacctgtttccacttctccatctcgagctggtttcttcaaaacttctgatgcgatggaacactccctcactctgaaaacacacttccccaggctttactgacacaaattttcctcaatccctgacctaaacattgttcccatgaatcctgtccttggctcccatctttttcttcatcccagatttttctcctgagctccagaccccaatagagtacagtccactcctgagtttcccacaggcaccttcaactctgagggtccaaaatatgaactcgcttcctccctccatgctctgaaacctgcttcctatcccatgttccctatctcagcaaatagcatgccctcagcttcaacagtgaccttagttggaaatctgggaattatccctcccttctccctctgctgcctcctcctcggggaatccagttaatctccagatcctgtcagatcattcaaatcctccagattttgcgaaacatcgtcttgagtctaccctctcccctccaggtcagggccctcccttcactgtctccctttccccaaaggctcaccttcttctacccctcccatgccccaggaccacgcttttaagcatgcacatctgaccaggctagtatgctgctgaaacctttcagtgctccccgtcatctgcaggagaaagacctggcctggccggcaggcccttcaacatctggcccctctgattttcccagccctgtctctggaagctccccgctcactgtttccaccctagccaggcaagtctcctctcacgcacttcagcacccctctcctccacactccccaaatagagagcttgttctcagaacaggtactgaggagaaacacaagagagactacatggaaagggattttgggagaacaggaatagtagcaccaccaggagaggccagggctggtgtactgagcttcatacctgcagggagtagaaacagaagcagaaggcccaggctgaggtggtggctccggagccccatggccctggcactgcaagagcgggggcaggtctctggatgtgaggcctcctggccagacctagggcaaaattaggcccagctggcaaggatggtgtggacagtacctagaagtcagaagtaagacagatctctggtgggtccagccaccctccagcgagccctgcagcccctccagtcttctgaccctccaatttgtgcctgcccctggattttagtacttggtctttcttcttctctgctggtccttgcctcttctggcctctgcctctgccctttcctatgctccccacctgctttgtctttcactctgtttctgcttccttctctttccgtctgtaactttcttggtctctctgcctccctgactctgatcatcccctgcctgcctctttccactctctctccctttctcctacttctgtttcatccctcattccttccttcttccattccccacacctggactctagatgggcctgctgctctctcagcagaacagggaccagggactcctcccttgatcagcccagagtcgtccgaggcacaggaccacagcccctccctctctgccctttcattagcttaattacaccgtgcctatgacaacagagcaacggaaactgatacctcgggcctctggggcttgaattattcaaactctgtaaagcagcacacagactcagctcaggcccatcctcgggtgttggagagtacaggtatgctgggtcagggtatgtggaagaccagggcttaagagtgtgaggggccagggtcagtggatggataactgtcctctcatcttagccaccattgcctgaattctggaggtggaggtttgccttagacctgcagctctccttgcagtgcgggactagacactccaggctaggcactttgggtcaagcaagcccttccctcctggtgggagtagtgctgagcctcaggccactccagatgacccagtggagcagaagatggagcccacatcctctcctcagactccctgcagtcattcccatctgagcctgttttttcaccttgcccaaacactgtgggcagtgtgggagaagagggcaagcattcagtcactttcggccctgtcttatgagcgctctcacttgggtaagatatttaaactctctgggtttctgttctctcaatctggtaatgggattaacagtactcatcttgaaaactgcaaggatttaaatgagataacctgatagtgcaaggcactgtctagcacggtgcctaaggtacagcaggtcatcaacaatatttacactgtggtcccagtaaggtagccaggctatcctcaggtcacaggtatttatcatgcacagagttttgattatttttgttcaagctgaccagttgcctgaccaacagcagcacatacttccctggcaatcacatccatagccatgactttgggcatcgtggatatgccagtgattccctgcactttctccacccgtcccctctcccaggtactctgcttatctccaaccaccttcctaacacacaagcgtttcacatcatttcaaattgaaatccaacattcacttattcaagctagtagaggggaactgtccttaacttgttaaagaacaactaccaaaataccctacagccatcctgccacctcagcctcctgaatagctggaactaaaggtgcacaccacccagctaatttttgttcattttttaagagacaaggtctccctatgttgcctaggctggtcttaaactcctgggctcaagggattctccctcctcagcctcccgaggtgctgggattacaggcgtgagccatcgtgcccaaccaatacaaggtttaacaaatccttaggaaagcctaagaaatgaacatttaaagcagaaattaagattatacagaactccagtaaaattgattaatacgtctaaggactggttatttgaataacaaaaaatctggaacaattttctggaaatacaaattaacaaaactgagctaaagatgaaacatctaaaaagagcagatactctgcaggcctttgcttaattattccaatatttaattctccagac

SEQ ID NO: 914517 - DNA, 4001 bp, Homo sapiens
ctggtgcccctcccctccccaccccatcactgtgaagcatcctggcctagggctgctcaccgccaggatgagggactggcaacaggaaaatcaaaggtgccatgccaggctcctggcctcctgcaggggttcaaggctcaagggcaaatccacccattcctttccccagcagctccctaaagacccggtagggaggggaattgaataggttggaagcctgatacctccctggtgaatgtgatgtgtgagtcatgacgatgaaagcactttgaaaaagaaacagggtcatcatgatgcctggaagtgtccccactgctgaggacaggagcctgggaactgcctgcccaggtaaggtctctgcctgagacagcaggccccactgcaaggggctgaggaacctctggaggtagacacctggcccactcgttcccacctgcttgcctctgacgtccctgtgctggtcaaagcagcttcctcccagccagggtgcctgactcctgcgcccaagcctgcccccagctcctcccacccctccagaagttgctggactgaatttctgtccttgactggacagccacctcccctgccccagcctccagctccctgtcaatggccggcccaagcccgtcttcaggcacctggaccctaggagtggcccttcctagggagtccgctgccgaagagcagttttaagtccaccaagaggaagccggccccagagctgaggaaggcagtcctgtgaaagggcaggcccggggtgggggagggggcacacctgaaatcaggccaaggtgccactccaggacgacccccgggtcttaccttcctcaggcagcctggccttttaacgcccagcatcccagctagggttactctgggctgttaccgcgaaagccagcactgggtccctggagcctgggaggggctgatccccgggtcctacccagagaagagcgggagggttgttccggctttccgtggtgggctctgcaccatccggcggctccggccccacaggggcccagctcatcgcagcggtctgggtgcggaggccgggccagggctgggagcaggaagcagggagcggcgcccccgcctccgggtgcagctgggtttggaaagttggtgcgggcgcggggacctcagggtctcaaggcgcctccgcagacccgagccaggcgggtcgtgggacggtgagcccggagcagcccctgagtgcgctccgcagcggaggggagccaagcgcctcgggggccaccgcgcgtctcaagtttgctgccctcctcgaatgggggcagggagggctgaggtgatcgcggcgctcaccggccaccagccccggcagccccttcctgcgcccaacacgccgccgttcctcgccgccgccacccctccgctcaccgccggtagctgctgtccccgagcggaggggcgtctcccaccgcgcccgcgcccctcccggctgctgcggcggagtgtccgctcccgcccgccccggagcccgcggggcccggccaatacctggtcggggacgcgccgggagcagctgcagcgcccagcgccggctccatcctcgggtctggagtcagggtcgccggggacccgcgggtggcggcggcggcagcagccgcggcggcatcctccgcctcccgcgccctcctcctcggcctccctcctccctcctcttcctccgactccgcgcgcgcctcacgggcccctcttcatggcccgggggcgcgagcccggggcggctcgagcagctgagtgcgttctctccggccggacgcgggacccggggccggggctcagggacccgagagatgccgggacaggggccgggacccggagcgccgcagccccgggcgccggaggagagcagcagccgcaggcaccagagcctctcggagcgcccgcccgcgtccccgagccaagagcagcggcggcagcggcggctacagctccgagcgagcggcaggcgctgcggtcccggctccacccccgagccgcccgccccttctcctccccaccccttcggcgcgcgccttcccgccccccgcgccgccccagccgcgagcgccctggacacccactccgcagccaggctccggagcccgcccccacccacccgccgggggcagccacgcccaccacccggacttcgggcggccggcgggcaagggcaccggctgtctctggcacctctccgcgtagcctcccttccccttacccccgagggcgctgctggccgggccgccaaagcctttcgcccccccagcgcccctcgccgcggaagtcctgctggagtcccagcctggcccctggcccagctgtcctttacctcttgcccagccagcggcacagagggacttcagaacccagaactgaagccaaccatctctgtgtgcaataccctgacacacacccctagcctttcctccttccccgcccctctgcttctcaagtgtggggatgaatcatttgtccccgctgcagttgtccctcttgggcagggtcagggggtgtcttaatgggaccttagagtgggtttgctggctgaccgtcttctaggccgctcctccacactgcccaccttcttcctaccagactgcccctggctttctaggtggcaatctggagccaccactgcttttatggatgagggatggggacagagctggccagccgagcaccttgggcctgtatcctctgcacaaatattgactgagcatcttccacaggcctggccttcatgggcaccagggactggttgatgaacctctcagagtggagtggaggagaagcagggtgcatgagcagagcaatatcatgtgatcagtggcccctgggctggagaggacggccaggagtcccagctctgccaccacatctgacatgactgaggctgcccaccccagtggcctgtttcctcatctggagactaggaaggtgctttgtctggctgaacctctgatgctcctcagttctgaccaaatggttatttctgaagcagaggaacagtcagccttcatctccacctggaatctctgattcccgactatagctctccatcactcctggactggggcgcagagagcagtggatggcttgaaaactccaggcattctgggaaagcctcgtccccgatgtatgggcaagcagctgctgcctccatcccacacagtgaagcacagcagaatggttagcacagcagtttcctgggtcagaggaacctgctgtgtgtttgctgggtgactttgtgtgagtgatcagcctctctgcggctcagtttcctcatccagaagacagaggtactgatcctcaccctgtaggggtgttgtgaacactggatggtaatgtgtgtagagcattcagcagtgtctggcaagggggtgagtacttaataattgcacattgttgcgttcagggtagccaggaacaaacattcactcactcgccaagaggagaacatgacagctgcacttccctggaggactgggctctcgggtcatcaagaaggtctccctctctccacccagagcagatggtatgaaggcccttgccccaagggtcccactagaccaaatggtcatttatcttggtcacaattgcaaactcataactataaactcctctcccccatctccacccccatcaagctggaggggctaacagcaccttccagtgcgcattcctgtagccacagcacctgggatggcagagtcagtcctcagtcctgactccaaggctaccaagtctgtttctccacctgccttccccctccccacccccacccagggagtggcagcgtactgagatgcctaacaagagtggtgctgaccttccaaaagctaagacttcatgtttccaaatcgtgactgtccctctataaaaaaccaagctctaatagccttgggctgagccatcagaaccttccttttcacccagagttaatccctccccaagttttcaggctgacgagaatagtcagggtttagagaaag

SEQ ID NO: 914518 - DNA, 4001 bp, Homo sapiens
atatgagagcataagagctccacacccttctcccatacctacaagccctacgcctctcttcatctgtatgctttgtagcatcctttacaataaaccgtgaaggtaaaaaacaaacaaacaaacaaacaaaaaacaccaaaaaaacaggtgctgctaaaactgaactgtcagtagtagaagactgcgatggaattaccacacccactgttcataattcaaacataattcaaaactgatcaagactttaaagtaatggagaataaagtaaaaggcatgttaattgttacggaatacctttgcttgccattgcctcagtgaacagccttttaaaaaattttttttcttttttttgagacagagggtcgctctgtcacccaggctagagtgcaatggcgggatcttggctcactgcaacctctgtctcccgggttcaaatgattctcttgcctcggcctcccgagtagctaggattacaggcgcccgccatcacgcccagccattttttgtatttttagtagagagagagagagagagacggggtttcaccatgttggcccgactggtctcaaactcctgacctcgtgatccgcccgcctcggcctcccaaagtgttgggattacaggcgtcagccaccgcgcccagcctaaaatcttatttaaaaatttttttacatgagtttaccaactagatttaacttatggttgcaaaataaattgatttcacctttatctatatcattaaatttggtaaaagcattacagtttgtccagtcacttcagagaagtcaaagtcttctacaatttcttaaagtttcaaaagattcttagcttaatttattggctctttaggtcaaaagaaggacttttcagggtgatgaaaatggaggaaggaggagctcacctttctaaaaatgagttttcaattactataattatgcataagacaggcagcatttctgggccaagatttgatgccttggtcccatgagaattaaattagagccacgcataaatttggggcaagttctgcaaaaaccacttcaacctctattgatgctgaataaaaaactcattgttaagattcatcaacacgaatatattttctaacacacactagccactctggcaacaaccctttcatcattttctatccaagaaacacaacggaatgcatttcaatcctgctcaacaattaccacgattacaagtagaggggagagctcaaaagtaagaatctagttcaccgagcccgaccttaaagtagcaaggcccaacccacactgctggctattgtattggttccccaacacctccagggctggaaggacaccagaacgctcccgacacgttgagagagagaaagccagtcgttaagggcggggtggtggatgatcggaatcgttcacatcgcagcaagccagcagggacacaggtgtgcggccaggccccggtgccgctgtccttgctccagggcgacaaggcccttcgcaaccaccacagccctcgtaggcgcttacttattcattcacttgacaattacgcgagaggcactctagcagggccggctctcggggcccccgccctagtcttggtaaatcgctgccgccaggcgcggccctgcaccgcccgcgccccgcggacgctgccacccgcgccacgctgcggcgcgctctggccacctggagcccaaccccggcctccgccgcacacgagcgcccacgcccccggccctgcccgccgcaggtcccccggcctccggctcgcttcgccgcctcagacctgccgggttcgtggggcaagtggggcgcgcgtctggagacctccagccgcccaggattcaggggctcctctgcgcgcgcgatgcctgcactcgagggcctcgcgggtggggcaggcccaccgaccactcacctcagctgggtcagaaccaagcggcctgctctaagccgtttgaaaccgcttgggccgccgcacaccccgcagtgtcctcgttctttattggtcctcgacggaccgcccatcggacttttattggtccatttgaaaggcctgtgggcacgcgccgcccgcagccttaaaggggccgcgcgcagccgtgtttccctctggaccagacgccgcctgcacgggtggggacgctggtcgctgccgggggcaagtctgccgactccagaaagaaaggcgaaagaatgtgtgtagacccgggcatccttggtcgtcagcatgtttgctttatttaattacagatgttcaggctgctgtcaacacccgacaattttttttggtcatttcattccctagagattgtgaagctaagtgctgtgagggaaaccagaggcagctgagatgtcgtggaagtaacagcgaatgaagccaggatgctggattctgaccttggaactgttctgagtaaatcacttttctcagtaaatcttctggagttgtttccttatctgtaaaatgggataacgatgtttcccttacaatttaatggaggagttaatataactaatagaatgtctgagaaaagcctttgtgaactgtaacgcatcctgcaaatgcttaatattcccttataaaaacgagaggcttggttaacatgatctccagaattttagcttagctctacattcagtgtttctgtgaatgagttcaggtccttacttccaaggaatttgtaatctacagtggttggaggaatataacatacagactagtcactaaaattcaaagcagtgtaataactgtataaatgaaaagctataaatgcttagagacaggagaaatttgatgggggaggatctgtgaggaagatgaatttttaacctaggatttaaagaatgtgtagattcccaacaggctaaaagatggagagaggatggataaaagtaaatgaaacaattacatgttttttcattgtcaagttggcagagatgaaaaagttcaacagcctttggttggtcaagatttggaaaaacaggctgggtgcaatggcttatgcctgtaatcctagcgctttgggaggccgaggcaggaggattgcttgaggccaggagttcaagaccaacctgggtcttgctatcaagaccccatctctgtttttaaaaatataaagagatttggaaaaatggacactcaaagtcaatattggtaagagtataattggtacaaacctttaggaggacaatttgacagttactaaaatgtacataatctagttctggcccagtaatccactatgaggaatttatcgtacagatctgtgcaagtatgcaaagaaaaatgtacaaggatgtttactgcaatactgctttttttttttttttttttgagacagtctcgctctgtcgcccaggctggagtgcagtggcgcaatctcagctcactgcaacctccgcctcccgtgttcaagcgattctcctgcctcagcctcctgagtagctgggactacaggcacgtgccatcacacctggctaattttttgtagttttagtagagacggagttgcactgtgttagccaggctggtcttgatctgctgacctcgtgatcctcccgcctgggcctcccaaagtgctgggattacaggcgtgagccactgcacccggctttttttttttttttttctgacagagtctctctcatgtcacccgggctgtagtgcaatggcgtgatcttggctcactgcaacctccatctcccgggttcaagcaattctcctgcctcaggctcccaagtagctgggattacaggcacctgccaccacgcccggctaattattttttattgtatttttaacagagatggggtttcaccatgttggtcaagctggtttcaaactcctgacttcaggtcatccacctgcctcagcctcccaaagtgccgagattacaggcgtgagccactgtgcccggcccttttttttttttctttttttttcttttgagatgaagtctcgctctctcgcccaggctggagtgcgatggcaccatctcagctcac

SEQ ID NO: 914519 - DNA, 4001 bp, Homo sapiens
gtagagcagcgtgcccagtgccccccacccctagcctctctccaaggcttagcctccacccgcccgtctcccctcctctcctggtagcccctcacaccccggggggagggccaggctgggagctgggggaacaggggtcctctgggattgggagggtctgtggggagggctccagaagcccagcacggagttgtggaaaggaaggcgggtggggagagcaagcatgaggggacctctggcgagccccggggactctttcgaaggtttccttcgaggggctcggccgggaagctgcacggcggcggttgccagctggccctccctgctggcggtgacctctcgctctgggacccctcccggcgctgcgccttccccctgtgtggcctcggcgcccccggccccgccccctcccgctcccgcccggtcgctccttccccgcggcgggggcgggggcgggggcgggggcggggtccggggcaccgggctccgggctctgcccggcgctgccctttcccgcgcgtcaactcccctcctgcccgggctgagcggctgctcccgccgctccctggccagtgacagactttttcctgccgggtccggcccggctgcgccagccccccgccaaacaataatcactcccaggccacggtggcccgggggactcgcggccgccgcccgccgcccctacctgccgccggctccccggccgtgggcaccatggagggttccggccgcgcggcgcgtagctaggaagccgcgagtcccgcggcgcggctcggcccgtccggcccggcccagccaggctcggcgctgccctccgccctcctctccgccgcccgcccttcctcccgcccgccctcctacccctcccggcgggccggggagggagagcggcgcggcccgaggtgtcggcctcccctcgcctcccgccgcccggcctcgggctcccccggcctccctccctcttcctctcccagcccctcctcccacccgcagcctcgctccccgcctcggactctctggccccgactggtgcgcggggctctggggctgcggctcctacggcccgcctcgctggggctccaggttgccgcctccccaggtctgcgatcgtccgggctccccgccgctcccggccacctcctggccccgccgtgcggactccaggaatgccgcgtccccgcccggcccctctcgagggcgcccagccgtgcctcccccggcccgagcccagctccctggcccggccccggcgcggggctcccgggggtcagggcaggacgggaaccggatctcgtggctgcttggcggggcgggggtcggggcctcggccgcctggctcctacctgctcggaggtccatggggctggggccgggccggccgggtgcggctcctctcccggaggctggcggagtgggagggcgagccgcggctccggcgaagctttaataatcccatccgccaggcccactcgcaggtttttttcgctcggtttcggattttttttttttttcggtgtgggacattctgcaaactttttttttttttttctgacgtgtaaagctgtaaccacaaattgtagcggccctccccggggtgggggtaggaggggggaggagggaagggagggcttctggggctccctctccctcccacagcaccgagggggggtgaggtgaggcgaggctgtggcggtaccaccctgggcctcctgggggagggggcggggaggccatcagtccgtctgaggactcccaggagccgggggacagcgccggcttcgggtgggcttctccccaggcgttggcctgggacaccgccccctgccccctgtcccctgccgatgcggggtccctgatccaacctacctctgcctgtgcgaggtccctgctcccaccctacctctgcctcctcatctctaaccttccctcctcctcccccttgagtaaatgcaatgacacattctcccaaatgccagcgagctggcctgggagcaagtgatggtgtttttcctgctgccctttgtctgggctgaccgccccccctgcctattgtcccgccgcttgtcccatttccaaaagctagagctaagcgaggcgctggggctggggcaggtgactaaccagctcacaatgccccctgcgggggaggaagagggcactgcaggcccactgcccggcccagaggcgagaagaggccacttggcgggactttttccctcaagttcacaaggttcttcattcttcctccagtgaccagggagaatgtacatgggtgggggatttgtaattcattaatcagcacgaggcaacggaccagtttcaacaccacaggcttcttgggtgactcagcgggaatgctccgattcaaggcgatggaccgcccgagcgtccccatttgtgaaatgtttccccatgaagaccctggcattctccttcctttggggtttcgggttgttggtttttccggtggtgaggtgggggtggcttagcggtgagggctccccctccttcccgcaggcctgggttgggatttgctgggcaggatacctgggggtatgcctggaccctcccagagggggtcccctcctccctctccaagggctgccggggagaacacgctcagaggaggcagctctaacccagggctggggactgccctgcttcatgattttcctgggggagagtcatgtggtccccaaggcttgggtgccctatagccacaccaccaattaaatcactgggtaataagttgcttttgttgttgtttatttattgtttcaaagtgggagaggccagtggtgggccagacctggaaggtgatgcctctccctggagtggcatcagagatttgtctcccactccttcctggtgcccctggaatgggagggcactctgccagtccagccccagcgcctccaacctgtggcctgggcaggcatcctgatcatggccagtgctgggtcccagggcagctcttcccttctctgtaccgcgagcactgaggtgggggggtggggggggtggggaagaagtttgttttcaattacctcactggagtgggacagactttgttgttgggttggtttttttttttctctctctctctgtcctttcttccttttttttttcctaaacaaggagaaaaagggctgggaaaggagagctggcttggggtggggggcaggggactttgagggacctcagtagcagctctgatgaaaactgcctggagggacccttgtgaaaagtgctcagggcctacctctgccccccccaccgcccccgcacctcctccctgcccccaccagccaggactctggagtttcagtgacattcctgatggatgaacccagtgatttcttgatgcccatgccaaggtcaagaaggcagatgcccatgggtgcatggcacggaggccagccaggaggtccccctagctgctaccctttcagagggagggggccaagaaggaggggagagggagaaggggagccgcttcagcctctccctccgcctcgaagccgctccttgtggagtctgcacaatgtggtttggatttggctgagcccctcagcaccttataaagcaccttgctgagtcagggagaaagcagccccagtgtcgggggagcggaggggagggggcgctgaagaaaggggcgggggcgagagaagaggggtgagaccagagaaggggcaagactgggaaggaaagaggagacacaaagaggcaaatgggtgggagtgagaaagaggggaggagggagctgggaggaagagggggaagcagcggatgcggggagaggaagacactgaagcagaaggtgggagtggacaacgccatccccagcacacatccacctggggcagccagaaagcactggtttgcaggaactgagggctgcagctctgaaacagggacccaggccaggtgggtacagggacaattggctttacacacagccccccagtccccagtttgtctttgaatcttaatgt

SEQ ID NO: 914520 - DNA, 4001 bp, Homo sapiens
caagaggggcgtggggggggaggagagtgcaggagccaggtgtgcacaagaggtgggacgtggggaggaatgtgaagtgtcagtgagccagtggctggtgtgcaggggtggcgtgcaggggtggtgtgcagaagtgtgacggacaagagtgtgggtctgtgaatgaaggggacagggagccattgcacccatcagcagtgtcacttctggggctgccgggtgacaattgccatctctgcttcctccccggtggagcgtgtggctccagggcagcgagggtgtctgagctggccaggagcgcgtctggtctgttaggggaatatgtactcgcatcctgtccggtgtgaggggcaacgtgtgctcccgagctgtggcggaggtcagtcggggtcagtgaaagcacagaggtgtccctgggttagggtcagagaaggaggacccagtagagcagcgtgcccagtgccccccacccctagcctctctccaaggcttagcctccacccgcccgtctcccctcctctcctggtagcccctcacaccccggggggagggccaggctgggagctgggggaacaggggtcctctgggattgggagggtctgtggggagggctccagaagcccagcacggagttgtggaaaggaaggcgggtggggagagcaagcatgaggggacctctggcgagccccggggactctttcgaaggtttccttcgaggggctcggccgggaagctgcacggcggcggttgccagctggccctccctgctggcggtgacctctcgctctgggacccctcccggcgctgcgccttccccctgtgtggcctcggcgcccccggccccgccccctcccgctcccgcccggtcgctccttccccgcggcgggggcgggggcgggggcgggggcggggtccggggcaccgggctccgggctctgcccggcgctgccctttcccgcgcgtcaactcccctcctgcccgggctgagcggctgctcccgccgctccctggccagtgacagactttttcctgccgggtccggcccggctgcgccagccccccgccaaacaataatcactcccaggccacggtggcccgggggactcgcggccgccgcccgccgcccctacctgccgccggctccccggccgtgggcaccatggagggttccggccgcgcggcgcgtagctaggaagccgcgagtcccgcggcgcggctcggcccgtccggcccggcccagccaggctcggcgctgccctccgccctcctctccgccgcccgcccttcctcccgcccgccctcctacccctcccggcgggccggggagggagagcggcgcggcccgaggtgtcggcctcccctcgcctcccgccgcccggcctcgggctcccccggcctccctccctcttcctctcccagcccctcctcccacccgcagcctcgctccccgcctcggactctctggccccgactggtgcgcggggctctggggctgcggctcctacggcccgcctcgctggggctccaggttgccgcctccccaggtctgcgatcgtccgggctccccgccgctcccggccacctcctggccccgccgtgcggactccaggaatgccgcgtccccgcccggcccctctcgagggcgcccagccgtgcctcccccggcccgagcccagctccctggcccggccccggcgcggggctcccgggggtcagggcaggacgggaaccggatctcgtggctgcttggcggggcgggggtcggggcctcggccgcctggctcctacctgctcggaggtccatggggctggggccgggccggccgggtgcggctcctctcccggaggctggcggagtgggagggcgagccgcggctccggcgaagctttaataatcccatccgccaggcccactcgcaggtttttttcgctcggtttcggattttttttttttttcggtgtgggacattctgcaaactttttttttttttttctgacgtgtaaagctgtaaccacaaattgtagcggccctccccggggtgggggtaggaggggggaggagggaagggagggcttctggggctccctctccctcccacagcaccgagggggggtgaggtgaggcgaggctgtggcggtaccaccctgggcctcctgggggagggggcggggaggccatcagtccgtctgaggactcccaggagccgggggacagcgccggcttcgggtgggcttctccccaggcgttggcctgggacaccgccccctgccccctgtcccctgccgatgcggggtccctgatccaacctacctctgcctgtgcgaggtccctgctcccaccctacctctgcctcctcatctctaaccttccctcctcctcccccttgagtaaatgcaatgacacattctcccaaatgccagcgagctggcctgggagcaagtgatggtgtttttcctgctgccctttgtctgggctgaccgccccccctgcctattgtcccgccgcttgtcccatttccaaaagctagagctaagcgaggcgctggggctggggcaggtgactaaccagctcacaatgccccctgcgggggaggaagagggcactgcaggcccactgcccggcccagaggcgagaagaggccacttggcgggactttttccctcaagttcacaaggttcttcattcttcctccagtgaccagggagaatgtacatgggtgggggatttgtaattcattaatcagcacgaggcaacggaccagtttcaacaccacaggcttcttgggtgactcagcgggaatgctccgattcaaggcgatggaccgcccgagcgtccccatttgtgaaatgtttccccatgaagaccctggcattctccttcctttggggtttcgggttgttggtttttccggtggtgaggtgggggtggcttagcggtgagggctccccctccttcccgcaggcctgggttgggatttgctgggcaggatacctgggggtatgcctggaccctcccagagggggtcccctcctccctctccaagggctgccggggagaacacgctcagaggaggcagctctaacccagggctggggactgccctgcttcatgattttcctgggggagagtcatgtggtccccaaggcttgggtgccctatagccacaccaccaattaaatcactgggtaataagttgcttttgttgttgtttatttattgtttcaaagtgggagaggccagtggtgggccagacctggaaggtgatgcctctccctggagtggcatcagagatttgtctcccactccttcctggtgcccctggaatgggagggcactctgccagtccagccccagcgcctccaacctgtggcctgggcaggcatcctgatcatggccagtgctgggtcccagggcagctcttcccttctctgtaccgcgagcactgaggtgggggggtggggggggtggggaagaagtttgttttcaattacctcactggagtgggacagactttgttgttgggttggtttttttttttctctctctctctgtcctttcttccttttttttttcctaaacaaggagaaaaagggctgggaaaggagagctggcttggggtggggggcaggggactttgagggacctcagtagcagctctgatgaaaactgcctggagggacccttgtgaaaagtgctcagggcctacctctgccccccccaccgcccccgcacctcctccctgcccccaccagccaggactctggagtttcagtgacattcctgatggatgaacccagtgatttcttgatgcccatgccaaggtcaagaaggcagatgcccatgggtgcatggcacggaggccagccaggaggtccccctagctgctaccctttcagagggagggggccaagaaggaggggagagggagaaggggagccgcttcagcctctccctccgcctcgaagccgctccttgtggagtctgcacaatgtggtttgga

SEQ ID NO: 914521 - DNA, 4001 bp, Homo sapiens
aaggtggatgctgcaggataattgcagctgacaaacaggtttatgagcaacaggaggctcctccttgaggacctgcagaaatgccagaggaagacctgaggtggggtagtcaggagagagcctgccattgcaggcagagcaagcaaaggaacttaggttatcgttatggaagggacttgatttgtagccacaacctgggtaggtctgctgacactcaggttaaaatttaagaggaggccagaagtttgataacagcctgggcaatatagcgagaccccatttctacaaaatattttaaaaattagctgagcttggtggctcatgcctgtagtcccagctactcaggaggctgaggcaggaggatcccttgagcctaataagagtttgaggctgcagtgagctatgatcatgcaactgcactccaggctgggcaacagagtgagaccctgtctcaaaaacaaaaacaaacaaacaaaaaaacacagcaaaacaaaattcaaggagtttatactgtgattttgcacttggtaaaagacatttctgagaagctacttctttcatatacatgaccacattgggcagtatttggacacagtcattctaaggtaatcactgggtcccagtttgcttgggactttcctagttttagcaccaaaagtaccttgttctgggcaaaccaggagggttggtcaccctaccactcactcagactgactgttaaccttcaggtggggaagacagagtagactgctcatcgcctcacaatgtagcagaaacaagcctatgtctctcctttgggatattaaggatctataaaacagcaaaggtatattgtgaagttgtctttcaaatggtacacctgaggctgaaaatggacacaaagagaatttctgtcctaagatgctgttctggaacaataattcattttcctttgccaaggtaccttcttcaagttttatttttgtaacctattcagaacagtaagtgcctcttcacactagattttctctgatggttgcaattttgtaatatatttttccttagtaataaaagaatcaaatatgtaattaaggttatgagttttttaaagcatttttatctaaataaaatctcaaatcagaaaaatacatttgttagacactgtgccctgattttttattctgaaatgaggactaccatatcatcaagacaatcacatccttgataagtgggacagtgaccaccagccccaaaatgaagcaaacaaacctagagtgagaaaggagtctacagacattcctttattccagagatccttggcagaagccagtcctagatgaccaggttcctaggtcttagcatgaggtggaaggagccatctgactcctccactggagcacaggatagggggactgtgggaccagccatcaaaggaaaaggcacatcttcttttcccaggcaggccgagaagatgaggagtagcccaccaagagccaggaaaataccagcagcccagcccaagtagagggcacctccaaactcccaccgaggtatgatgtcagggatgctgtcatcccagaagtcttggattgtggcatgggccacccaggagactggaaggagggtagtggctgaagcggatgcctccaaagtccttcccaggagaccaagccgcctcttgaatacccatctgatcctgtgaaactggaagcattcagacccaaagctgcagagcaaaagccccaataggcccagcccatgggaggctaccatgaggatgcgggctacctggagctcctggggcagagacaagaaggattcaaaggccttgcacacagtggcgacttcctctcgatccacgcagacctcccaaatccccatgatccaggtctccatctcgttcagttccagattaagagtcttccactggggcaggatggtggtaacacaggagcagacccagccaaggagggagagaagtagccccccgagctggacttttgcacggaaactccaggccatagtcactcccaccacagatgcagaaagaaaaggagcacgagtgggtcagtgactggttagcagggactacttttcaggaggcttgagtggaagatctttcacattgggagagggctcttgtttcagtattctgagcagcagctgaggcaggtgccaggaattggcaatgtttgggtttagagggtgtgtccaatatcggatgtgggtgtgaaatctgggggagggtcccatgaccagcaaaaaagccatacagggagccatcaatacatatttgatgaataaattcataaactaaaatcactcctcagctctgagatcacaagaatgattgatgttctggaaatatacgttgatataatctttttgaagggcaacatgactttatgtttcatgcttttaaacatatgcatactttgacccagcaccttatctccaggaatctacctaatgtatcatgaatacgtacaaagatttatgaaaatgtccattgaaatattgttaagaattgtcagtttttgttaatacttggcagccattttaaagtgattttgtagaaagaattttaatgatttgaaaaatatttttgatatattgttaagtgagaaaagcaagtgaccaaacagtacatggaatatatagaatgcagccgggcacggtggctcatgcctgtaatcccagcactttgggaggctgaggtgggtggattacttgaggccaggagttcgaggccagcctgggcaacatggcgaaacctcacctctactaagaaagtgaaaaaaattagccgggcatggtgacacacgcctgtagtccaagctgcttaggaggctgaggcaggagaatctcttgaacctgggaggcggaggttgcagttagccgagatcatgccactacactccagcctgggtgacagagtgagaccccatctcagaaaaaagaaaaagccaaagaatatatagaaatatgtgcgtgtgtgtgtgcgtgtgtgtgtgcgtgtgtgtgtgtatatgtgtagaccacaaaatgttaacatgattattttggtgataaaattatgcatagtttttatttccttatttgtgcttacctatgcattttacgcattttacacattttataaatttatcacttaatatttttattacaaaaagcccacaaatattaattttacaaaataattttaaattcctcaatccaaggaacctacccagacacagaatatccccagagggaggtgctccctccccaggctccccttgctgctgggacagcagctataaatagatggtaatcataccagcttccattcctgtttgttgctgctgccaagtagcaggttctgacaggaaaggaaataatttgcatttactgagtacggctaaatgccagacttttggctagacactttatccgtatttaattttcacactgccactgtgtgatacatgttacgtaacttgccaaggtcccccagctggtaaacaacagatccaacacgaaccaggcagctcagactcggacatttgatgttcttgtccccaggctgcagcagctgcccctgcacactggtgacacatcatgtgggtgaggcttagtctttatagcgagacagagaagaaaacggacttattctgttggagtcatgaatgtctgactcatgtgtttccctattcacaaattaacctgctccacactgtggtagatatgaagtgaaagcaaaggtgttcctgaaaggaagatgaaggggtggcctgcccctccacacctgtgggtatttctagtcgggtgggacaagagactgagaaaagaaataagacacagagacaaagtgtatagaaacaacagtgggcccaggggaccggcgttcaacataccaaggacctgcaccggcaccggtctctgagttccctcagtttttattgattattatcttcattatttcagtaaaaaggaatgtagtaggagggcagggtgatagtaaggagaaaaacacgtgaaca

SEQ ID NO: 914522 - DNA, 4001 bp, Homo sapiens
taggcttgttgtgaagaacaaacgaattaccaagatagtacatataaagtgttcatataacaaggactattagctgtttttaataagagagccctgaagtttcattctactaaatatctggtgattggtaacctagtggtagagtccagtaaagggaatcaaggtgccatccagctgcgccagatgtgcacaggaacagtattgcagtatttggttaagtctaaaagagtttagaaaataacccctccccacctgccttacttgagcaatagtttggcttagcccacctctttcatttctctaacttaagtgattatcagcctgaggctggccaagatgggtatgcatacagtataattggtttgtaaagtttcaaaaaagacagagaactctaaccacgtatttcaggatttggtggttcttctagacaccagcctccttcaaacctctggtgttgtaggctagaagggacttaggaaccatctagtattctctttccagagctaaagacgtggaagccctggataaggagtaagttgtctgaggccacccagctagtcagttcaaaaccaggaccagctctcccgtggcctggtgttcagggtagtgctcactcttgaccactggctggctctttgattttctgatctccagctaactgtggggcctgtctgcagtggatcccatgcttcagggtgcatagtgacgtgcccttggctctccctgactgcctttcctgccctggctcctcagacatttccagtcactccggtgggctcctaccacccacatccctgatgtcctctcctgcaaacctgcctctgcctcagggcctctgaggccccaagagtcctgcctgggggaccccaggaagggacgctcaggaggactcttccctttgctctggagcctgtttcaggaaaaagtggtgcttgctctatttccctctgttctggttcctctgctgcgttttttccaagtcttcttcactctctgtgctcggactcccccagccttgctcttctgttttacattcctgttctcctctttttctctctccttcccaacccttcccctttccccttttccttccttccctgtgtgacttggggcatttgcatcttcctggtgctccttgggccctgccctttttccctctcccctttcctctccaaccctgcctatcccccactctgctcaccctttaacacatctgtttctaatctgagcctcggaggcgcctgtttgaaacaacaacaaaaaacccccaccctcaggaacctggcacaaaaattcctggataaaccttccctccaccaattctccacttttcccagatacaccagaaactaaacaccgccctaaagaggaccctgcacatcaaacggttccccaagcctgttcaagggcccagatgtgcgagacaatctcgatggccgactgggcggccctcggttgccagatgtgctcctccgtggccaggaggcagggactgaaaagccggctgactccaggggctgcagggacacccggtcagaaccggcgtctttcccggacgcagggctgcgtttgcccacggccatccaaactcccgccctcccagaggcactcacctagcaagaggagaaggaggagggacatcccgatccccggacgcgggcgcttccccgctcagctgctgcttggctccggggcggccgggcgcctccgacggacctcgggcgagctgggcgcggcgcctcggggtgcgcgcgaggtggctgcagccatgtgccgggcgggagccggccccgcgccccgtgcccctgggggcagatgggctcccggcgctcgccccaccagctggcgcccggacgggagccgggaccagggtcagggaggaaaacgcgaggcgaaaaggcgctaccgcttcgtggaacacttttccctgtttggaaagaaaaaggagtgaagaaagagagagggaaaaaaaaaattcagctggaaccacatggttgcctcctaccgcagcccctccctctctctctcgctgttccctccttccctccctccctcccgcgcggcgtttggggtttgcggtgggggccggtcggggagaagcgtgagctggccgggcagggagggccgggggagacctggggccgtgcagaggcgggtgggttgagaggcgccgggcgtaggattgattctttgcaggaggcattggtgacacctcggctgagagcccatggacgaggccttgtccgttcctagagctctgctctcacttggtccttctctccacttctctctcgcttcttttttactctcgtttctctctgcttccacgtctctcacaaatctggcgtttctctcttccatctcttcctctctaggtctccttgttcgcattcttgcctctccctcctcgtctcctcatgccctctcccctctgtcctctgcgctcttctcgcctctcctctccctccccgtctggttctgttagtgtaaagccaccagactgaccaggccgacggcggggcgcggaagtgggtgcgaaggcagccagcggccggccgaccagggctctccccaccgactgcctgctttggcacccggctaccccccttggcctggctttcctggggcctttcgcgttcgctcgctttctactgtcggtatttgcagcagcgctccctcaggtcccgagcagagctaagccagccagcacccaggggaaggggacccacagccccgtggaaagaggtctatcgagatgctttgcagcaaagtgctctgcacgtggccctggccaaaatgtgcaccaccccctttcagaaagaacataaggcagagggagcagaatccccctggtgccagggcctgcgcgcccgggctccgggaacccggcccaggaggctcgcggagggcaggaggctggcggccggacgggggcggacggtgggttccgcggagccgagcagccccgccccagggtcggcccctgggagtctgcccttcactaccctgctgctcagcggcagcgggaggcagcgagactaagaaagggcagtgagggtggcgctcagacctcagctgcctggacctcctgccctgaccttgtgcccagggcctctcagaaactctggtcccagtctctgaatgtccctggagggcttctccctcagctgcccagaggcatgatgacgcaatcgctcaccttcggcctcgccagagcccaggttggaagccggggccagcgctcttgagaagaaagatgaaccccgccggggccggtgggctgccgagtcacacatttgcaatgaaatgcaaatgtgtaatgaaaacccgtcccatttcgcagactaggaaagcaaaggcctggagaggttatggaagtttcacaaggtcactcagaggacttgcaaaagctggggctgttcctagggctcgcggatcagctggagcattgctttagaattgcagcatttctccactcactccctcaccccttcgataccgatgtgttagcatccacactatgccaggtgcttttttaggtgtgaggacacaaagtgagtagaacttggaagttgacatttaaaaaaacctgggaggagtatgtcatgaacaccaagtatggacccagaatcatattatattattacgtggtttttattgggtcatattattgacctttttatatcattcttattatactgctaagggatagtcactgaaaaaaaaatcaccatcccttagcatgaataggaagacaaggaaactataacttagagaggcctaaatatcttgccccagatcacaatagaattaaaatgcttctattccaatattaatattctaatatttaaaaatattattttttatattgagaagtgtttaaaaggtctctttgactccgaagtaactttattttccatttcatactaattgtctaataggggaaatagatacattcacaactataatttgtaaatgaatatgttgaaaaaaccgtcttt

SEQ ID NO: 914523 - DNA, 4001 bp, Homo sapiens
tcaaagaaactgctttccccaattatcaaagatctccttgtcaatactcaatatatgctcttcacattttgttttgactgctccttcctcctttctcaagtttcttctttcatgacccacccgtcggcgtatccctagggttctacacttggtcctcttctcttctgagatatctaatccatttccatgagtatacactaacactttaacgacctccaaacatctctctttaataccactttcccaagatacacattctttttttatttttattttttttttgagacagggtctcactctgtcatgcaggctggagtgcaggggcacaatcacggctcaccgcagcctcgacctcctgggctcaggtgatcctcccacctcagtttcctgagtagctaggactacaggccgccaccatgcctggctaatttttgtattttttgtagagactgggtttcgccatgctgcccaggctgatctcaaactcctgggctcaagcgatctgcctgcctcagcctcccaaagtgctgggattacaggtgtgagccaccgcgcccggcccaacacggtcatatgtacaactactccacacatgtcctgaccaaactcattatctgcctctcacctcaatcttgcttttcctcccatccatatgtcctatctcagtttctggcctgaagcctaaaccttgttcaatgtctaaatttccctttaaagcagaggttctttacagtttttgtgctctggattctgtagtaggcagaattttggccccacgaccttcactttctggtgtcatgcgggtgaatatgttatattacacagcaaaagggacttcacaaacgtaattaaggttaccagtcgacagtaacatagggagattatcctggattttacaggtggttccaaagtaatcacatgagctcttaaaagtagagaattttctctggctgtagacaagtgatggagcaaaaggggaagcaacacatatctgaagggcaggaaagattcgatgtgtcattacaggcttcaaaataaagaaaactgcatgtcaaggaaacagggacctctgttctacaaccacaatatttacggtagatctatctgactgtcaaaataccaaagtgctccacgtggccaaataaaagggcaattccttccaggaccccaaaacgggagtctggtccctctgcatatgacccctgtctgtgtcgagttaagggtgttcctctccttactatacctacagaagaaaatctttattgtgtaaccaaactttaaaagtcctccacagtcggctctgaaactacgtatcccagagaggggaacatctcctgcatctgttcatccggaaagacaggcacacttcagacccttaaaaccagaccgtgcgttaagggcaacgcacgcgccagacctccagtaaataggcgagttaaaaaaaaaaaaaaaagaaaataaaagaaagaaagaaagaaaagaagaagaaagaaagagagaaagagacagagaaagagaaagaggaaaaaaagaaaaaaaaaaaaaaaaagcacaatccataaggggaaattccggccggagaaaacagagaatggaagactccggaggagtactagaaaaatcgagccttccacccgctacaggtatccctgaggcgtcgggcacgagaccccgctcccagcaggcctccaggccgccccttgcccggctccttcgcaccgcctgctccagcaaggaggagggcggcgcgcaggaggccagcgctggggaccaggaaccctacctctcagcgatgtaaagggtaccagtgccgaggcccttcccgttcagcacagcctcagtgtctggctgctgccgcaggagcccctccgctggcccaggcggcgggaaacttttgaggaagctcatagcagcagagtgcggcaacacaggccctgagggagttggagcacagcaatgcgtgcaccacaccgcccgccctggaagaggcagtcaccccggaagaacaacttagtctgccccggaatctgaacgccgtcgaccatagagatgagacattctaggaaaagcggcggaggtcggctaagaacgtgtggagtttgaccgcgcaacacccttccccttcttcctcgccatttctgaggctttgggcttcaataactgagggttctgtgggaagtccctcaggattgtcacagtgaaaccaccactgcaaaattataactgagacactgaaagcgatctgacctacccaaatccatgttgtttctaacctccaaactgtccttgttcattgctggatataggctgaactaactttgggaggaacttagtttacagtttgaagtttaaaacaaagatgatgacagccttttcccaaaacaaacttccttcttgcctggggactggactgcctttgtaggactaacaaatcagccacaagattagaaattatggtttagattagaaattacagctgcaagctacaagattctgaccctccctaaactgcacctaagatcggtgcttgagatatgttgcagaccctgcacttgatggatcagctggcaccaccagatggataaactggctatgtgatcttgtgccccctccccaccaacccaggaactgactcagcgcaagaggacagcttcaactccctgtgacttcatctcccacccaaccaatcagcactcttgactcactggccttccccaacctgccaaattatccttaaaaacttggatccctggctgggcgcggtggctcacgcctgtaatcccagcactttgggaggccgaggcgggcggatcacgaggtcaggagatcaagaccattctggctaacatggtgaaaccccgtctctactaaaaatacaaaaaaattagccgggtgtggtggcaggcgcctgtggtcccagctactggggaggctgaggcaggagaatggcgtgaacccgggaggcagagcttgcagtgagccgagatagcgccactgcactccagcctgggcgacagagcgagaccccgtctcaaaaaaaaaaaaaaaacaacaaaaaacaaaaaacaaaaaaactttgatccctgaatgctctgggaaactgatttgagtaaaaataaaactctaggccgggtgcagtggctcatgcttgtaatcccagcactttgggaggccgaggcgggcagatcacgaggacaggagatcgagaccagcctggctaacacggtgaaaccccgtctcgactaaaaatacaaaaacaaaattagccgggcgtggtggcaggtgcctgtagtcccagctactcgggaggttgaagcgggagaatggcgtgaacccgagaggcggagcttgcagtgagccgaggtcgcgccttggcactccagcctgggcgacagagagagactccgtctcaaaacaacaacaacaaactctagtctcctgcacagcagctctgcgtgaattactgtttttctgttacaatttccatcttgataaatcagctctgtctaggcaacaggcaaggtgaacccattgggccattacagcagcaaccctgttacaaccctgtaacccagttacatacaaccctgttgtaactgcccaatgggatcaccgtgcctgctgcttagacagagcctatttatcaagacaggggaattgcaatagagaaagagtaatacaccggtggcaatggctcacgcctgtaatcccagcattttggaggccgaggcggacggatcacctgacgtcgggaattcgagaccagcctgaccaacatggagaaaccccgtctctactaaaaatgcacaattagcctggcgtggtggcgcatgcctgtaatcctagctactcgggaggctgaggcaggagaattgcttgaacccgggaggcggaggttgcggtgagccgagatcacgccattgcactccagcctgggcaacaagagcgaaacactgtctcaaaaaaaaaaaaaaaaaaaaaaaaaaacaaagagagaaaga

SEQ ID NO: 914524 - DNA, 4001 bp, Homo sapiens
taggagtgtccttggagacataagccacctcagtgcggccgctcagttgcacagaacagccatgccaagtgaaaacagccaccttggcaccagcatcaaaggtgaatttcttgtttcgggtcagctctgtgccaaagatctctgccatgccagtcaacaactccaactgaactgactgagatgcctccacctcaaagcgaagttctgtttctcgctctagttcaaatttagtggttggcttcttgtcatcattagcctcttctcccatctcttctgtgtagctgctgtgcctagaacacaaattaaatatcagatctaattataagtcagtcttctgttacaaaaacatccaatggggccaggcatggtggctcacgcctgtaatcccagcactttgggaagccgaggtggctggatcacttgaggtcaggagttcaagactagcctggccaacatggtgaaaccctgtctctactaaacatacaaaaaaaaaattagccgggcatggtggagggtgcctgtaatcccagctctttgggaggccaaggcaggagaatcgcttgaacccaggtggcagaggctgcagtgacccgagattgtgccactgcatgctagcctgggcaacagagcaagactccatctcaaaaaaaaaaaaaaaaatcatccaatgggccaggcacagtggcttaggcctgtaatttcagcactttggggcgctgagttgggcagatcccctgagctcagaagtacaagaccagcctgggcaacatggtgaaaccccgtctgtagaaaaaatgcaaatattggccaggcctggtggctcacgcctgtaatcccagcactttgggaggccaaggtgggtggatcacctgaggtcaggagttcaagaccagcttggccaacatggtgaaatctcagtatttactaaaaaatacaaaaattagccaggcataatggtgggcgcctgtagtcccagctactcaggagactgagtcaggagaatcgcttgaacccaggaggtggaggttgcagggttgcagtgaggcgagatcatgccactgtactcccgcctgggtgacagaccaaggctctgtctcaaaaaaaaataaaataaaataaacaaataaataaataaataataaaaacatacaatgaatgtttccccttaccttgctttaattctctccatatttcttatcaccatcggtctcactatatattgtgtcttccccgcctcctccaccccaaaatgtaagacttaggcatttttgtttgatactatatactgcttagaatacagcttgacagactgtaggcacctcaatacattgagtgaattaatgtctcagacatcagagaaaaaccatacctacagactgacagaagatttaattatatcaccctccatcactctattggtaaactccaaacttgagaaggtaacagatgccctgaccccaatcatcctagtcaacaggaaagggcgtctgaaatacggatgcaaagcagagcacaccgggtctgaactcagaaaacagcctaatcctcgtctctgtaactactagtagtgtctttagacaatcacttaacttctctgaacctttgaagctgtcgactggaagcacttacacttcctcaaatacagtgttgttcttggggtttacaggaattgtgggaggaaaaaaaagcacttcgtaaactagaaaacggcaaggaaacgatatgaattatttctgatcctggactgcagctctagctccagcatttgtcccaaccttcccagacaccaaaatctccccaagacaccaaaatctccccagacaccaaaatgtccccagaccccaaggaggtgacagttgtgttcctgccctttttttaactcacctgcgcagccaggagcccaacaggtaaactcagaaggtcctcccgtgcagaatttaaaccaaactacaagcggttcttgcccggacccacgccggaaacaaacgcagttccgcacttgcgctgtgaaaggacacgcggtcgcgcgctgccctttgggatgtgtagtttgccggagcagccgagagcgggtgcactcgctaagccgctcggccttctgggagttgtagtcaaaggattgttttgaacgtgacgccaaaggtgggaggggcggctgttgtcattattcgtgcagccggagggaggggtgaggaggcgtggcggttgcgcccccgcgctgggcagggacaggtcgagggaccaggcttcggcagtgcgcgtccgcggcgggaatctcgccccagatttcctgctcccctgcagcccaggaaacagaagggaggcccgggagaaagagagactcactgtctcggtctaggtcccgcgacggcctgcttgcctggacaagccacgaagcacaaaatcctttttaggcagggggaaacccagggatagagaaagcggaggaagacagcctgacagaggtttcaccaagctgtcatctcccacctgacacagtgcttggcacatggaaggcatttcaaattttttttctttaataaaagaataaaaatccgatgatttcttccagctacaagtcagtcattacccaacaacctctctcccactaaacgaggatttttgttaggcactcatttccctccataaatccctgacagttacaggtcagtcatttgccccgcagccaacaggttccaccacgtctataatcctctttttactaccttgggctttggaatcttatattatttgctatactgcttacattactgtgtgactttgagcaaatcacaggcttcatctctctgagatcgtttttttttttctttttgtttttgagacagggtctcactctctcgcccaggttggagtacagtgccgcgaacatggctcactgcagcctcgacctcctgggctcaagcgtgatatcgttttttgtctgcaaagttgggataataacagtgcccaacctcctaaagttgttttgacgattgcaggaatgtgcctgtaaagtactaagtacaatgcctgtaatatagaaaaaaatctgatatcagcttttacgtttttattataggctggggcggaaggggctataatatcattcattcgtgcaatacttaacatttttcagatccctttcaggcatcttctttcacagccaccctgtaaagacagctttattatatccaatttcagatgggggaggagactcagataggtgcagaggtttgcccaaacattaacagccattggtagagctaggactcaaacccagagtttctgagtccggttataataatagtaaacatttaggccaggcgcggtggctcacgcctgcagtctcagcactttgggaggccgagacgggcggatcacctgaggtcaggagttcgagaccagcctgaccaacatggtgaaaccccatctatactaaaaatacaaaaattagctaggcgtggtggcgggcgcctgtaatcccggctacttgggaggctgaggcaggagaatcgcttgaaccggggaggcggaggttgcagtgaactgagatcacgccactgcacaccagcctaggcaacagagtgagactctgtctcacaaaaaaaatcacatttaaggcagggcgtggtggctcacgcctgtaatcccagcactttgggaggccgaggtgggtggatcacgaggtcaggagatcgagaccatcctggctaacatagtgaaaccccgtctcgactaaaaatacaaaaaaattagctgggcgtggtggcaggcgcctgtagtcccagctactagggaggctgaggcaggagaatggcctgaccccgggaggcggagcttgcagtgagctgagatcctgccactgcactccagcctgggcgacagcgcgagactctgtctcaaaaaaacaaaaacaaaaaacaaaaaaccacatttatatactgttatatgccagatactggtctatggacttttcaggtgtaaattcatttaatcgtagc

SEQ ID NO: 914525 - DNA, 4001 bp, Homo sapiens
ctatttcaaaaccctcattttgtagatgaggaaacagaggacccgtgaggagaagcaaaagtccaaattcacaatgagagttagacacagaaccaaaacaagatccccagtgttgtctctcccagaccaaagtccttcctttacaattggccacatcaaacgaatcaaagtcaaggcactccctactccccaactcttgctccaaattctcagagcttggggtgcatggaatctatggacaccatgcctcagtctttcttcttgaggaacaactaagaacctgaatggctggactcacataggtcatcagtctggctctctgtccactctctcagctgctgcttagctccccggatccaaatgagatgctaatcgggatcagccagtcccccagcagttgcccttgggcctccaggaatccaccttccttctcctgccaactatcccacatggcaagatcacctcacagcatgtgagaccagacacagcaaaatcctgagactgacagactcaggccgctgaactccaaaaagagtcaaaataacagtactgtaaaaatgttgggaaactatccttcactatataaataaagaaattggtcagacgcggtggctcacgcctgtaatcccagtactttgggaggccaaggcgggtggatcaggaggtcaagagatcgagaccatcctgaccaacaactaaaaatacaaaaattagctgggtgtggtggcccgcacctgtagtcccagctacttgggaggctaaggcaggagaatagcttgaacccgggaggcggaggttgcagtgggccgagattgcgccactgcactccagcttggcgacagagcaagactccatctcagaaataaataaataaataaataaataaataaataaataaataaataaataaattgaggtcaagctggcattagaaccgagtcaggttgttcctgactctggcacctttggtggcggggggtaggggggagcggtttggcaacttctctaaaccatctggcggttgcccttaaaacaccccataatttccgtttcctggagatctcaggaaagaggaattggaccaggcagaatatgagaaacataaggggaccatgctataatattagatgtttagtccaatatccccattgtacagatggataaaatgatgcccagagaggggaagcggatctatggtacgagattatacaactccgaggtgatgaggtctctagggcaacaccctgcccctgtaaccagatgatgtctgagtccctccaagacttaggctctaaggatctaaacctataagtacctcccaccctcctaagatacgaagttaggacaatcttcccgcctctcccttcctcaaacccagatctcataatcacccttgttggacggactcttgctgtagcaatgaaccaccagcgctgcggccagggcgcacatgcccagtccggccctgctggggaccccgttccagctgtcctgtcctgggagtgtttcttcgggaccaggaaggcgtccccaagtggcagccgcgaggcatttggtatcgaagcgtcctccctggcgccccccggtggctgccccacgtccggagaacaaggccggcgatgttccagggcgccccccggtggctaccctcagccactgcggctccccgagactcccagtagtcacattccggccggaagcacctccatggccccggagcgttggggacctgagcagccggaggagtagccgtggcgccagtgcttttctcctcaacaccagggaccccagcatcttgacagctgcttcgataaccccgtggtgccggcccctgtgctgaccacgtccaacatggctgccgcggcgcgttcgaagacgccgcgaacagggtggagttgcgcactacctcacgggagaggtagtccacagccctaagcctttccccagctggagaataaataaactacgtttcccagaaggctgtgggattgcgtcacaatgactgcgggattatagaagcccggggcatattgggaaatagagttcgggtgaaggggcgtggcgattagagttaaagattagaatcccaagacttctttcctagtttagttgaagcacacgacacactttttttttttttttttttttgagacggagtctcgctctgtctcacaggccggagtgccgtggcgcgatctcggctcactgcaaccttcgtctcctgtgttcaagcaattctcctacctcagtctcccgagtagctgggattacaggcgcccgccaccatgcccagctaatttttgtatttttagtggaaacggggtttcaccacgttggccaggctggtctctaactcctgacctcaggcgatccgcccgcctcggcctcccaaaatgctggggttacaagcgtgagccaccgcgcccggcccacaatttttgactggtgtaaattacccaagaatcttcagcagaggcatattatgaaacttatgcttatttagtttagcctatctcttttttcagcctgggcggcctttcaaaaagatgtttagggtaactactgcacctgagataggaatacattttatttgaagagttgacttccggtcttttttttttttttttttttgagacagaatctcactctgccgcccaaactggagtgcagtggcgccatctcggctcactgcaacctccgtctccctggtccaagcgattctcccacctcagcctaccgagtagctgggattacaggcacgcaccaccacgcttggctaatttttgtatttttagtagtagagacggggtttcaccatgttggccaggctggtctccaactcctgacctcaagcgacccacctgcctcagcctccctaagtactgggattactggcgtgagccactgcgcctggccctgattgtgttatttttaaagggctttcaagtgggtcatctcatctgatcctcatggcagctgtgtgtgagaagctgggcaagaactgttattcccgtctacagtgaagggaattgaggctcaaaggtgaaaagatttgccagtaaatcacctggagtaaagtaatgctcaggtcttctgattttgagcatatagtttccattaacacctgcactcccatcccgccccctcttttccaaactgaacccataggtaggcaaaggaggaagttcttctttgtgccagttctgtttcttccaagtcttgtacgtctgctcagacttcacatgatcagagtcttccctgaccattctggttaaaatagtaatcctacgcaccccatcctaattttccttcacagcatttatcaccatctgacatactacatttttattgtctttctccactacagcatgagccccatgagacaaggactttgttttttcacttttatatcactagcactcagaacaatgtctggaacaaaagaggcactcagtttttttatttttatgtatttatttatttattgaagcagagtcttgctctgtcgcccaggctgcagtgcagtggcacgatctcagctcactgcaagctcagcctcctgtgttcacgccattcttctgcctcagcctcccgagtagctgggactacaggctcccgccaccatgctcggctaatttttttgtatttttagtagagacggggtttcactgtattagtcaggatggtctcgatctcctgacctcgtgatccacctgcctcggcctcctaaagtgctgggattacaggtgtgagccaccgcgcccggcctgaggcactcaaatatttttttcagtgaatggattactctcaccttattagtgttggagagtacttgagctttggcattcaggcagacgtggattttaattttgactcttgcatttatatgggtgaccttggacaaactccctttacctctctggtagttaattactcattgttgaagatatcaattcctgccttcaagatgattgcttgtattaaataagataatatgtaga

SEQ ID NO: 914526 - DNA, 4001 bp, Homo sapiens
tccacagtatgaatcaccataggtagccaatgatcttgttgctgaccattctcaggggggattgcccttcttcacccactccttccagagccttctgagccctaccaggcagtggcacttcccattccctggtctccatattatccttttttgagtatgagctcctctccctatcagtctcttacctacccctcccccaagtcctgattccctcagttgaaagaagttccctttttccaagccccagccagcaaacccacggctgaatgctacattttgacagccttgcctggctcaccaggcactaaggacccagttacctccctcaggttccatcacctacactggtccctgtcctggtctggaaccccgccttctcaccagtcaataactcgccgctccagcttgcggttgacgtgctgcagcttcatgtacttcttcaccagtgcatgatctgggtagaaagccgcatctgcagtgttcatgttgtagatgacagagctcatgctacccatgatggtggcgaaacccatgacggccagcaggaagtcgcccaccatgaagaggtactcttcttccctggctggcggcggtgtatcgcccactgtagtcagtatcagcgtggagaagtaaaagctatagaggtactggcgccgcaggcgctcaaagccaggctgcgcggggtccgggtacacccatgcgtcacgcccgaagcccaggtaccgggatagggcaaagtataggcagctgttccaatggatgacgacaaaaatgtaaagcatcagcttggcaatgcgaaaggcatttgggtaagctgtgcgggtctctgtgcggtcgaaggcctcgaagaggcggggcgcgcggagaaagcggttcagcctcagggtgggtgtgtgcgggcccagccgcacgtagaccacatctgtgggcatcagggaagccaggtccaagaagaaactccaggtgcgaacgtagcgactcgagatcctacccttgtccaccaccaggatgccctgttccaagaatcctggggagagggagccggtaggaagcggacctgctgtagtcaagcttgggctgagcatgagctgcccagggcaggccagggagactgtctgaaggacagagtggagccaggcataactctgctcccggctttccggggtgagcactgggatgctgtcaggcatagaggcacgcgaaggtgctaccacggtgggggtgcctttcttgttacttcttaagtggctatctttaggaagggaatgtgggacaaagggtcattcctagaagcccactgacctgtgtggaagcgcaccaccatgtctagtaggtatagcaggtcactcgtgtagtccagcaccaaccaggccaccagataaccgtgctgcaagtcggggaagcaggctctgcagggcagggttaagcatgattgaattaagggcaccctctgtgtgcgaggcgtctccccagggcccttaaccctctgcctcaggccctcccatgggaattgctcctcctgccccaccaagggtctgcccttctccttgacctctctttagtcctctttttggcttccagcccctcccttagcaccgctgccatacctgcacacgaggatgatgaggttatacatgactgggaagaccattgtgttcagccaccagtagtagtaatccccagatgggtccaggacaggcagcaacttcctgtaagaaagaaagtcttgcttcatttattcaccaggcattcaaagctgtagttgtgactggggcaccaagaggaatgaggagagatcccacacaagggaccaggacttctcacctggccttggatggggctgggggactggactctgttgtcttcactttggtgtcctggctcatggttctgtggtctggtgctggggtgtgagatgtccacaccctctctgcctgtaggggacttctggagttgggcactagtgcctgactgcctgaaggaggctgctgttgggcttctgctgtgacttctttgtctttggggctcttagcaacacaaccagagctagcgctactgaaggggtggagacagtctagctctagcactctgccctgtctcccagggcctgggcttacacctgcccagctaaacacctctaatgagatccctggagaaggtgggggtgcatgcctcagagggaagcctgagtcttgtctctgttttcctcctcccctctttccacagcaactgagctacataggtgtcctctgggtcagaagacctcagttttagtgtaggatcaaacactctgttttatctttgcaaattctatttgggcctcactatttatttatttaacaactattactgaatggcttatctatgtcaggtgctaaactattctccagggacaaagagatgcctctcacatgagaagtgagctctatttttgtaacctacttcctacccttatctacctccacatacgccttcccccatcacaccattctcataggtagtgtgataggggccatcctatggtgcttttgtcctcatatccttcttgtgacttctagtgcctgatcctaccaaccattccatgtgttttatggtccccaatctttcaacttttctctttttgtgaacctgcttcaatatctcctatatcaaaacaaacaaaaaccctacaatttctccctcaacctgatgttcctttcactgctatcatctttctcagtcaacaaatcaaaatcagaacacccataggcaggtgttctgtgtgccaggccaatattgtgctaaatactaggaattggagatgaataagacacgctcccccttctccagaagctcacagtctgctaggtgaaatagtcaggccagcaggtaattacacatgaggtaactaaacagcagcagtcattgccaggctgctgatgagtactctgttagctggatacacggaaggctattatagtacacatgaagtggccctacagagcctgggttctgcaggatgaataggagttgggtacagagatgggagggtgaagagcactagaggcagaatgcacagagtgggcaaaggcatagagatatcaaaaagcgtgggtgactgggcaaatatcaattggcttattttagagggcctagcgggtagtggtgagagatgaggttgaatgatagacagaggccagctcaggaggagttctgtcagccatgttataaagcttggattttacccaacggcaatagagaacctgtgaagagtttttcacagttcagtgataaaatcaggtttgtgtttttggagtgtgttttagaagaaaaacctgtggtccctaattaaattttgaaaaactctcttttcccatggcttcttaatttctttttgcaaagtattacgcttgttaaaataaaaagacaacattcaaagtaatgcaacaaaatgaataaaatcctttgtaatgccataatgtcttggtttgctgtttctttttagtgtctttcataagctcctctgtctattccttctatgatggtgttttttttttttcttggattctgttctaggctttctacttttgccatcctcctaactctgtctgattgacgtcagtcacccacaggacttcctttctcatatagtggctcccgagaactctccctgagtttcagttatctatatgactaactgctcactggatgttcctacttgggtatcccgcggtcaccttcaacccattgggtctataactaagctcattatcttcctccactttttcttctagaattcctatctatgccctttcagcaaaaaaacctatgacaagcatttattactatttactgtataatgttgtggcagttaaaaaaaatggtcacaaattcttcgacaccactcccttgtgatagtttgtatagcaggagtgatgttgtgtgacttctaaggctagatcataaaaggccatgcagcttccctctggttctcttggaatgcgtgttgtctggtagctccc

SEQ ID NO: 914527 - DNA, 4001 bp, Homo sapiens
attcatccttgaccccctcaaagccacccagagcctgatctttgggaagcatcaatgcaggcgtggtggataaactgctgaggatcccctgaggacagggaccccacaggggctgtgggaaggccctgggtggggaaggccccaaaaagaggcttcttgaattccaggagcccttctcccaggagctggtcagctctgcattccctagcctgtggcccccagctccctccagtccttagaaccctagccctcctgcccctaccccacagaaagaaaaatagagtaactcggggtgcgggggagagggggaaagacaaagcaaccaagacccagagagagagcagagccaggccaaggagtgacagggctggagctggggtgtgtgctgaggtgcctttgggggctcactcttcacacagtaggggttcagtctatggattcccgatgtcaaagagcaaggtggcaggggatggcaaagggagcgcagggggaaccatggagcaggcggcaggtcccaggaagagaaaggagagaggaagtggagagcccgggaaagaagcaggtgaggcaccgggaggaaggagggaagggctatgggaaatgggattgagggagggataagaggacccctgaaagggaatgacaatcagggaggtgtgcgcgggaggtgtgagcagaggatgctgagctgagccagccagggccgagctgggcaggctgttacagaaacaggcacggggtttgggtgggggtggggacggagggcagtaaagtggggccaggggcccccaacaaccagctggaggctgattgatagttctgtagtgaggggacgggagccaggcagaggaggccctggaggagaggagcgggaggggaggaggagggagcctgggggaagcgatgggtcggatgcaggatgaggaatggacattttgaagaaccaggtgtgaggctaggccagggcgagggacagaccaaggggtatgtgagagacaaaggggaagggggacaggaagaggagggaagctggaaaatggagaggaaacctggggggctgggaagcccccaacaggaggggtagggaaacccaaggtgagccggtggtgggggctaggtctctgggggctgatgagagccaactgctgcttggtcagggagggggctgggaaggcaaagggttaatggactctgagatctgtgggtcctgtaaacagatgcagttgccatagcaaccagctccatcactctggctggaaaaacccacaaaggcgggggggggggggcagcagacagacaaactgcccgacggactaatggaggcggctggatggtggtggggggggacatagaagataaagcaacaaaaatgccagaattccaccccccacctcacgggctgcatgggagcagaggacgagggcagaggagggggtcagagaccgactgacatacacacagacaggcgggggcggcggaggaaggggggccccgggaagaaagccgaccacggggggtgttaatgggggcgaagccgacaagccgacggctgggggatagcaagtttcccctgggctctgagaccacccgccctgggtccctccagctccgcgtggcccctgccccccaccccgcccccagccccagccccagcccggccttacgtgccagatgacaaagaagatgagggaggcgcacagcaccagggtgagcatgtagcagaacgcggcgaaggtgaacgccatggcccccgcgccgggcggcggcccggggggcgccagcgcggggcccgggcgcaaggggacgccccccggcccgcgcttagggccggccgggcatggcccgtggggctcgggggacgtgggtgatgcggccgggaccgggaccgcggggccgtggggggcgcggggcgcgggccggtgggctcggggggcgcgtccgctgccggctgcccgggccccgatcgctcatcctgcgatccctcgcccgcggctccctcgctctccagcccgcgaagccggcggggcggagccgggggcggggccgccgcgcgagcggcctcgggcggggctgggtctccgcgggcccctcgtctgcccgcccggctcgggcgccacccccagccccgacaagcccgcggccgttcaccctccggacagcgtagacgcggccgcccccggcaccccgcacccctcggcactccagccaccggcacagccgcactcggccccctcgggcgggcgctcagggcaaaggctgaagtgcgaggcacttgtcactgtcggagacggcagaagcacctggctgggacacacaatgacgccaggacaggggctgaatgggagcagtggggttttggggggcgctgaaggaggttgggccaggtgcagtgggggccctctcagcggctgcgcgaccccacacctctgccgtgtgccccgcgggagttggcggcggcacgccaggtatgagctgatggccgcctgcctctttccctgacagaacggtgctgggcccttggggacagaccacagaagcacaagcagctttcctggcctcaggaaacggggtcaagggcttttgccagcagccttaggacacagaaaccaagccaggacccccgtgcaccccaccaagcccagggttccagttccatccccccaccccaaggctgggcttagaccacagaccacacttggccaccacaacttccttgcaaaaaccctcagctcacccgagggccaatggaaatttattaattttttttgtccttttccatctttccccaagtggcttttccttgcaaaatgcctgacatgacaccagaggggaacctgggagcggggggcaccccaagggggcagcccagggacttaaatacaagctggagggcagggcacaggtgggacaggcaagagacagcacgagggacatggcttctcagggagaccaaagacttgctttcttgcaggaagcagctgtgccagagggcaggggactaggatcctgggtgcagagtgggtgagcagagaggcccccaatcctggatggaacccacattccccagagaagtagcggcaggggatgagggccttccctggtgggctccagagacggagtggggagtgagccagatgtgctaccttggggaaagggaggaggtgctagcagagtgagggttaaggctggtgcccagcctctggcacggtgggccttccgcctccgcctgacatggggacaaaggggcacggtgggcaggcagcgcatgggtctgtctctggcagggcagagggcggcaggagcagactccctccaggctcaagacacaggcccagcactgctacccgcccacccgccctagatatactcagatcccaccgcagctggacggctcgagctgggagtgtaggaagggagaggaggcagtggggagaggaaagggtgggctgctgggcccctgtggcctccatgcctgtcctgaggtccagcccagggccctggatcccaggtcctggatcccctggccacattcctcgccctgggcactgactgcagccagggcagtagaggccggggagaccctcagttcttgggcaggacagcaggaagaagaaggagagaacccagtgcagcatacatgggggtgggagggacaccgacagaagagccctcgttccaaagaaaggtgtgtaggggggcatcttggaaagtcacctagaggcaacagcacagcaggcctccgccctgcctggccacaggccctgagtgtcctcccttagggaccctgacagaaccggggctcagggcagcaggcagatgggccagaaggagatggggagcccaggacaccccaaagccacagactcaaatgccccaggagagggagagggaggtacctcctgccccctccagggacatcatctggagaaggtgccccctcctgtcccactccatgtgcccctcctagcaacagccaccgccagccggctttacaggggtgc

SEQ ID NO: 914528 - DNA, 4001 bp, Homo sapiens
cttcaacaggctgcaggtggtcagagaaaaaagaaagaaaatgcctgttgtcttaactgtttttagaaatttaagatgggaaagcgaggccccagggaactacgcatattccattagaagagaaagcaaggaagagagaagggactaactgctacattttcttgttgttagcaatataatggctcccacgtgctgggatcccagtctgatgagaagaaatgaaacgaaggtcatggatggaccttactgtccactgtgaaagctcctgcagcacctttaggccccacagcttcttctcaaagagaccaccatctccaacattaataggcatcccatcagcctcattgcgggggatcttgtattccaggagtatcattaactcctctatctggtatgcaaaggcagcgacttggagaagaagggtatgtatagcttgatggaagtcaccttcggttggggtaaaatgcacctgctggtcttctaagagcctggccaacaaaacatggaaggtacgataagcttgaaggttctcttggagtcgctctgcctcggtcagctcactccactgatcagtgcttgccactggcatcccatccgcagagtccaggttgatgttcttgttcaggccctgatgcttcacctggccgaggatacaggaaaacaccacatcttctgtcatcaccccagtgtccttaaatcacccctaaatttcatacaaaatctcactcatctctctggccaaggatccaagttgtaaagtaaataatatgtctacagtaggaactcttaatttgggctctatgactggactttagaaagacccaatactgcctgaaattgactacctatggatttttcttagaagaatgttcagattttattgagttctaaaggttgaaaactgatttagaagaatttttccttctcacttcaaactctctcattaactggaatattttaatcatattaaagtatttttaaacatacttgtaaaagacactggccacaactaggaaaacttggaatatagccattgtagaatttctctaacttccctctccccattgagcactcccaaagagtctgatttctgtctggtgaggctgtacaaagataaatcagttctcagcctaaattcaaaactctccacaggggttggagtatttccacagcatatctcaggtggaaattgatggggatccccttactgttagaagacaaatctggaactccagaattagctcaagaatttgacacttccacaagtttccaatgaatcttctaggagatccttttgatagcttacctttctctttagacacaatctacttttgatgcagaatactaaaaggtgggtggctaatgctatataggagaaattggtaggatttacaaattcctcccacgttcatagtactcttcctatcccataaacctttcatttacatagctaaaaaattcagaacaatggctatgaagaacccagagggcccatggctaatctgttctagtagtattcagaatatatgccaataaatttggaatagcctccaagacatataaaccaatcctttctagaactccatatatattttctcattcaagtaacttcatctcctaaacagcccagaggaagaaaataaagtcacatgggtttcctcaagggaagggcccatgtcaaataacctatatgaatgactatatgattagagctttcacaattggtaatggagctgatgcgtgatggtaagttgctggatcaaaaaagatgaagggaaaacagataacagcaaaataggcaacttacataggattccgtaagagcagtcaggtctgaacgaatcttccttgctagccagatagagcggctacagaggtcccgacggtgaggggtcagcggtgaatgctctgtgaaagccatcccttaactcaactgtcccaggaaacaagtcagctgggtttacttctgtctatactggtccaaataagagatgtgactctcaaagactaaacccactgggcattctctactaatgggattgtgcaccccacccccacgccctgcctgactcagaggaggtagcaaattcctggctgtggatttttgtgcctgtggaatcaaagggccctttttaatcagattttttttcccctgcagcgtctgcctccatctctctcctccactcagtacttagcacacttgtttctatgtcattgttttgcttttgcacttagcaacaaggtcactatcataccaatcctcatggcacccctgcctaatgtaatctatctcacacacttagaattagttcattttattatcattctcccttatgcttcccatgtcttttttctcataggctggcgaaatgttcattcaataaaattgttattgacacagctgccatttattaagtatctaccatgggtcagtcagtaagctaaatactttaaagcaattccatttgatcttcagaatatttctgaggtaaatgttatttctccatataagaaactgaaacttcaagaaataacatgcacaaaatcaagtaacgaggcttgaatttaaatagaagtctgattctatagttgtctctcccactgactttccaatttcattttctgtttaggtagttcacatcttgttcaagaaacaaagggtgtgtgaagtcctttaaaaacaggatttttttcactcctaaccttacgtactttttaaaggtaatttaatttatacttaaaaatcaagcaaggaagcatctctaatttcaatcacggtgccttcctggtagctacataggaggaggaaggtactgtttaggcctgttctcttccaaagaacaggaaacacccaacgctaacttggtaacatttctaaagcagtctcactcaagtgacaacatgctttccttttttctcccctacccagtcataccacatgcttcttaaaataagagaatgagctgggctttgaaatgacagtataaaagttaaaaggtacttggagggttgtcattctattgcatttaacttagaaaatgatgcttattgggtaagggctaaatgaaataattagctttcattatttatatcatagatattgccaataagctgaaacacataccatcttagaagcaaatttataaaagtaaacaataaatgggagatgtaacagagcagcctgggcagctatcacagcatggcttttggaaggcagaaggattatagttttttcttttttaaaataaaaatcagtacttgatataaacattcaattttgagaagaagtattaatattaaatgctatcaaggttttgtcattatcagggtaaaattaacctcacataatccttaattttccatctactaggttaattaacatatggccagttttcctaggaggcagttgtcaaaacatcaagatttccaagtttgctgaataacagaatcatgtcatttcagcattagaaatcaagaacagtcaaaaattaaccacctgattctcaacaaaagcaaacaatagtatgccccacataacacctgttctgagggcatttggtttgcttagcagcatcacatgtttcacccctaggataactgtaactcagtacaaccaaggaagacaagttgcttccatgaagacaacttttatttttcttctttacatatttatttttaatatgccttacctagaataagagaaaacaaagatttgaaaagcaaagtatcccttttattataatttctttttacataaccttttcaacctatattcaggtaactacctgtctctcccatgaaaggagaagggtcctgcacattacaacaggcaaaaaaggcttttaagaaataaaatattttaaattgatccattacatttgttcaattttcttgagtacattggaaagtgggaaaaacacaaaaggagaaaaaaatggtatttcaaacaaccagactataataatcttagttagattggtagtacactcattatacttttt

SEQ ID NO: 914529 - DNA, 4001 bp, Homo sapiens
atttttatataacttttaagaatctaactttctgttcagttgtctatggaatcagaaagaaattaaaattagcagtttttctcctcctttctcaattttcagaagttttaaataatttaaaggatacaccaattcctaagcaaaaacactggcacttgtaataatcatttcactgactttctattttcagataggctttaatatcattccctcacactccagctatttgtcaaattctattctttatattgaatttccctttttataactttaactctgattttttttgcctttttccctttaatggacttagatgatctttttatgtaatatctttaatttgttatcattagttttatatgacatattcttactcatacctcttttcgattagagtcagagtaaacttatgcctgttaagtttaagactcagcatactagtccccacttaacttagaataatttgagcatgaaataggagaatatgcaagcaaccatgagaattgctcaaaattgactacaggcattttcaaaaacagttaatgacctaatcattattttttaaaatactgagagtcacaatattaatcataatgaactcctttaagctccctgtaatggtcataagtacttctgtaattctgttgcaattcaacagtaatcgatgatatctgcattaatttttaaatttgactatttgtctataattttaaatgctagtattctaatgaacatctacttctttcatccttatttccacagtcgtaattgagaatcaaagtagaagtattgaccctctaaatgattttctcttttaaattaagaaacaaatgaatgaaatgtaggtaaggcattgaacatacaacagtttaaaagttttttgcttctcacctgcatttaaattaccacatgaaattgtatttttcttgggagaacagttctaagatttaaaagtaatataattctaaaatatttagtggattctggttctttcgcaaataaatatagttgaaacaacttattgttcaggtcatcagagtaattctcaggtttgtgtatgtgcaaattgatattctcttccgtatatctccctacaaaacatggtaaggatgtctgaacataattttttaatctatcacaatcctatacaacctttagaaaaaagctcagcataatccaagatacagtttttctcagtctcacgaactttgtagaactccacttatagagcatccctactgaattttaacaagttattgcaatgccagatgcccaattatttagtctcggaaactcattgctcaaacataaggcatacattcagtacctgagaacggcatcctattttccaaacatttagtttcttttgtagaaacatcctcactttatcctggcatttattgccttacaatttgcaatttgcgtgtaggaattgcttactcttattttgggtggcattaggagatatacaaataggttatatttactcttgtttcaactttttgccataaaatcccagcaggaaataaagtcgtgttttgtttcctttatttaaaaaagcttcatcttacagtttttacattctggcaacatggcaagaaaggatggctttgcagaacagagtgtgtcaaaaatcctaagtggctgggagatgaagtgcacaatcacagaacgcagtcactggcaaaggaatgtcagccacttaccaataagatgccagactccactgtccttcctctgtgactctcaattcctgtctcccatcctcctgcccatcagcacagttcagagagagcggttcctcgggtcctttgcagcctgtggcagaggcgaattgcggagttcttaatcattcagagggaatcctccagcttgccctgcctctcgcagcagacgggacccaggtaacgcatcctctccgccccgagctttaatggcactttggctgccgccttctcgcagttccgctcccccacgccgtagttggttatattgggaagtaggtgcggcgcctcctgcggctggtgtgtttggggctcgcgtgttttcctccaatgcgtccgcgcgccctgcgccccgcgcctctgactggctgtgtcctcccggggcggcccctcgcccctccccggccgcccgcgctgtcaccggcgcccgcgtccagcgcctcactgcctcttgctgcaaaggttcattgagcatgtccctgggcttaacgaactgtgcgcctcccggagggtgctctgtgtttctccactcgtctcactagtcaaccggcattttccttccctgctaagtacagaggacctgccccccttccccgagcgtttctgctctgcaacccctccgtatttaacattcatagattacaaagcaaacgtgctggctggagtcggcacgggagatccaggcgagagtcccttcctccgctcctgtcttcactctgattcctgtagtccccggctcacacctctgacagcagcagcacagactgacgcgttcacttaggtcggtttgagagtggactttttcactttgcagaattttcttaagtcctgaatgggaagcacttctcttttgtttctgcacttacgcgtttcatctaaggactatcaggctctgcctgtttatatttctctttgatttggggtgttgactcagttctaaaaaaaagcgaaggaatggtctcagcaacctttttttcggaatttttatattacaatggctgtaattggaaaaataacacaggtagtaaatccacagtgtggcagctttagtgccattgttctgccagtcctcctctctactttttttttttttttcctctcagtctttgagtcgttttccaattcccacgattgggctgatggtaattgggtatttgttaaataaattatataacatttcctttgcaatatatttccatagagaatgtggtttgcacctgtatttaatggaaaggaaatcccacgtactgctttctatctctgtgtctgtataagaaactgcatgggagtctagggtcgcaccccgtgtccgctggtgtccgtttttcatgtgtgtttgagagcagcctgaccctggactgacgctgattcttctgctcactgaatcccccgatggggtctgactggctctaattggcaaggagagtacagtgccaggcagcctgtagctggaagccgtctaccactagccctgtgttctttctcttgcagtttttctggtaattaaaattagtcttttcctgtttcttggctgcttctcattcatccaatgatgtacaaacacccagtctctgcttttaatcgctatcctcaggatctaggctgattgcttgttctgtagcaaagacaaatttgtgtgcatttaatacttctccactcttccatactttttatattcgtgttcctgctttccagtaactaggttatcttctttatgtgttaactgagggatcgttgtggagattccccttctgtggctttttctctgccccactggctcttctcctctgtcaggctgtcggttcacagagagaactaccaggacttttataaccacattaaatacatcacaaaataaattcaaagtgtaggagctctaacgcattctttttattgttcgatgaggtttttgcctttaaaagtgtataattgagcacatgcagcctgaaagagggatcgggagtgtagaaagctttctgaaagttctcttcccttcttagaacaccattctatattacccatgatccgataatttgggcattttgagtcattatgtcacataatttctttcaactagctttgccctagaaaggatgtaagttggcttataaaaatctattcagtttaaaaaaatgaataaaaaatgtaggtcagtgagatcaagacaaacggtaaagtgataggaggagagataagatgaagccagaaatgaggtttatagagaaaactgcattgatgtttttgttacaaatggtgctaggtctgccattaactttg

SEQ ID NO: 914530 - DNA, 4001 bp, Homo sapiens
accataatattgatgaatcacagttttcacttaactcttaatgcctttgagataccttaccttttcatgtcatagatgtctctaccaactttttatagaggtatcctttttccttgcatgtctcttattaaacctgttttttctgtaagcaacgtgttgaacgtataatagtactaatatataaataattacttggttttttgttttttcagttatttaattactagtattgcaataaaaaggcttttatatatcttgtaaaagcatttagatgagtgcaggtatgctgcagatattacattcaacacataacaacttatataactgaaatactaaatttatttctgtatataaagaaattcttttagatttcaaataatgttttggagcataatctgataagttgaggattgccttttcagttataaagaagactcatatatcatacataattgaagttatacttttggtacattacgaatagtaataatagtataaaggctaaagaataaccattgtaaaattataatttaaaaaatatagcttaaatgattctaaaaagagtttatattttcttgtatttgggtttgttcttctatcagtccttttttctttagacaatctgcagttttcttcatgttacacaatacaggaaagacttaattgacaggagaatgtgtttagttctttgaaataaagaaatttagtataatcaattagatatttttgttgcatagtaatataaccatatagaagatgaggcaatattagtgatcatatgtaaataatatgcatgttctatatctttatgtagtttgtattctatattatatatgatcataaatacatatcttgaacatgtgttatcctcatatatatgtataaatggaacatgtatgtatttatatcaatatttgcatagagtactgaatgatcatatatatcaaaatgaatattttactgctttaaaaatatatttagtataattaacacattaaaaatgtgtttaaaatgaaagcaatcttttaatctaaaattatcagctgttacattttatttcagactctcttaccatacatactacctaaatttagcccacaatataggtactgatttaaatataatcaagctgtaaatgttacatgcatagcgcttaaattatgaccacaatttaatttctaatcattcttcaattaaagcaaataagctctgacatattaactttaggcattatgatattattactaccaatactataaacttttcttcggaataaagtatctcattttagagtcaagatatagaaaaataagtttaattacaacaaagtcagagaaggtgagacaatctgaaaaaatacattgtgttagagatgcctttagatactgtgttatatataataaagctaacctgattctgttttatatggtgaaatttagcattgtgatgagacacttttataattagctgctataaaatacataattatttatatacatatacattatatgcataaatatatgcacatatgtatgtatatatgtgtgggagatatatatatatatatatatatatatatatatatatatatttccaagccttctgaaagctagatggtttagattgcaaatgaatgtcaaggaggtaaatactcattttattaacatttatagtgtaccttattatattaaattgtatatggcattttgcaatgttaacagcggcttaagggttgctgcctttctcttgttggaaagtataaatactgatataaatttaaattaatacctgaggatattttgtaatggagaccttgatatattttggttattttgatacttagaaaatcaaataattaattaatcaggacttttacctgaaagacacatggtgactgacagaaacagcattagtttccaagaggaagccatcctcagtcactagaatcttctgtgtctcaatgtgtttaacagctctggtgtttcttcattaaagagtgccctgtttgagatagataacaattttcttaaacagaggaaataaacaaacagaaaagccaacaaatacaaaccaatgcaaaaatctcctaataacatgataaataaccattagtgcaaaggtcagattaatatgcactagacagcaataatacagtttctgttagaattcatgtaatacacaatacaagtacttaggaaatgtgatcaactctccttttcacatttatctacattgaatactcccatacagatagtaaaaacatcaggttctaatggggataatttttcctcacagggaatgtgtaatagctatatttattaccttagacaaattattggactagaaaaatagggtagagaaaccagttacattaatatatactcctttggtctagagcataactaatgatcggttggccaagtgattttacacattgtgcctgtagctcatcaaaaccaccacagggaatttttctcatttaattattaatgtcaacttcctttgtttataactcctatgattatctgtactgtgttatagttctctcctttggtgaattatttctttcagtatcttttgctggctggaacgtaagggaaaaaggattttcatgaatatttaatgtttttgtctaatgccatttttataacaataaccagtatagcacattaatatatttggttcctttttttccctgaatgatacaataaacatgaaaagaatagaaaattctgacactaaactttctgcaagaacttgacaaatatatattggaagtttctgtaatccacaagtacctccagaattttcacgtgtcagctatgttctccttggcgcaaagccgttcagttgagaaataattgtaaagtatgtcaatgatttttgaataatgattgccttcttggtatctgatccctccttatgaaattagaagtctaggttatctctatattttaggaaacatctgaaaaatatagacacgtattttttcccctagctagatcataatgtaatatagttatgtcaaagaaaggaatttattgttagtacctctacctaaatgaagttacttccatttttatttataattttaaatataagtcttggtagtctattttaactttatatttggggatcattaatggagaagaaagttaagacaataatggttaatttatttataacaagcctaaacaaaagaattttttcatcattttctgtattttatgagtaaatatcagatatacatataattcaaagtactaaataacaacctcatagctaattgtgacaatttaaagcatcttggttatttatacactgctttttaccagaaaggaaaataataaaatccacatatcacacataataactggagagattaaagttgccagaagtatgattatgactcatgagaactgcacagttgagttagcaaagtttcaattcatgattaaattgaccttttttgaaattgtgaattctgagaaggtaatatagctttggcttaactcatttttatgagcttgtgctcagtcccatactccccaaattggtacttctcgctctatttacaatgtcctaaggtcctctgttgttctaaatattcttcataaacaaatacaaatgttattacaacccttaagggctgtttctgggactgtcagagggaaaacccacagacattcatgtgcacacacatacatgggttgagagccatcaaaaggagcattgactcatgaagatagcaggagaaactggacacagtagcaaaggatcttcagtaaaatttcaaggagttattggtcttagataaagaacttatttttgagtggaacagtgtggaaagactgacaaggaacacatggataaataagtcagtgtcaaacagtgatacatactctgaagaaattaacagagtaaagggacaacctgtgaccggaggatagaaggtgagattttagtaggaatgcatgtgaagcacttttcataagatgcca

SEQ ID NO: 914531 - DNA, 4001 bp, Homo sapiens
cgtgatggcaggcacctgtaatcccagctactcgggaggctcaggcaggagaatcgctttaacccaaggggcggaggttgtagtgagccaaagatcgtgccactgcactccagcctgggtgacagagtgagactccatctccaaaacaaacaaacaaacaaagtgaaagagtgcccaaatatgggtaggttttgacacatgggaaggatggaaagagttcactgtggctgtagcatacagtatgcagaaacctggcctctgggtctataaggtgagatggctttgtaaactatacaaaaatgtgaggtgtatttatttgcccaaactgtcttgcccgtctgcatcagaacactcagcagaaagcagcatacagaaggaacttaaggtttgaagagaaatgacttcagcctttgcaaaaatttcaccatgatgggctgtaaagcaactaggactccttattgccttaactgtgtctctcattcactcaacaaatgattaagtacctatcatgtaccaggcactatgctagtgctgaggattcaagactgtctaagtcagttaagttcctggcttcatggagtttacaacctagacaaggaaacagggcagtttactacacagtgtacagatagcaaagactgggaccacagtggagggatgcctaatccagacaagggcaggaataggcagggaaggcttcctagaggaagtgatttccaagctgaaacttgacagatggaacagaagttagccagagatgggaaaactatttttggtcaatggaagagcaggtggttgagatagaatctgacacatgagagcaaaaaaaaaaaaaagttcagtgatgggagaatacagtgtgagaataagacaatattaaactggcgatataagtaagtgatcatcacaaggctttgtaggacatagtagggagtttaagactttttattctgagggcaatggggaatcacaagagggagttaggcactttacacaactcatttgccttggaggcggtataacttaagcaagagggagaaaatgggctttgaaacagacttggacctagctttgtcactgcctcatttggtgcccttggacacatcatttaataacctctctggaagcacagagatgaagccgggtgccatggctcacgcctgtaatcccaacactgggaggctgaggcgggaggatggtttgcgcccagcctgggcaacactgtgagccgtgatcacgccactgcattccagcctgggttacagcgggagaccctgtctcaaaaaaaaaaaaaaagaaaaaaaaaaaggtaaggtttgtaaggaggctggtatgtctaaagagttcaataaatgatagttttctcttcctaaatacactgttaactctttaaatagggccaggagcaaataatttagagaaagaacagtggaatagaaagtgccttgatcctaaaccaagagatccgtgttcaaatcccagcactacgccttactatgtaatctttttcattttagttttcccattaataatatttaattcgcacaattagaatgaagattaatataacgaatgaaaagcgcttgggctactataggactcagtaaatgctgctgtactctcctctcaccaccttttggcttcagtctcctctggagtaaaatgacgacgacccctgctcagagatcagggtaggctagatggttggcagctggatcgtggaggctggcctaaacaaggaagtcatggaaaggatcttaaagcagaaaaatgctggcagccacgaggcctgaggcgcctcaggcgtatcgaggactttgaactttgaggacgcatgcgcgcgcgcggccgctgatcgcagccccgttgtgcccgcaacgcctcctgaagaacgcggtacgcgatgctcaccgaacaggtgggagaagagggcccgaacgcacgctcctacgcggcggcttgggtttcgcaggcggttggggatcctctgtacatcctttcaggaaccagcccctcgtggggagcgtgcacacggaaggggcggggaatgtgaaaaagtcacgttttcattggtggcctcttggtgttgagcccacctctgtcctcgccgcacgcttctcggggactcacttccgggaaggggcggaagaggtgggctggtggaggcggggtcgagatggcggcgcctttgaggattcagagcgactgggcgcaagccctcaggtgaatccaggcccagaacagagtcagaggaggcgggtagtggatgttgctttgcgtcaaggagagccatgcctggtccaggatatcaataggggttacttcgtcaattgtcgagggatatggagggaacagggtccggaaaaagaagtatcaaacccgtatggtcattctctgaaaagctatccctaggccaagggagcacatgagctgtgtgatccccgcgtcagaactagtatcagtgagttggagaaagacagggatactgggaggcaggaaggcttttggccaagcagtcatttagcaaatattgattagtcgtcagttacttccagaagtctctgtactcaccaccactttgtgtatgtgatggaacctttgtattctcctaggcccctaatgctatattaggcatactggacgatactattaaggaaactaatactgtgtccaggccccatactggatgcttggtggagctcagatgtatactctaaatataagtgatggttcctgctcttcaagaagctgacatccaggccaggcgcagtggctcatgcctgtaatcccagcactttggaaaactgagattggtggatcagttgaggtcagaagttcgagaccagcctgaccaacatggtgaaactccgtctctactaaaaatacagaaattagtcgggcttggtggtgggcgcctataatcccagctactcgggaggctgaggcaggagaatcggttgaacccaggaggtggaggttgcagtgagccgagattgcaccactgcactccagcctgggtgacagagcgatactcatctcaaaaaagaagaaaagctgacgtcttaattaggaatacacagcaaactattcattcatctaacatttattgatcttatactattccagttatttctctaggcttcaggatgaatatagcagtgctatatttggcaactgctactactaataagggtttttcaaattgaaacaatggtgaagatgaatgaaacatagccttctgcatttaagaaatttacaccttactaaatttataccttacttaatttaggtgggctaaaatacagactagttgctagtacacagaatgtgataagtaataaagaacaataacatgaagtgccactagctacctatgagaaaatacagcaccagaatcagaaggcttaatttgcccaagatcatgcatctcgtcaaatgatagagggttgctgtcaacctagatctttctgtcttaaatgcatagaccctttccattataccctaaaagtgctagggtgaagagatcaggatttggatgattgggcaggtgctaaaataataaaaggaatcttgtttggttattgtgagggttaatgattgtgtatggaaagtgcttagcacagggcttggtttacaataatcctgataaataattaaataaccttgatttttcaaagtgagctcactgttgatggatgagcattaatttaaccaacagatatctattcattaaatagttaatccacaaatatttcttgaacaaataaagtttgtctgtcttagaatgatctatactcgatgagaggttggactatctcatgtctaagtactatgaccaagctggaggttacatgaccttctttcttcccttgtaactatgggatcctattcaactttgggtaagcctaattaggcttttgtctttcttcgtaggaaggatgaaggggaggcctggctgagctgtcatcccccaggtaatacccatgaattatatatgctgt

SEQ ID NO: 914532 - DNA, 4001 bp, Homo sapiens
aaagtcagtgtagtatccacaatttaaaattttaagaaggcaatcacgaatggaagttataggttgagacagacattcagtaaagaattcaaatattcttcaagcagtgccggaagaaactgtgtgtatgccggattggaacactcgattttaaaaaacttatttcagccagatcaatttgcaaacatgcgcatgcacgcacacacacagacacacacacacttgcctttggggtaaaaggaaacttgagttagtcgttatcaaaagatatcatttacctttctttttttaaatcattaattttttaaacagccttgatgtgtttttataaattgtagactgtgaatttttgtgctgtttgaaatctaagagagagttgcctttctttgtattcttggagcaaagtagaaagtgaacccatgactagaaagataatatcaagtaggatattgtaaacacacctcagggagataacatggggtggaggcagacaaacaggccaatccgggggaggaatggagttaaggaaagctctacaatgaggcagattttttaatacccactccttccaagtccttcagctcaagctgcagccaaatatttgcataaagagctggtaaaggattccagcttcctggttcatgacattacagcatggatcgttttcaaaattaatactgcctcctgtttcagcagtggctgcctgcacagctctccctgtggctcagagtatgggagtgagtatgccctgtaacccaaaagaggtgtggtgagctcggcttcccagcacagaatcacagagcaatacgggtacctttaaactttaaagccacacctgaaatttaaaaaaaaaaaaaaaatcctaaattactcagtataattattaattcaactgaaaaatgcaggctgctttactttgaatagttaaaaagagcagtctcataaacttttaagtatttaaatacagtagtttaaataaaagcaacttttatagatagtagtacaaaacatacaaagtactggaataattcccgaccattaactagaatgaaagtaggttccaactcaccaaccacagctttaagaaaatattttctattttaatatttcatgtatactaagaacatgtgaatatttttagctactcagaattaacaaaattaagaattgtgttctttggggaaacgactccctaaggctaagtagccagatggtatatgaaatttttgagaaaaataattgactaagccatagatagttgagattaaataaatgttagtccttaataattttaaatcgaatagtttaataggaagccttttgctgcattttctcaaactgttacatttttaccacataaaattatttacattaattttttactaaaaattaatcacttttaaaatttaagtagaagaatctgatattaggaaaaaaactccccaagcaagcaaacataaatattggatctagataaaacataatattggttgtatttaagaagtctgttttatgattcgatttcaggttttcattgttccaatgcaattttccagattgaatcttaaaaggattataaacgtcaaaaggcattttaaattctacacggacttaatacacctaccgcaattctatgcacctgtctttcaaattctataaaatatttgttgacactttccctttcacttgttttttacaatatattttgtacaaaaatttgtcaaacattgaaaaaaaaaaagaaagcaactttttctgagaaggaagaatctggcttaccttatagcagaaagaaacatagtcctcatcaaaatgtcttagctttcccttcagagcatttctttcagcctgcttcacggtgatattcttgctttgacagcggtccggaggcagcagtgtccacctttcagacccagttgcaccatcttctgcaggtcagtacagccagcattaacagttccctcaaacactctttcaaaagtccatctcaaaagtctttcagtcttgattcaggggttaagataggcaccaccatttaattggaatccaaccaatcagaaggtgaaaaaggcatagtcactccacatgcaagcccagcaagaaaacaagcataaatgttgtcttcatttctgaattctctactctctgctatattgtctcaagagtttgttcttcacatttattccagttcctcatcgccaagtaactaaactgaactacaaaatcagaattgttctcaggaacttatctttttttagtgcactgttagatggaatacagaacatcccaagacactcaaataatgcctttgctctgttcctttagtttccagccgacaggggcttccctccccttctctgttcccagaaagcagttcaaacaagtgtaggttttctcagcccaataagaataactcgattacataaacactcctacctctgctactcaacagctaagagtttaaggaggtcgtatataaggaaacctctgcctatggcctctccccactaaatgtgtcaccgtagcttcaccttaaaggaacttgagacctcaagaagaacacagtgtcctttagtccctttgatgagcacactctaatcctctcttcttccagcatttacagataattatcacaaattgggcctattaataataaaatggaaaaggagtaatgtttactgattatctttgtttgatgtttaacaacttactttgatcacatcatgatgttaacatgttcactgagaaaacatttttgctttttgtacttccgagccaatagtgttaattggtactctatgttcctggtttccatgattatcatttgcattctcatttaaatcacttctcaaaattctctcctccaaacttaagttactgagtaagagtgaaaagttcaaaaaagcaatcaccataagtcaaaagaattatttcccgtagcatcagaagttttctcaaagcctcaacaactttgtcagttacttctgagaggtttacgtgaactgccggtaggggctggatgtccatggttttacagcccaagaaaggggaagtttgagccattatttgactgtgacacttggacacaaattgggtcaccatccttttatttttgccctaaccagttttacagccagtttccacattattaaccatgttcatttccctggagcttgaattagctaggacaactaaagagtcaaaattgcattcccgtttacttttctggatttgttaagccccctttccccctagacatagtaaatattcagagtatagatctccattcaaatctgtgttttgcaatttttatgcaaaaacctgcctttttcctttctcctctaggactgtattttgagcctgaaccaatttcttccacgcccaattatttgcaacggggagaattttccagttgtgtttcatgtgaagaaaactcaagctgcctcgaccagatctttgattcctaccttcagacagagatgcacccggagcctttgctcaattccacacaaagtgctccacaccatttcccagacagcttccaggccacccctttctgctttaaccagagcctggtaatttttctcagttctttatatacctgattgtgtctaactatggggtaatagtgctttgtgagtttgcaccatcccgtgggaaatcatacaaaaactatcagcaaggaaatcatccaaggaaacaagcagagaagaatttaaaagtcaatgtatagaagtagccacacactgcagggcataaacctttggatacacacgtaatttagatttcccaagatttagatttttcggccaccaagtaagttggtgggtagcaataaaaagaggttcctggcaatattcatttaatgttttttaaactgtaaagtcaagagacctactaattggaagtcagtggtttaaacaatggctcttggattttttgatggaattttgagttcttggaaatggaattaaggctgtgtatatatggtaacaaacttc

SEQ ID NO: 914533 - DNA, 4001 bp, Homo sapiens
gactctctgtggggtgcctgtgtgcaggatttctgcagaagatagtccattttgttaagcctttgaatattcaaattgaaagtatcgcgcaatcattgattgtcaaatcatgggtttctagaggttttaaatacttggcatgagggggaaaaaactcaaacctatacccgaaggtataaaacattaattctgtttgtctcctgttccagggacctgggtgcagccggatgctttgtgaaattttaaaaatgttgcatctctgcttctctccctgccccaggagccctcccaggcgctgagtccctgctgctgcagcatccagccaccgacccagctcctgctgaccacgatgtcgggtaactcggctgcttctcctagggtcgggtcaggcgggccaggggcatttcaatccgggtgtgtttccacggcttttcctgcatagaacagagaggcacaaagtcaaggcatgcgagtaagggccggggatccggagaggacgcgagccacgctgtggccgctcccactcagcgcctgtcccggagggcagaggcccagaggccgagttggccgctccggacgtccgcgtaccccaggcccccgcccgccctcccacgtatccactgttgtgtcctgagacacgcggtgcggaccctgcgcgcccagaagctgctacggggggagctagaggctcacagtgagcctgggacgggggcagagcgcaccgactgcactgagccgagctgtggcggtccctgcgcggaccccgaggggcgcccgctgcccgcggagtccggagccgatcggggaacggggtggtggggctgcggtaggctggagcgcggagagggcgcggcgcctgggccctgcgggcggggcacgggattccctgggtccgggctaggaagagcgcaatctcctttcctggggagaccctaactcctggaacccggcttgagggggatccctgctgtccagctgcggtccccgcagtgaccaggcgaggcgctggcatcctggcactatctccaggcgtccaggctgaacgcgcggtcaccctcggccgccgcacccagcgcacttcccggcgcgattcctggacgcacactgcagggtagtggtcagggccggagccgccccggactcctgcggccacctccaccttgaaagctcgcccggctcggcttggcctaacagccagtccccaacctactcactgcggcttttcggggcccggggctgaggctgcccctgctcccagcgctcaggggtccctcccagcgaacccctcttgagcgcgcccgccacctcccgcgagccggggcagtccgaccgggccccgccagccccggggcggcccctaccgaagggcggcctcccggcggagtgcagggtcatcgggagccccggacggctttccccagctcgcgctgcgcggactcgccccggagcctcagtgcgcctcggagaaacgcctgccccagaaagggagggggtagggagagaggggaagaaggggagagtaggagcgggggcgaaggagggaggagggcaagatggagcgcggaaaaggcggagaaaagggacgagggagagcgggcagaaggcaaagacagaagggagcgagggagggagttcctcgggcctggcccctttactaggtcagtctggcaggtacctcgccggcccaggacggggctggccaaacctcaccgcttgctcccgggctggcttccagaccaagggcacgcagaggtcggagcctgcccagaagccacacctggccaggcggagaaggaagggactcgggacttccatgctagtgggaacatcacagtggggtgggctacgtcagccgccataatcagagaaagccccctgccccaggcctggcccctccccaggtccataataccctctctctcggctgtctgggtctgaaagccaaggttcccccgacctaatcagagtggtgggctccgctgcactggtctccatattccagagcagaaaaacccgtttgctattggcctaggactgaggcccagccaggggtggatggccccacaaatttccacggattcttttcctactggggctctgaaacctgctcagctactcttcattctttcaagtttgaaatgtttgggtttttaccatcctttgacattttttgtgtgtgttctccgaacttagaaacttggctttgggtgccatagcctataaaaggggcccccactctgcaccctggcacccagaccttggactcgaccactgactcagttgcctttctccagaaaaaccgaaggtgtatcaaggtgtccgagtgaagatcacagtgaaggagctgctgcagcaaagacgggcacaccaggcggcctccgggggaaccgtaagcataagcccttccctcattccccagcccatgccaggcctctttcaaagctgtgtctgcaaggtgtggaggccactcaaggccccacgcactcaccattcccagacctggccttcctctgctgttcctatgacttctgtacccagctgcatcccaatcgggaagctacagaggacagctggggcatgttgtggggctcaggatttgggggagcccatccatcccccatgggtgaaagtaaagtataaaaagtgcgttggtcctctgcagggggaggagcggccagcaggtaagtatacatcgttttgttaggaagacagtggatatatgtacagcccttgcagacccatagaaaatctctcccagaaattcacctcattttaggggccccttccaggatagcatctgtgtggaacatcctcccttccctcctcattcttctggaactcaccctctgagatcatttatctgtaaatcatcagttacctaaagtatctagcagaaaagggccctgtctctgcagaagagacagctggagtacaggaccacttccctaaaatgtatcaacaccttaagcagtttcaggttattacaaaattgaactgagcagtcataagggtataccctgacactttatacaccttcctacggtaagtactgccaaaggcactcagggcagcaacagaaccaaataaactaggtggggttattgcccaagagagggcagctcatccctaaaaagcctcaatcatacaattgcttgggggttggtttgggtgtgaacataggatctgacagctggggctcatattgcctctgttaggattggtccttctccagcccattggcatctgccccacaacagtttttgtgcctgatgctgttcatgtgcaatgtgtgacttcatgaaataggcctttgacagcgggacttcttgaaatgggagggggcaaatgatgtaggggaggtaaacacaggttccagaaccagatggactgggctcagatctcagttcctccatggtgtgtatcctcaagcaaattacccaattcctcttgcctctgtttattcgtcttcaaattggggatgataggattttgtgagggttaatcgagttattgcatacaaagccgttagaagaatgctttccacatagtgagtgctcaataaatgttagttgtcattatttgagaaataataatattatctggggaaagcaactaatattccaaccaaggattgaaagccagctatttggtaatgtttgttcacaccctttgctcagagtttagagttcagatgcgagccagctgcaatttggcatatacagcacatgcagctggaaaagtaaggacctccatgtgcagaatttcaggtaacgcattaacactcccttacatttctagaggacttcacagtggttcttcttttaaagcacttttgcacagccactatttcatttagtttttataacaaccagcggaggtaagtagatcagagatctgtacctcgattacaggcaaaattcaaaaccttgaagttgctcatggcaacgctaaaagtaggactaaggtctttttcttagtgtaatataaaaacccttctgttg

SEQ ID NO: 914534 - DNA, 4001 bp, Homo sapiens
tggactggtcttgaatcctggaaatatcttggttatttgcaaaaggaacctcaccatgcctctctcttctcttgctgtccccttctgtggagggggcgggtggctatgagaggacttggcctggcactctctccctctgtggaccattcctgtctcctcaccttccaaatcacatggaagaggcacagtaagtactcacagaagatgacccagtagaatcccaagtcattagtgaggggcttgggcctggaccaagggggaagcctgatcccaagtccctcccccttctcaccccaatgggagaaggcttgaacctaagtccacatcctttcagttaaaatgagcaggagccaaacttgtcattgtttcctaacatgtgctcctacagcaaaaaggcaggggtggctctagaaggcgaaaaagcaaagagggcacttcgcagtgcggtggtgaaacccagagtcagaaagtctccagaggatgaggctcctggcatccccagctctgtggggaggaggaaagggtcttaatgggcagtcattctgagcagaaaccccagtgtcgggcccaggaagagcgggatgaaagggggagggaagcccgctggtagccaggcggagccagaaaaataggaggtgcagagcgaaggcctctgctaggccgctggcctgccacctgggcccagagcgacttcttgctgtgccacacccactagctgccatgttcattcctcaaaacctgagatttcccctcaaaacacagatgggggatgcgggaatcagtctggccagccagtctggctccggtgttcatggccagggcagcctaagtcactcatggcttcttagctgccctgaaggctgaaatacagagcatctttgaggacatctgctctatctgtgggaaggaggacaaaatgctcaaactataataaaagcaagggccaggacccaaaggggtctcactccctgtttctctggactctctgtggggtgcctgtgtgcaggatttctgcagaagatagtccattttgttaagcctttgaatattcaaattgaaagtatcgcgcaatcattgattgtcaaatcatgggtttctagaggttttaaatacttggcatgagggggaaaaaactcaaacctatacccgaaggtataaaacattaattctgtttgtctcctgttccagggacctgggtgcagccggatgctttgtgaaattttaaaaatgttgcatctctgcttctctccctgccccaggagccctcccaggcgctgagtccctgctgctgcagcatccagccaccgacccagctcctgctgaccacgatgtcgggtaactcggctgcttctcctagggtcgggtcaggcgggccaggggcatttcaatccgggtgtgtttccacggcttttcctgcatagaacagagaggcacaaagtcaaggcatgcgagtaagggccggggatccggagaggacgcgagccacgctgtggccgctcccactcagcgcctgtcccggagggcagaggcccagaggccgagttggccgctccggacgtccgcgtaccccaggcccccgcccgccctcccacgtatccactgttgtgtcctgagacacgcggtgcggaccctgcgcgcccagaagctgctacggggggagctagaggctcacagtgagcctgggacgggggcagagcgcaccgactgcactgagccgagctgtggcggtccctgcgcggaccccgaggggcgcccgctgcccgcggagtccggagccgatcggggaacggggtggtggggctgcggtaggctggagcgcggagagggcgcggcgcctgggccctgcgggcggggcacgggattccctgggtccgggctaggaagagcgcaatctcctttcctggggagaccctaactcctggaacccggcttgagggggatccctgctgtccagctgcggtccccgcagtgaccaggcgaggcgctggcatcctggcactatctccaggcgtccaggctgaacgcgcggtcaccctcggccgccgcacccagcgcacttcccggcgcgattcctggacgcacactgcagggtagtggtcagggccggagccgccccggactcctgcggccacctccaccttgaaagctcgcccggctcggcttggcctaacagccagtccccaacctactcactgcggcttttcggggcccggggctgaggctgcccctgctcccagcgctcaggggtccctcccagcgaacccctcttgagcgcgcccgccacctcccgcgagccggggcagtccgaccgggccccgccagccccggggcggcccctaccgaagggcggcctcccggcggagtgcagggtcatcgggagccccggacggctttccccagctcgcgctgcgcggactcgccccggagcctcagtgcgcctcggagaaacgcctgccccagaaagggagggggtagggagagaggggaagaaggggagagtaggagcgggggcgaaggagggaggagggcaagatggagcgcggaaaaggcggagaaaagggacgagggagagcgggcagaaggcaaagacagaagggagcgagggagggagttcctcgggcctggcccctttactaggtcagtctggcaggtacctcgccggcccaggacggggctggccaaacctcaccgcttgctcccgggctggcttccagaccaagggcacgcagaggtcggagcctgcccagaagccacacctggccaggcggagaaggaagggactcgggacttccatgctagtgggaacatcacagtggggtgggctacgtcagccgccataatcagagaaagccccctgccccaggcctggcccctccccaggtccataataccctctctctcggctgtctgggtctgaaagccaaggttcccccgacctaatcagagtggtgggctccgctgcactggtctccatattccagagcagaaaaacccgtttgctattggcctaggactgaggcccagccaggggtggatggccccacaaatttccacggattcttttcctactggggctctgaaacctgctcagctactcttcattctttcaagtttgaaatgtttgggtttttaccatcctttgacattttttgtgtgtgttctccgaacttagaaacttggctttgggtgccatagcctataaaaggggcccccactctgcaccctggcacccagaccttggactcgaccactgactcagttgcctttctccagaaaaaccgaaggtgtatcaaggtgtccgagtgaagatcacagtgaaggagctgctgcagcaaagacgggcacaccaggcggcctccgggggaaccgtaagcataagcccttccctcattccccagcccatgccaggcctctttcaaagctgtgtctgcaaggtgtggaggccactcaaggccccacgcactcaccattcccagacctggccttcctctgctgttcctatgacttctgtacccagctgcatcccaatcgggaagctacagaggacagctggggcatgttgtggggctcaggatttgggggagcccatccatcccccatgggtgaaagtaaagtataaaaagtgcgttggtcctctgcagggggaggagcggccagcaggtaagtatacatcgttttgttaggaagacagtggatatatgtacagcccttgcagacccatagaaaatctctcccagaaattcacctcattttaggggccccttccaggatagcatctgtgtggaacatcctcccttccctcctcattcttctggaactcaccctctgagatcatttatctgtaaatcatcagttacctaaagtatctagcagaaaagggccctgtctctgcagaagagacagctggagtacaggaccacttccctaaaatgtatcaacaccttaagcagtttcaggttattacaaaattgaactgagcagtcataagggtataccctgac

SEQ ID NO: 914535 - DNA, 4001 bp, Homo sapiens
ctggccagccagtctggctccggtgttcatggccagggcagcctaagtcactcatggcttcttagctgccctgaaggctgaaatacagagcatctttgaggacatctgctctatctgtgggaaggaggacaaaatgctcaaactataataaaagcaagggccaggacccaaaggggtctcactccctgtttctctggactctctgtggggtgcctgtgtgcaggatttctgcagaagatagtccattttgttaagcctttgaatattcaaattgaaagtatcgcgcaatcattgattgtcaaatcatgggtttctagaggttttaaatacttggcatgagggggaaaaaactcaaacctatacccgaaggtataaaacattaattctgtttgtctcctgttccagggacctgggtgcagccggatgctttgtgaaattttaaaaatgttgcatctctgcttctctccctgccccaggagccctcccaggcgctgagtccctgctgctgcagcatccagccaccgacccagctcctgctgaccacgatgtcgggtaactcggctgcttctcctagggtcgggtcaggcgggccaggggcatttcaatccgggtgtgtttccacggcttttcctgcatagaacagagaggcacaaagtcaaggcatgcgagtaagggccggggatccggagaggacgcgagccacgctgtggccgctcccactcagcgcctgtcccggagggcagaggcccagaggccgagttggccgctccggacgtccgcgtaccccaggcccccgcccgccctcccacgtatccactgttgtgtcctgagacacgcggtgcggaccctgcgcgcccagaagctgctacggggggagctagaggctcacagtgagcctgggacgggggcagagcgcaccgactgcactgagccgagctgtggcggtccctgcgcggaccccgaggggcgcccgctgcccgcggagtccggagccgatcggggaacggggtggtggggctgcggtaggctggagcgcggagagggcgcggcgcctgggccctgcgggcggggcacgggattccctgggtccgggctaggaagagcgcaatctcctttcctggggagaccctaactcctggaacccggcttgagggggatccctgctgtccagctgcggtccccgcagtgaccaggcgaggcgctggcatcctggcactatctccaggcgtccaggctgaacgcgcggtcaccctcggccgccgcacccagcgcacttcccggcgcgattcctggacgcacactgcagggtagtggtcagggccggagccgccccggactcctgcggccacctccaccttgaaagctcgcccggctcggcttggcctaacagccagtccccaacctactcactgcggcttttcggggcccggggctgaggctgcccctgctcccagcgctcaggggtccctcccagcgaacccctcttgagcgcgcccgccacctcccgcgagccggggcagtccgaccgggccccgccagccccggggcggcccctaccgaagggcggcctcccggcggagtgcagggtcatcgggagccccggacggctttccccagctcgcgctgcgcggactcgccccggagcctcagtgcgcctcggagaaacgcctgccccagaaagggagggggtagggagagaggggaagaaggggagagtaggagcgggggcgaaggagggaggagggcaagatggagcgcggaaaaggcggagaaaagggacgagggagagcgggcagaaggcaaagacagaagggagcgagggagggagttcctcgggcctggcccctttactaggtcagtctggcaggtacctcgccggcccaggacggggctggccaaacctcaccgcttgctcccgggctggcttccagaccaagggcacgcagaggtcggagcctgcccagaagccacacctggccaggcggagaaggaagggactcgggacttccatgctagtgggaacatcacagtggggtgggctacgtcagccgccataatcagagaaagccccctgccccaggcctggcccctccccaggtccataataccctctctctcggctgtctgggtctgaaagccaaggttcccccgacctaatcagagtggtgggctccgctgcactggtctccatattccagagcagaaaaacccgtttgctattggcctaggactgaggcccagccaggggtggatggccccacaaatttccacggattcttttcctactggggctctgaaacctgctcagctactcttcattctttcaagtttgaaatgtttgggtttttaccatcctttgacattttttgtgtgtgttctccgaacttagaaacttggctttgggtgccatagcctataaaaggggcccccactctgcaccctggcacccagaccttggactcgaccactgactcagttgcctttctccagaaaaaccgaaggtgtatcaaggtgtccgagtgaagatcacagtgaaggagctgctgcagcaaagacgggcacaccaggcggcctccgggggaaccgtaagcataagcccttccctcattccccagcccatgccaggcctctttcaaagctgtgtctgcaaggtgtggaggccactcaaggccccacgcactcaccattcccagacctggccttcctctgctgttcctatgacttctgtacccagctgcatcccaatcgggaagctacagaggacagctggggcatgttgtggggctcaggatttgggggagcccatccatcccccatgggtgaaagtaaagtataaaaagtgcgttggtcctctgcagggggaggagcggccagcaggtaagtatacatcgttttgttaggaagacagtggatatatgtacagcccttgcagacccatagaaaatctctcccagaaattcacctcattttaggggccccttccaggatagcatctgtgtggaacatcctcccttccctcctcattcttctggaactcaccctctgagatcatttatctgtaaatcatcagttacctaaagtatctagcagaaaagggccctgtctctgcagaagagacagctggagtacaggaccacttccctaaaatgtatcaacaccttaagcagtttcaggttattacaaaattgaactgagcagtcataagggtataccctgacactttatacaccttcctacggtaagtactgccaaaggcactcagggcagcaacagaaccaaataaactaggtggggttattgcccaagagagggcagctcatccctaaaaagcctcaatcatacaattgcttgggggttggtttgggtgtgaacataggatctgacagctggggctcatattgcctctgttaggattggtccttctccagcccattggcatctgccccacaacagtttttgtgcctgatgctgttcatgtgcaatgtgtgacttcatgaaataggcctttgacagcgggacttcttgaaatgggagggggcaaatgatgtaggggaggtaaacacaggttccagaaccagatggactgggctcagatctcagttcctccatggtgtgtatcctcaagcaaattacccaattcctcttgcctctgtttattcgtcttcaaattggggatgataggattttgtgagggttaatcgagttattgcatacaaagccgttagaagaatgctttccacatagtgagtgctcaataaatgttagttgtcattatttgagaaataataatattatctggggaaagcaactaatattccaaccaaggattgaaagccagctatttggtaatgtttgttcacaccctttgctcagagtttagagttcagatgcgagccagctgcaatttggcatatacagcacatgcagctggaaaagtaaggacctccatgtgcagaatttcaggtaacgcattaacactcccttacatttctagaggactt

SEQ ID NO: 914536 - DNA, 4001 bp, Homo sapiens
cgaaggcctctgctaggccgctggcctgccacctgggcccagagcgacttcttgctgtgccacacccactagctgccatgttcattcctcaaaacctgagatttcccctcaaaacacagatgggggatgcgggaatcagtctggccagccagtctggctccggtgttcatggccagggcagcctaagtcactcatggcttcttagctgccctgaaggctgaaatacagagcatctttgaggacatctgctctatctgtgggaaggaggacaaaatgctcaaactataataaaagcaagggccaggacccaaaggggtctcactccctgtttctctggactctctgtggggtgcctgtgtgcaggatttctgcagaagatagtccattttgttaagcctttgaatattcaaattgaaagtatcgcgcaatcattgattgtcaaatcatgggtttctagaggttttaaatacttggcatgagggggaaaaaactcaaacctatacccgaaggtataaaacattaattctgtttgtctcctgttccagggacctgggtgcagccggatgctttgtgaaattttaaaaatgttgcatctctgcttctctccctgccccaggagccctcccaggcgctgagtccctgctgctgcagcatccagccaccgacccagctcctgctgaccacgatgtcgggtaactcggctgcttctcctagggtcgggtcaggcgggccaggggcatttcaatccgggtgtgtttccacggcttttcctgcatagaacagagaggcacaaagtcaaggcatgcgagtaagggccggggatccggagaggacgcgagccacgctgtggccgctcccactcagcgcctgtcccggagggcagaggcccagaggccgagttggccgctccggacgtccgcgtaccccaggcccccgcccgccctcccacgtatccactgttgtgtcctgagacacgcggtgcggaccctgcgcgcccagaagctgctacggggggagctagaggctcacagtgagcctgggacgggggcagagcgcaccgactgcactgagccgagctgtggcggtccctgcgcggaccccgaggggcgcccgctgcccgcggagtccggagccgatcggggaacggggtggtggggctgcggtaggctggagcgcggagagggcgcggcgcctgggccctgcgggcggggcacgggattccctgggtccgggctaggaagagcgcaatctcctttcctggggagaccctaactcctggaacccggcttgagggggatccctgctgtccagctgcggtccccgcagtgaccaggcgaggcgctggcatcctggcactatctccaggcgtccaggctgaacgcgcggtcaccctcggccgccgcacccagcgcacttcccggcgcgattcctggacgcacactgcagggtagtggtcagggccggagccgccccggactcctgcggccacctccaccttgaaagctcgcccggctcggcttggcctaacagccagtccccaacctactcactgcggcttttcggggcccggggctgaggctgcccctgctcccagcgctcaggggtccctcccagcgaacccctcttgagcgcgcccgccacctcccgcgagccggggcagtccgaccgggccccgccagccccggggcggcccctaccgaagggcggcctcccggcggagtgcagggtcatcgggagccccggacggctttccccagctcgcgctgcgcggactcgccccggagcctcagtgcgcctcggagaaacgcctgccccagaaagggagggggtagggagagaggggaagaaggggagagtaggagcgggggcgaaggagggaggagggcaagatggagcgcggaaaaggcggagaaaagggacgagggagagcgggcagaaggcaaagacagaagggagcgagggagggagttcctcgggcctggcccctttactaggtcagtctggcaggtacctcgccggcccaggacggggctggccaaacctcaccgcttgctcccgggctggcttccagaccaagggcacgcagaggtcggagcctgcccagaagccacacctggccaggcggagaaggaagggactcgggacttccatgctagtgggaacatcacagtggggtgggctacgtcagccgccataatcagagaaagccccctgccccaggcctggcccctccccaggtccataataccctctctctcggctgtctgggtctgaaagccaaggttcccccgacctaatcagagtggtgggctccgctgcactggtctccatattccagagcagaaaaacccgtttgctattggcctaggactgaggcccagccaggggtggatggccccacaaatttccacggattcttttcctactggggctctgaaacctgctcagctactcttcattctttcaagtttgaaatgtttgggtttttaccatcctttgacattttttgtgtgtgttctccgaacttagaaacttggctttgggtgccatagcctataaaaggggcccccactctgcaccctggcacccagaccttggactcgaccactgactcagttgcctttctccagaaaaaccgaaggtgtatcaaggtgtccgagtgaagatcacagtgaaggagctgctgcagcaaagacgggcacaccaggcggcctccgggggaaccgtaagcataagcccttccctcattccccagcccatgccaggcctctttcaaagctgtgtctgcaaggtgtggaggccactcaaggccccacgcactcaccattcccagacctggccttcctctgctgttcctatgacttctgtacccagctgcatcccaatcgggaagctacagaggacagctggggcatgttgtggggctcaggatttgggggagcccatccatcccccatgggtgaaagtaaagtataaaaagtgcgttggtcctctgcagggggaggagcggccagcaggtaagtatacatcgttttgttaggaagacagtggatatatgtacagcccttgcagacccatagaaaatctctcccagaaattcacctcattttaggggccccttccaggatagcatctgtgtggaacatcctcccttccctcctcattcttctggaactcaccctctgagatcatttatctgtaaatcatcagttacctaaagtatctagcagaaaagggccctgtctctgcagaagagacagctggagtacaggaccacttccctaaaatgtatcaacaccttaagcagtttcaggttattacaaaattgaactgagcagtcataagggtataccctgacactttatacaccttcctacggtaagtactgccaaaggcactcagggcagcaacagaaccaaataaactaggtggggttattgcccaagagagggcagctcatccctaaaaagcctcaatcatacaattgcttgggggttggtttgggtgtgaacataggatctgacagctggggctcatattgcctctgttaggattggtccttctccagcccattggcatctgccccacaacagtttttgtgcctgatgctgttcatgtgcaatgtgtgacttcatgaaataggcctttgacagcgggacttcttgaaatgggagggggcaaatgatgtaggggaggtaaacacaggttccagaaccagatggactgggctcagatctcagttcctccatggtgtgtatcctcaagcaaattacccaattcctcttgcctctgtttattcgtcttcaaattggggatgataggattttgtgagggttaatcgagttattgcatacaaagccgttagaagaatgctttccacatagtgagtgctcaataaatgttagttgtcattatttgagaaataataatattatctggggaaagcaactaatattccaaccaaggattgaaagccagctatttggtaatgtttgttcaca

SEQ ID NO: 914537 - DNA, 4001 bp, Homo sapiens
agggtatacccttatgactgctcagttcaattttgtaataacctgaaactgcttaaggtgttgatacattttagggaagtggtcctgtactccagctgtctcttctgcagagacagggcccttttctgctagatactttaggtaactgatgatttacagataaatgatctcagagggtgagttccagaagaatgaggagggaagggaggatgttccacacagatgctatcctggaaggggcccctaaaatgaggtgaatttctgggagagattttctatgggtctgcaagggctgtacatatatccactgtcttcctaacaaaacgatgtatacttacctgctggccgctcctccccctgcagaggaccaacgcactttttatactttactttcacccatgggggatggatgggctcccccaaatcctgagccccacaacatgccccagctgtcctctgtagcttcccgattgggatgcagctgggtacagaagtcataggaacagcagaggaaggccaggtctgggaatggtgagtgcgtggggccttgagtggcctccacaccttgcagacacagctttgaaagaggcctggcatgggctggggaatgagggaagggcttatgcttacggttcccccggaggccgcctggtgtgcccgtctttgctgcagcagctccttcactgtgatcttcactcggacaccttgatacaccttcggtttttctggagaaaggcaactgagtcagtggtcgagtccaaggtctgggtgccagggtgcagagtgggggccccttttataggctatggcacccaaagccaagtttctaagttcggagaacacacacaaaaaatgtcaaaggatggtaaaaacccaaacatttcaaacttgaaagaatgaagagtagctgagcaggtttcagagccccagtaggaaaagaatccgtggaaatttgtggggccatccacccctggctgggcctcagtcctaggccaatagcaaacgggtttttctgctctggaatatggagaccagtgcagcggagcccaccactctgattaggtcgggggaaccttggctttcagacccagacagccgagagagagggtattatggacctggggaggggccaggcctggggcagggggctttctctgattatggcggctgacgtagcccaccccactgtgatgttcccactagcatggaagtcccgagtcccttccttctccgcctggccaggtgtggcttctgggcaggctccgacctctgcgtgcccttggtctggaagccagcccgggagcaagcggtgaggtttggccagccccgtcctgggccggcgaggtacctgccagactgacctagtaaaggggccaggcccgaggaactccctccctcgctcccttctgtctttgccttctgcccgctctccctcgtcccttttctccgccttttccgcgctccatcttgccctcctccctccttcgcccccgctcctactctccccttcttcccctctctccctaccccctccctttctggggcaggcgtttctccgaggcgcactgaggctccggggcgagtccgcgcagcgcgagctggggaaagccgtccggggctcccgatgaccctgcactccgccgggaggccgcccttcggtaggggccgccccggggctggcggggcccggtcggactgccccggctcgcgggaggtggcgggcgcgctcaagaggggttcgctgggagggacccctgagcgctgggagcaggggcagcctcagccccgggccccgaaaagccgcagtgagtaggttggggactggctgttaggccaagccgagccgggcgagctttcaaggtggaggtggccgcaggagtccggggcggctccggccctgaccactaccctgcagtgtgcgtccaggaatcgcgccgggaagtgcgctgggtgcggcggccgagggtgaccgcgcgttcagcctggacgcctggagatagtgccaggatgccagcgcctcgcctggtcactgcggggaccgcagctggacagcagggatccccctcaagccgggttccaggagttagggtctccccaggaaaggagattgcgctcttcctagcccggacccagggaatcccgtgccccgcccgcagggcccaggcgccgcgccctctccgcgctccagcctaccgcagccccaccaccccgttccccgatcggctccggactccgcgggcagcgggcgcccctcggggtccgcgcagggaccgccacagctcggctcagtgcagtcggtgcgctctgcccccgtcccaggctcactgtgagcctctagctccccccgtagcagcttctgggcgcgcagggtccgcaccgcgtgtctcaggacacaacagtggatacgtgggagggcgggcgggggcctggggtacgcggacgtccggagcggccaactcggcctctgggcctctgccctccgggacaggcgctgagtgggagcggccacagcgtggctcgcgtcctctccggatccccggcccttactcgcatgccttgactttgtgcctctctgttctatgcaggaaaagccgtggaaacacacccggattgaaatgcccctggcccgcctgacccgaccctaggagaagcagccgagttacccgacatcgtggtcagcaggagctgggtcggtggctggatgctgcagcagcagggactcagcgcctgggagggctcctggggcagggagagaagcagagatgcaacatttttaaaatttcacaaagcatccggctgcacccaggtccctggaacaggagacaaacagaattaatgttttataccttcgggtataggtttgagttttttccccctcatgccaagtatttaaaacctctagaaacccatgatttgacaatcaatgattgcgcgatactttcaatttgaatattcaaaggcttaacaaaatggactatcttctgcagaaatcctgcacacaggcaccccacagagagtccagagaaacagggagtgagacccctttgggtcctggcccttgcttttattatagtttgagcattttgtcctccttcccacagatagagcagatgtcctcaaagatgctctgtatttcagccttcagggcagctaagaagccatgagtgacttaggctgccctggccatgaacaccggagccagactggctggccagactgattcccgcatcccccatctgtgttttgaggggaaatctcaggttttgaggaatgaacatggcagctagtgggtgtggcacagcaagaagtcgctctgggcccaggtggcaggccagcggcctagcagaggccttcgctctgcacctcctatttttctggctccgcctggctaccagcgggcttccctccccctttcatcccgctcttcctgggcccgacactggggtttctgctcagaatgactgcccattaagaccctttcctcctccccacagagctggggatgccaggagcctcatcctctggagactttctgactctgggtttcaccaccgcactgcgaagtgccctctttgctttttcgccttctagagccacccctgcctttttgctgtaggagcacatgttaggaaacaatgacaagtttggctcctgctcattttaactgaaaggatgtggacttaggttcaagccttctcccattggggtgagaagggggagggacttgggatcaggcttcccccttggtccaggcccaagcccctcactaatgacttgggattctactgggtcatcttctgtgagtacttactgtgcctcttccatgtgatttggaaggtgaggagacaggaatggtccacagagggagagagtgccaggccaagtcctctcatagccacccgccccctccacagaaggggacagcaagagaagagagaggcatggtgaggttccttttgcaaataaccaagatatttccaggattcaagaccagtccatgg

SEQ ID NO: 914538 - DNA, 4001 bp, Homo sapiens
gggctcccccaaatcctgagccccacaacatgccccagctgtcctctgtagcttcccgattgggatgcagctgggtacagaagtcataggaacagcagaggaaggccaggtctgggaatggtgagtgcgtggggccttgagtggcctccacaccttgcagacacagctttgaaagaggcctggcatgggctggggaatgagggaagggcttatgcttacggttcccccggaggccgcctggtgtgcccgtctttgctgcagcagctccttcactgtgatcttcactcggacaccttgatacaccttcggtttttctggagaaaggcaactgagtcagtggtcgagtccaaggtctgggtgccagggtgcagagtgggggccccttttataggctatggcacccaaagccaagtttctaagttcggagaacacacacaaaaaatgtcaaaggatggtaaaaacccaaacatttcaaacttgaaagaatgaagagtagctgagcaggtttcagagccccagtaggaaaagaatccgtggaaatttgtggggccatccacccctggctgggcctcagtcctaggccaatagcaaacgggtttttctgctctggaatatggagaccagtgcagcggagcccaccactctgattaggtcgggggaaccttggctttcagacccagacagccgagagagagggtattatggacctggggaggggccaggcctggggcagggggctttctctgattatggcggctgacgtagcccaccccactgtgatgttcccactagcatggaagtcccgagtcccttccttctccgcctggccaggtgtggcttctgggcaggctccgacctctgcgtgcccttggtctggaagccagcccgggagcaagcggtgaggtttggccagccccgtcctgggccggcgaggtacctgccagactgacctagtaaaggggccaggcccgaggaactccctccctcgctcccttctgtctttgccttctgcccgctctccctcgtcccttttctccgccttttccgcgctccatcttgccctcctccctccttcgcccccgctcctactctccccttcttcccctctctccctaccccctccctttctggggcaggcgtttctccgaggcgcactgaggctccggggcgagtccgcgcagcgcgagctggggaaagccgtccggggctcccgatgaccctgcactccgccgggaggccgcccttcggtaggggccgccccggggctggcggggcccggtcggactgccccggctcgcgggaggtggcgggcgcgctcaagaggggttcgctgggagggacccctgagcgctgggagcaggggcagcctcagccccgggccccgaaaagccgcagtgagtaggttggggactggctgttaggccaagccgagccgggcgagctttcaaggtggaggtggccgcaggagtccggggcggctccggccctgaccactaccctgcagtgtgcgtccaggaatcgcgccgggaagtgcgctgggtgcggcggccgagggtgaccgcgcgttcagcctggacgcctggagatagtgccaggatgccagcgcctcgcctggtcactgcggggaccgcagctggacagcagggatccccctcaagccgggttccaggagttagggtctccccaggaaaggagattgcgctcttcctagcccggacccagggaatcccgtgccccgcccgcagggcccaggcgccgcgccctctccgcgctccagcctaccgcagccccaccaccccgttccccgatcggctccggactccgcgggcagcgggcgcccctcggggtccgcgcagggaccgccacagctcggctcagtgcagtcggtgcgctctgcccccgtcccaggctcactgtgagcctctagctccccccgtagcagcttctgggcgcgcagggtccgcaccgcgtgtctcaggacacaacagtggatacgtgggagggcgggcgggggcctggggtacgcggacgtccggagcggccaactcggcctctgggcctctgccctccgggacaggcgctgagtgggagcggccacagcgtggctcgcgtcctctccggatccccggcccttactcgcatgccttgactttgtgcctctctgttctatgcaggaaaagccgtggaaacacacccggattgaaatgcccctggcccgcctgacccgaccctaggagaagcagccgagttacccgacatcgtggtcagcaggagctgggtcggtggctggatgctgcagcagcagggactcagcgcctgggagggctcctggggcagggagagaagcagagatgcaacatttttaaaatttcacaaagcatccggctgcacccaggtccctggaacaggagacaaacagaattaatgttttataccttcgggtataggtttgagttttttccccctcatgccaagtatttaaaacctctagaaacccatgatttgacaatcaatgattgcgcgatactttcaatttgaatattcaaaggcttaacaaaatggactatcttctgcagaaatcctgcacacaggcaccccacagagagtccagagaaacagggagtgagacccctttgggtcctggcccttgcttttattatagtttgagcattttgtcctccttcccacagatagagcagatgtcctcaaagatgctctgtatttcagccttcagggcagctaagaagccatgagtgacttaggctgccctggccatgaacaccggagccagactggctggccagactgattcccgcatcccccatctgtgttttgaggggaaatctcaggttttgaggaatgaacatggcagctagtgggtgtggcacagcaagaagtcgctctgggcccaggtggcaggccagcggcctagcagaggccttcgctctgcacctcctatttttctggctccgcctggctaccagcgggcttccctccccctttcatcccgctcttcctgggcccgacactggggtttctgctcagaatgactgcccattaagaccctttcctcctccccacagagctggggatgccaggagcctcatcctctggagactttctgactctgggtttcaccaccgcactgcgaagtgccctctttgctttttcgccttctagagccacccctgcctttttgctgtaggagcacatgttaggaaacaatgacaagtttggctcctgctcattttaactgaaaggatgtggacttaggttcaagccttctcccattggggtgagaagggggagggacttgggatcaggcttcccccttggtccaggcccaagcccctcactaatgacttgggattctactgggtcatcttctgtgagtacttactgtgcctcttccatgtgatttggaaggtgaggagacaggaatggtccacagagggagagagtgccaggccaagtcctctcatagccacccgccccctccacagaaggggacagcaagagaagagagaggcatggtgaggttccttttgcaaataaccaagatatttccaggattcaagaccagtccatggttttaggcctctgctgtttattctctgagttctcagaaatgcaaaaagtgtagtttagccccagaggcctcaagaaaaagattggggtgcccccaaatgtgtcaaatacagagggaaacacacagagcttagggaaagggcaactgagaatgacaagactgataggaattgcttggcagctgaagccacatctctgggggagaggagcaggcctgggaacacctgaggtggcacctggcagtggagggcaggatggatgtattgaaatctgacagcttctggaacttctttctacaaatgcccctgagcctgtgtcctaggtttccctgatggaccagacctgaggaggggaaggacaatgggggtggagatggcacctcccctccctgcatgccttcttcctcgctgtgc

SEQ ID NO: 914539 - DNA, 4001 bp, Homo sapiens
ttgatacaccttcggtttttctggagaaaggcaactgagtcagtggtcgagtccaaggtctgggtgccagggtgcagagtgggggccccttttataggctatggcacccaaagccaagtttctaagttcggagaacacacacaaaaaatgtcaaaggatggtaaaaacccaaacatttcaaacttgaaagaatgaagagtagctgagcaggtttcagagccccagtaggaaaagaatccgtggaaatttgtggggccatccacccctggctgggcctcagtcctaggccaatagcaaacgggtttttctgctctggaatatggagaccagtgcagcggagcccaccactctgattaggtcgggggaaccttggctttcagacccagacagccgagagagagggtattatggacctggggaggggccaggcctggggcagggggctttctctgattatggcggctgacgtagcccaccccactgtgatgttcccactagcatggaagtcccgagtcccttccttctccgcctggccaggtgtggcttctgggcaggctccgacctctgcgtgcccttggtctggaagccagcccgggagcaagcggtgaggtttggccagccccgtcctgggccggcgaggtacctgccagactgacctagtaaaggggccaggcccgaggaactccctccctcgctcccttctgtctttgccttctgcccgctctccctcgtcccttttctccgccttttccgcgctccatcttgccctcctccctccttcgcccccgctcctactctccccttcttcccctctctccctaccccctccctttctggggcaggcgtttctccgaggcgcactgaggctccggggcgagtccgcgcagcgcgagctggggaaagccgtccggggctcccgatgaccctgcactccgccgggaggccgcccttcggtaggggccgccccggggctggcggggcccggtcggactgccccggctcgcgggaggtggcgggcgcgctcaagaggggttcgctgggagggacccctgagcgctgggagcaggggcagcctcagccccgggccccgaaaagccgcagtgagtaggttggggactggctgttaggccaagccgagccgggcgagctttcaaggtggaggtggccgcaggagtccggggcggctccggccctgaccactaccctgcagtgtgcgtccaggaatcgcgccgggaagtgcgctgggtgcggcggccgagggtgaccgcgcgttcagcctggacgcctggagatagtgccaggatgccagcgcctcgcctggtcactgcggggaccgcagctggacagcagggatccccctcaagccgggttccaggagttagggtctccccaggaaaggagattgcgctcttcctagcccggacccagggaatcccgtgccccgcccgcagggcccaggcgccgcgccctctccgcgctccagcctaccgcagccccaccaccccgttccccgatcggctccggactccgcgggcagcgggcgcccctcggggtccgcgcagggaccgccacagctcggctcagtgcagtcggtgcgctctgcccccgtcccaggctcactgtgagcctctagctccccccgtagcagcttctgggcgcgcagggtccgcaccgcgtgtctcaggacacaacagtggatacgtgggagggcgggcgggggcctggggtacgcggacgtccggagcggccaactcggcctctgggcctctgccctccgggacaggcgctgagtgggagcggccacagcgtggctcgcgtcctctccggatccccggcccttactcgcatgccttgactttgtgcctctctgttctatgcaggaaaagccgtggaaacacacccggattgaaatgcccctggcccgcctgacccgaccctaggagaagcagccgagttacccgacatcgtggtcagcaggagctgggtcggtggctggatgctgcagcagcagggactcagcgcctgggagggctcctggggcagggagagaagcagagatgcaacatttttaaaatttcacaaagcatccggctgcacccaggtccctggaacaggagacaaacagaattaatgttttataccttcgggtataggtttgagttttttccccctcatgccaagtatttaaaacctctagaaacccatgatttgacaatcaatgattgcgcgatactttcaatttgaatattcaaaggcttaacaaaatggactatcttctgcagaaatcctgcacacaggcaccccacagagagtccagagaaacagggagtgagacccctttgggtcctggcccttgcttttattatagtttgagcattttgtcctccttcccacagatagagcagatgtcctcaaagatgctctgtatttcagccttcagggcagctaagaagccatgagtgacttaggctgccctggccatgaacaccggagccagactggctggccagactgattcccgcatcccccatctgtgttttgaggggaaatctcaggttttgaggaatgaacatggcagctagtgggtgtggcacagcaagaagtcgctctgggcccaggtggcaggccagcggcctagcagaggccttcgctctgcacctcctatttttctggctccgcctggctaccagcgggcttccctccccctttcatcccgctcttcctgggcccgacactggggtttctgctcagaatgactgcccattaagaccctttcctcctccccacagagctggggatgccaggagcctcatcctctggagactttctgactctgggtttcaccaccgcactgcgaagtgccctctttgctttttcgccttctagagccacccctgcctttttgctgtaggagcacatgttaggaaacaatgacaagtttggctcctgctcattttaactgaaaggatgtggacttaggttcaagccttctcccattggggtgagaagggggagggacttgggatcaggcttcccccttggtccaggcccaagcccctcactaatgacttgggattctactgggtcatcttctgtgagtacttactgtgcctcttccatgtgatttggaaggtgaggagacaggaatggtccacagagggagagagtgccaggccaagtcctctcatagccacccgccccctccacagaaggggacagcaagagaagagagaggcatggtgaggttccttttgcaaataaccaagatatttccaggattcaagaccagtccatggttttaggcctctgctgtttattctctgagttctcagaaatgcaaaaagtgtagtttagccccagaggcctcaagaaaaagattggggtgcccccaaatgtgtcaaatacagagggaaacacacagagcttagggaaagggcaactgagaatgacaagactgataggaattgcttggcagctgaagccacatctctgggggagaggagcaggcctgggaacacctgaggtggcacctggcagtggagggcaggatggatgtattgaaatctgacagcttctggaacttctttctacaaatgcccctgagcctgtgtcctaggtttccctgatggaccagacctgaggaggggaaggacaatgggggtggagatggcacctcccctccctgcatgccttcttcctcgctgtgcctaggccttgccccctctgaaggaacagtgaaccaagcagcttggaatctagggatggtctcttgtcctcatagcgtcttccattacttcttttcttcgctgctctcctcctttttgttatactcttattttttgatttgcttttaaaaaccttctttgttgcatttttgtttatttctttctgtgtttctttgtctctcttcctgtcattgctttcttccatttcttatctgtactactggttttctccctggcttcacgtgtctctgtgttcccctatgctggggtgtcctc

SEQ ID NO: 914540 - DNA, 4001 bp, Homo sapiens
atacatactatacataatagtatatatactatattatgtatagttccgcagaatcctgcagaactgagggaaactgagtaaaggataaatgggatctctctatattatttcttacaactacatatggatttataattatctcataataaaaagtctaagtatttttttaaaaaaagaaaagaaagtacacaggacagtagcaatgaaaatcaatgaactactgctacataatggtgagcaaaagaagccaggcataaaaaaaaagtatatgctgtattattccatttatgttaagttcaaacatgggcaatattaaatgaattgtatcagaagcaaacatagaggttaccattggggaagaaagtgaggaagcaaagaaagggcgaaagggggacttctggggtactggtaacatttcattttttgactttggtggtggttacattggtgtgtaataaatcatttaactgtaaatgtatggtttatgcacttttctgtatgtatactacacactaatcttttaaagtttttaaaagaaaagagtgcataagaccaacaggtataggggcgggggtaggtacagagcagccaaaatgaaggtgaaaaggcactgggttgggagctgagagccctagattgccagtcccagctctgttacttcatttattaattcatttaacagctatttactgagcacgtgctgtgtgccaggtattattgttctacttattgggcattaacacttgtgaacaaaagagtagatccccttaggagtggagaatgctaatgaacactgagaaggcaattaaaaaataaataagtaaaacaaaacagagactattacatggaccgatgatgatgatgtgccataaattgaggagagtaactcaaccctcttcacctggtgtttaaaaaaaaaaaaaaagagagaggaagaaaggaaaggtccctgatggatcttacattcttatgagacagacggacaacgggcaaatagctagcgacaagttctacgaaggaaaataaagctgccctttctcctacagggcaaatcataagttaaataattccggccaggcgcggtggctcacgcctgtaatcccaacactttggaaggcggaggcgagtggatcacgcggtcaggagttcaagaccagcctggccaagatgttgaaaccccgtctctactaaaaatacataaatttgccaggcttggtggcgggcgcctgtaatcccagctactcggaaggctgaggcatagaattgcttgaactcggggggcggaggttgcagtgagccgagattgcgccactgctctccagcctggacaacagagctagactccgtctcaaataataataatacttcatttgagctttacaaagccctatgaagtaggtccctttcaacctcacaacttttcaaatgattatcaggagtatgtcctgcccctttcgcaggtcaaagagagtagggaaaatctggacctcaagggaacattgaacgcacaggtcattcggagggctgggcagacgcagtaggagataatttcttaattgtgcaatgcaggaggggctacgggatgaaatggggaactgacaacgtgggtctagcaattaccacttcaatgcaccaataccgaaaaccaatcccaaagactaatagcaggaggttgtactgcgccttcatgcccattattttatttttttttatcttacgttcctgtcaaaacgatattttgttcttactttttaaaagctcagaaagacgcaacgatttgcctgggatcacacagagaacaagcagcagagttgtggctccaaaccagggtcaatttgttcccaattcctgctccgtctaaagtctcggagacaaagggccacctcacgctgtccccaccccttcgacttaccttgagcaggctctggagtgctgcaaaatgctccgctgtcagggcagccatcttgccgaagtcacatgaccgtggcacccagggaagcgaggtcacgtggctgtcgctgttgtcgcggggcctgccgggggctgtagtccttcagagtgggggaaggcgtttcggttgtggtgctgcggcagtgagcgcggatcaagacggacgcggcggctggatgactaaaccccgagactctagaaccaaaggactagggggaccagggcggaggatggtttactcggggaggaaattggcttgacttgtctacttaccaagtcagggaaacaggttttcccttgacccatgtgggtgggctggcgcacttggggaatgcacctgcaagcttggcaggcgccttggaaacgtagttgttcaggagtgatcggcgtaccagtgtttggaatgaaaatgaggctgtgcatatcgggcttcttggaattgacacacacacatgcacacatcctgtcttgaatgtaaaattacttctgcgtatatagtttttcagcctatgtagtaggttggagctggtattattagtattatccagattgggaaataatcatttagggtttttagtaactttcccatagtcatagagaagatctgattacaagagcaggtgaggaagtgtttgggagaggggacaagagaggaatggaatgaaagctactacctagctaggttcttgttatacgggggtgagatgggggaggaggttaatggaaatgatttagttcatttattcaaaaaggtaattataatgaatataattgtaaagagtgattttgcactggcagtactggactctgatttgccctgttctcagagaccgtacatcaaaacagacatttcctttatctacctttagtatttgggtggctcttttcttttcctaccctccacttttttttaagcaaattccagctcaaaaaatgggttctgatatattcgagcttaagaaagaatgcccatttgtgaaattccagaaattggtaagctgctaaggacatttgttcctttgtctcctctcctcccccttccccttccccgactccattttctgtggggatgttgtcaaggcccaggaaaccaaaaatcaaattgtctaaggaggaacccattcctggattagaagattttagaaccattttgtcacagggtcctgattctagctctctttcttggcctctcttttccatgaaccctcatggcctgattcctggtttctgttataactcaatgtaggttctaggtttaactcctgcctgtatctatagggctgggcccattgtcttgggttaattgaatatttgttaaataaacaaccacccaaaaaagtgattagactaagatgaaattttgtgacttatttgaggatattgccttggtatttgcaggattgtgccttcttgtcttactttagagtaatgaggagtgtggtcaccagccttcaagatggccctcaatgatcccagcctcctggtgttcacaacctagtgtagacacctcccaccatgtaccaggattggtatgcatgaccaatagcaaatggtgggtgtgaatggcatatcacttctgagattaggttatacaagactgcaccaaaaaactaacaaaaagactgaagttcctgtctcctggcttgggtgctctctcatgtgccctgctctctttcacttgaatcctttgctctggggaaagcaaactgccatgttgtaaacagtcctacagagaggcctaggtgacaaggaactgaagcatctggccaacaacttcattactgacctgagaagcagattgtctaggcccagtagagccttaagaaggcaggagtcttggccaacagcttaactgcaacctcatgagagattctgagccagcaccacccagcgaagccacgcctggatttctggccttcaaacactattaagattatcaatgtttgttgttttaagctatgaagctttgaagtaatttgttatacagcaatagtaactaatgcatggtggcagcaaagcataggggttttagaattcaacctgagttggaa

SEQ ID NO: 914541 - DNA, 4001 bp, Homo sapiens
atggatggaactggaggtcattatgttacatgaaataagtcaggcatagaaagacaaacttcacatgttctcacttatttgtggaagctaaaaatcaaaacaaactcacggagacagagtaaaaggatggttatcagaggtgggaagggtagtggtagggaagtggagatggttaatgggtacagaaaaaatgagttagacccgatatttgatagcacacagggtaactacagtcaataataatttaattggacatttaaaaataactgaaagtgtaactggattgtcacacagaagacaaatgcttgaagggatggatactccatttttccatgtgataattatgtattgcatgcctgtatcaaagcatttcatgtaccccataaatatatacatctactgtgtacccccaaaaattaaacattacaaaaagttcagaaatatagttgttttcttatttgcaaaaatgcataaaaaatgaaaaggtaaacttttctggaaaatacatgtttattccagtgttcacctaattgtttgggtgggtaatccaaagaacaaagttcttttggttttacaagctaagtaacatgaagttaagtgcacgatggaattaagatattccaatacacatcctcaacctgttgcctagagaaaataatcagccacattaatatattgaagtctacaaaaattatgacattttgaggaatatctaaactattacaatttctttaggtttactaagataaactgagatgttctatttcaaacaaccaatatttaaagaagttcgcatttttaataaaaggtctatcgaagagatcctagaaaaactttagacaaaaattaagcatttctaattataaaggaatatgaaatatgagttttttatttttgttttttcttttttcatttcattctcaaaataatatcgaagtttacctagatcattttttaagctaatttcagatggtggttctgaatccattggcacgttaattaacgtgtagcatacgttctcagccgccgtcatggtttctggttatattataaccaatccttgacacaagatttaaggatgccagaaaatctagaaaaataaacacagacatatcattacaaattaaaaaaaaaaaacccacaaacaagtacctatagtgaccttttaaagtattagaaagggcaggtcaatctatatcgtgttcccataaaaataaattctagtaaaaaccacattatcagctctggcataaggtatattatctatcactccctcatcgcatcccggtccagtgtttgagaatgctgtatagccgaatgaaggcccacagaacagtgacagtccccccagccacaccccacaatgttatggaccgtatggtttttacacaacacacaatctgcatgctcaagttaagagaccttgtgcctgaatactctgccaaaaccctaaagcgctttatcgcggtccttggtgggttccgactctatgtccgcgggtcccttaatcaacgcgctgcacccccacctcgccccacccgcttcctcctccccttcctccagcaaagcagccctaggcctgaaagggtacgcctaggggtcttgggagggaaaagacccccggccaatacaaaggacgggatggagcgtccgacccggagcttcctagccctccgcccccaccccgacccgcacccccacccgtacccccacccggtcccttctgccaggcccagacgcaagcggcctagtcgctccccttccgcatcttccagctagaaagccagttcttccgactctgcccgacccaccacgcctctgggactgggggcttgtggcccactaccaggctccgaggggcagtggtttggtgcagccgcggatccgtctactgcggctccgtctactccggctatgaaccgcagcagcggcggcggcggctccagagtccttggctgacgtggaagggggtggggtaacgaccgaagccacagccacctagcacctacggcgactcagagaggacatgctttctttgtgcagcgcttgcgcgctgcaagtatatcctattttcttcctcttctcttgtccagggtttgattaggccgcagagcaatgaaaccacgtattttctagttttccctgcaagccaagctctgagttaagcactatgctaatttaaacgctaactggaaatcgttccttcttcaggaacagtcaaggggagaaagtgcttggagagagggaaacttttacagggctctgttcccgtgaaaaagagctctggactagaaagtggaaacccagtaatcctttttcttgtccacaccctaataaactgggaaagtaactaatactattgggaaggtaattcagttattttattaattatcactagattaaaatccatttcagttcttaacatcgctagtagtttgaatctgcctctctgcaggtagggctggagttatttgaaaatccaaagtcacattggtataatttctgctttttatttaataatggcctctttccgtgatcctttctgagcacccagtagattagaaaaaatttttatgcataaagggagacagtcactgttttaaaggattttacgtatctccaaagacctgttacagctgcaatcagccatagtactttcggttttgcccatttgaagttccatagcacgccccgcccctacacctccctctgcccacaaaagggttttatggccaattattaataacaaaatatcttaaagcttaagcaaaatactgcgaataaaaacagatctgacggcaactgccctagttaacaggttcatctcaggaagatggaacaccaatagtacctcatttatgtaggatctagctcttttgagctttctctttttagaaccatcaagcaatctacaaattctttgagcacccaaaattgtattcaaaggccatgtgttgacagcactttaagagtgcctctctgattctgtgcattcattttttttaatatttaatcttaatggtagagtgacatgaatacagagatcccatatactctttacctagtttctcccaatggtaacatcttgcatagttatagtacaatatcaatttcaggaaattgacagacataattcacccagccttgttcagacttcactagttttacatgtactcgtttttatattcacttgtagacaattttatcatgcttatatgtgtgtaatcaccaacacagtcgagacagaacagttctatcacaaggattctcatgctgtcctttgatagccatagccacctcccacactaacctgtggcaaccactaataattctctatgatttttatcatctcaatgttatataaatggaattatacaatgtaatcttttgagattggatttttttactgagcataattcccctgagatcaatcccgggtgtgtgtacaacagtttgttccttttctgtgtattcgtttttaacatggaagttttacaaatgcagttatctggtttccaagcccacttaacttaccaaaaagtgacaatctgtcagcaagaaatgaggccaaaaaaggtataaaaactagatttacagtaagaaagctcagtttagggccatcatggtgtaggacttaaaccgtacagacttcatttgccccagaggttcattctgttacagaataactttgaggtttctcatgaccccaagtcattaagttctaaatatgaaaaggcaagaaaatgtaatgttttacatattactttagttagatctgaacctacaattgtcattggcagtgcatatatttttccatattcttaagtacaaagctttttgaatgggtataaggaccttaatattaacctcattaactcttcctgatctgttgtaaaatacactttgtttgggctgttttactctaagatgtaattatataattttgaatgcctttaaattataaatgcagagcaaagaccttgtcattttatcaaggacca

SEQ ID NO: 914542 - DNA, 4001 bp, Homo sapiens
aatgagatcttgtcatttgcaaaaatatggatggaactggaggtcattatgttacatgaaataagtcaggcatagaaagacaaacttcacatgttctcacttatttgtggaagctaaaaatcaaaacaaactcacggagacagagtaaaaggatggttatcagaggtgggaagggtagtggtagggaagtggagatggttaatgggtacagaaaaaatgagttagacccgatatttgatagcacacagggtaactacagtcaataataatttaattggacatttaaaaataactgaaagtgtaactggattgtcacacagaagacaaatgcttgaagggatggatactccatttttccatgtgataattatgtattgcatgcctgtatcaaagcatttcatgtaccccataaatatatacatctactgtgtacccccaaaaattaaacattacaaaaagttcagaaatatagttgttttcttatttgcaaaaatgcataaaaaatgaaaaggtaaacttttctggaaaatacatgtttattccagtgttcacctaattgtttgggtgggtaatccaaagaacaaagttcttttggttttacaagctaagtaacatgaagttaagtgcacgatggaattaagatattccaatacacatcctcaacctgttgcctagagaaaataatcagccacattaatatattgaagtctacaaaaattatgacattttgaggaatatctaaactattacaatttctttaggtttactaagataaactgagatgttctatttcaaacaaccaatatttaaagaagttcgcatttttaataaaaggtctatcgaagagatcctagaaaaactttagacaaaaattaagcatttctaattataaaggaatatgaaatatgagttttttatttttgttttttcttttttcatttcattctcaaaataatatcgaagtttacctagatcattttttaagctaatttcagatggtggttctgaatccattggcacgttaattaacgtgtagcatacgttctcagccgccgtcatggtttctggttatattataaccaatccttgacacaagatttaaggatgccagaaaatctagaaaaataaacacagacatatcattacaaattaaaaaaaaaaaacccacaaacaagtacctatagtgaccttttaaagtattagaaagggcaggtcaatctatatcgtgttcccataaaaataaattctagtaaaaaccacattatcagctctggcataaggtatattatctatcactccctcatcgcatcccggtccagtgtttgagaatgctgtatagccgaatgaaggcccacagaacagtgacagtccccccagccacaccccacaatgttatggaccgtatggtttttacacaacacacaatctgcatgctcaagttaagagaccttgtgcctgaatactctgccaaaaccctaaagcgctttatcgcggtccttggtgggttccgactctatgtccgcgggtcccttaatcaacgcgctgcacccccacctcgccccacccgcttcctcctccccttcctccagcaaagcagccctaggcctgaaagggtacgcctaggggtcttgggagggaaaagacccccggccaatacaaaggacgggatggagcgtccgacccggagcttcctagccctccgcccccaccccgacccgcacccccacccgtacccccacccggtcccttctgccaggcccagacgcaagcggcctagtcgctccccttccgcatcttccagctagaaagccagttcttccgactctgcccgacccaccacgcctctgggactgggggcttgtggcccactaccaggctccgaggggcagtggtttggtgcagccgcggatccgtctactgcggctccgtctactccggctatgaaccgcagcagcggcggcggcggctccagagtccttggctgacgtggaagggggtggggtaacgaccgaagccacagccacctagcacctacggcgactcagagaggacatgctttctttgtgcagcgcttgcgcgctgcaagtatatcctattttcttcctcttctcttgtccagggtttgattaggccgcagagcaatgaaaccacgtattttctagttttccctgcaagccaagctctgagttaagcactatgctaatttaaacgctaactggaaatcgttccttcttcaggaacagtcaaggggagaaagtgcttggagagagggaaacttttacagggctctgttcccgtgaaaaagagctctggactagaaagtggaaacccagtaatcctttttcttgtccacaccctaataaactgggaaagtaactaatactattgggaaggtaattcagttattttattaattatcactagattaaaatccatttcagttcttaacatcgctagtagtttgaatctgcctctctgcaggtagggctggagttatttgaaaatccaaagtcacattggtataatttctgctttttatttaataatggcctctttccgtgatcctttctgagcacccagtagattagaaaaaatttttatgcataaagggagacagtcactgttttaaaggattttacgtatctccaaagacctgttacagctgcaatcagccatagtactttcggttttgcccatttgaagttccatagcacgccccgcccctacacctccctctgcccacaaaagggttttatggccaattattaataacaaaatatcttaaagcttaagcaaaatactgcgaataaaaacagatctgacggcaactgccctagttaacaggttcatctcaggaagatggaacaccaatagtacctcatttatgtaggatctagctcttttgagctttctctttttagaaccatcaagcaatctacaaattctttgagcacccaaaattgtattcaaaggccatgtgttgacagcactttaagagtgcctctctgattctgtgcattcattttttttaatatttaatcttaatggtagagtgacatgaatacagagatcccatatactctttacctagtttctcccaatggtaacatcttgcatagttatagtacaatatcaatttcaggaaattgacagacataattcacccagccttgttcagacttcactagttttacatgtactcgtttttatattcacttgtagacaattttatcatgcttatatgtgtgtaatcaccaacacagtcgagacagaacagttctatcacaaggattctcatgctgtcctttgatagccatagccacctcccacactaacctgtggcaaccactaataattctctatgatttttatcatctcaatgttatataaatggaattatacaatgtaatcttttgagattggatttttttactgagcataattcccctgagatcaatcccgggtgtgtgtacaacagtttgttccttttctgtgtattcgtttttaacatggaagttttacaaatgcagttatctggtttccaagcccacttaacttaccaaaaagtgacaatctgtcagcaagaaatgaggccaaaaaaggtataaaaactagatttacagtaagaaagctcagtttagggccatcatggtgtaggacttaaaccgtacagacttcatttgccccagaggttcattctgttacagaataactttgaggtttctcatgaccccaagtcattaagttctaaatatgaaaaggcaagaaaatgtaatgttttacatattactttagttagatctgaacctacaattgtcattggcagtgcatatatttttccatattcttaagtacaaagctttttgaatgggtataaggaccttaatattaacctcattaactcttcctgatctgttgtaaaatacactttgtttgggctgttttactctaagatgtaattatataattttgaatgcctttaaattataaatgcagagcaa

SEQ ID NO: 914543 - DNA, 4001 bp, Homo sapiens
cataaaaaaagaatgagatcttgtcatttgcaaaaatatggatggaactggaggtcattatgttacatgaaataagtcaggcatagaaagacaaacttcacatgttctcacttatttgtggaagctaaaaatcaaaacaaactcacggagacagagtaaaaggatggttatcagaggtgggaagggtagtggtagggaagtggagatggttaatgggtacagaaaaaatgagttagacccgatatttgatagcacacagggtaactacagtcaataataatttaattggacatttaaaaataactgaaagtgtaactggattgtcacacagaagacaaatgcttgaagggatggatactccatttttccatgtgataattatgtattgcatgcctgtatcaaagcatttcatgtaccccataaatatatacatctactgtgtacccccaaaaattaaacattacaaaaagttcagaaatatagttgttttcttatttgcaaaaatgcataaaaaatgaaaaggtaaacttttctggaaaatacatgtttattccagtgttcacctaattgtttgggtgggtaatccaaagaacaaagttcttttggttttacaagctaagtaacatgaagttaagtgcacgatggaattaagatattccaatacacatcctcaacctgttgcctagagaaaataatcagccacattaatatattgaagtctacaaaaattatgacattttgaggaatatctaaactattacaatttctttaggtttactaagataaactgagatgttctatttcaaacaaccaatatttaaagaagttcgcatttttaataaaaggtctatcgaagagatcctagaaaaactttagacaaaaattaagcatttctaattataaaggaatatgaaatatgagttttttatttttgttttttcttttttcatttcattctcaaaataatatcgaagtttacctagatcattttttaagctaatttcagatggtggttctgaatccattggcacgttaattaacgtgtagcatacgttctcagccgccgtcatggtttctggttatattataaccaatccttgacacaagatttaaggatgccagaaaatctagaaaaataaacacagacatatcattacaaattaaaaaaaaaaaacccacaaacaagtacctatagtgaccttttaaagtattagaaagggcaggtcaatctatatcgtgttcccataaaaataaattctagtaaaaaccacattatcagctctggcataaggtatattatctatcactccctcatcgcatcccggtccagtgtttgagaatgctgtatagccgaatgaaggcccacagaacagtgacagtccccccagccacaccccacaatgttatggaccgtatggtttttacacaacacacaatctgcatgctcaagttaagagaccttgtgcctgaatactctgccaaaaccctaaagcgctttatcgcggtccttggtgggttccgactctatgtccgcgggtcccttaatcaacgcgctgcacccccacctcgccccacccgcttcctcctccccttcctccagcaaagcagccctaggcctgaaagggtacgcctaggggtcttgggagggaaaagacccccggccaatacaaaggacgggatggagcgtccgacccggagcttcctagccctccgcccccaccccgacccgcacccccacccgtacccccacccggtcccttctgccaggcccagacgcaagcggcctagtcgctccccttccgcatcttccagctagaaagccagttcttccgactctgcccgacccaccacgcctctgggactgggggcttgtggcccactaccaggctccgaggggcagtggtttggtgcagccgcggatccgtctactgcggctccgtctactccggctatgaaccgcagcagcggcggcggcggctccagagtccttggctgacgtggaagggggtggggtaacgaccgaagccacagccacctagcacctacggcgactcagagaggacatgctttctttgtgcagcgcttgcgcgctgcaagtatatcctattttcttcctcttctcttgtccagggtttgattaggccgcagagcaatgaaaccacgtattttctagttttccctgcaagccaagctctgagttaagcactatgctaatttaaacgctaactggaaatcgttccttcttcaggaacagtcaaggggagaaagtgcttggagagagggaaacttttacagggctctgttcccgtgaaaaagagctctggactagaaagtggaaacccagtaatcctttttcttgtccacaccctaataaactgggaaagtaactaatactattgggaaggtaattcagttattttattaattatcactagattaaaatccatttcagttcttaacatcgctagtagtttgaatctgcctctctgcaggtagggctggagttatttgaaaatccaaagtcacattggtataatttctgctttttatttaataatggcctctttccgtgatcctttctgagcacccagtagattagaaaaaatttttatgcataaagggagacagtcactgttttaaaggattttacgtatctccaaagacctgttacagctgcaatcagccatagtactttcggttttgcccatttgaagttccatagcacgccccgcccctacacctccctctgcccacaaaagggttttatggccaattattaataacaaaatatcttaaagcttaagcaaaatactgcgaataaaaacagatctgacggcaactgccctagttaacaggttcatctcaggaagatggaacaccaatagtacctcatttatgtaggatctagctcttttgagctttctctttttagaaccatcaagcaatctacaaattctttgagcacccaaaattgtattcaaaggccatgtgttgacagcactttaagagtgcctctctgattctgtgcattcattttttttaatatttaatcttaatggtagagtgacatgaatacagagatcccatatactctttacctagtttctcccaatggtaacatcttgcatagttatagtacaatatcaatttcaggaaattgacagacataattcacccagccttgttcagacttcactagttttacatgtactcgtttttatattcacttgtagacaattttatcatgcttatatgtgtgtaatcaccaacacagtcgagacagaacagttctatcacaaggattctcatgctgtcctttgatagccatagccacctcccacactaacctgtggcaaccactaataattctctatgatttttatcatctcaatgttatataaatggaattatacaatgtaatcttttgagattggatttttttactgagcataattcccctgagatcaatcccgggtgtgtgtacaacagtttgttccttttctgtgtattcgtttttaacatggaagttttacaaatgcagttatctggtttccaagcccacttaacttaccaaaaagtgacaatctgtcagcaagaaatgaggccaaaaaaggtataaaaactagatttacagtaagaaagctcagtttagggccatcatggtgtaggacttaaaccgtacagacttcatttgccccagaggttcattctgttacagaataactttgaggtttctcatgaccccaagtcattaagttctaaatatgaaaaggcaagaaaatgtaatgttttacatattactttagttagatctgaacctacaattgtcattggcagtgcatatatttttccatattcttaagtacaaagctttttgaatgggtataaggaccttaatattaacctcattaactcttcctgatctgttgtaaaatacactttgtttgggctgttttactctaagatgtaattatataattttgaatgcctttaaattataa

SEQ ID NO: 914544 - DNA, 4001 bp, Homo sapiens
gtcagcggggaggtcagcccgttctctgggatctgccacacctgtggtagggacagggccaccgagctcagtcctctgctggtcctattgctggcccccttcggccacacccacgaccctggcccagccagtcctgtgcctcaccatgaccgtgcagtcctccgagccgctggctatgacttcgtcgttgtgaggacaccagtcgatgtccaggacaggtcccgtgtgcccacacaccgtcgggtaggccttgtcaatgcggcccgtctgtgggcacgagggggcagtcagtgggctccatccctcccgaagccttggtcttcccctccatggagtgggaatgacatgcacgtcccggctcacaggtggcccagatgtgactgtgccccacttgccaggtgagcaggaaatgtttgctgcctctaaccctgcctctatggcaacaggctactttccatctgtgctaacacttggggcgataaatctgggttataacacctgcccagcagtgtgagaaacggcaagatgagggattcaaggtgtgcagaaaggcccagtaggggtggccgaggtgcctcctcttcccccaaccctgacaggacccaccttgcttagggggagcaccagaaaggcaccccctccactggcctccacaatcaccgccaggaacttggggttgacggcgcagaaggtgctgtcccaggtaacacgggacacgcgaatgtcctcatagcactggtcgttcttgaccggctgcccgaacacatgccggaatttgctctgccggaccactttgcggaaggacatgtctgcgggacagagaggcctgggtcagtccggcccatcccaacaactccagccctccccaggctgctgaaggtgagccgggaggatgcaaccgggggccaggccaccgtaaccctcctgggtctcggtttacccagttacagaatggggtcacaggtgcagagcctggccgcctgtcaccccgcaggcagtgatctgagaggtaaatgctccggccctgaccactgctgagtcctgaggggctttgcaggacgcagggcccctccctggctctggtgtgtgtcgggggcaggaggtgggaggtgccggggttggagagctctcagctctactgtaggtcccagccagtcgggagcagcctccttcctgctcccagagatttggaggctaggtaatggggaagaaggagagaggaagcaggaaaagtctctctactgtggggccgagtgagtgcccagttctgagtcccagggaatgtccagggagccccggcatggcccccaggaagggacggggtcgggacgcagctgtgggccgcgaagcaacccagagcggcctcgaatcggggtccagggtgaaccaggagcccaacttccagggacctccgcccaggagaggagaggctgggcggccaaggggagtgggactgagtggggtagaggggaggcgaaaggctcctgggacccgcgatcccccctcagccccctcagcccggcccctgcagccccgcccagcccccagcccgcgcccctagccccggccctgccgcgctcaccgggggcaccgggggcgcagggggctgcggcaccggcttcgggcggctccggatcccggcctctgggaagcaggaagcaggattcaggaagtgacagagggacccggagcgggggcggggcaggggctcgcgggggcggggccgaggtcacgcgcggaggggctgggcgggaggctgagcggcgccggggggccgggagcggggccgccggggacggggccagagagagcccctttcctaggacccggtggagcgcccccaccgcagctcctccggaagaagggggcggggcggggcagggccgacggcggccgccgcagaggcgccgcaggtgcgggtgcagccttacagcggacccgaggccccttcgcgttcttgctcctcataatggcatccgcaggagtctccaggattgggtgaggccccgccttcccggcccccgacggaacgcacacctccaaggggccccattaccgcccccaacaaataaatgtagaatctacacggacagtggatatgttcacgtgactctttttaagttatcaaagttaatgctctttttttttttttttttttttttttgagacggagtttttgtcacccaggctggagtgcagtggcgcgatctcggcccactgcaacctccgccctcccaggttcaagaaattcaccccagtagctgggactacaggcttatactaccacgcccggctaattttttgtatgtttagtagagacggggtttcaccatgttagccaggatggtctcgatttcccgacctcgtgatccgcccgcctcggcctcccaaagtgctgggattacaggcgtgagacaccatgcccggcctaaatttcatgctcttggttaacaatgtaaagaaaacaacagcaggtgttggggtggtttttttttttttttttgaggcaaggtctgtcactaccgggctagaatgtagtgccatgatcatggctcactacaggctcgacctcctaggctcaagggatcctcctgcctcagcctcccaagtagctgggactacagacacacaccaccacgcctggctaatttttcttttactttttgtagagatggggtctcttgctctgtcgcccaggctggtgtgttttttgttttgttttgagatggagtctcgctctgtctcccagcctatagtgcaatggcgcgatctcggctcactgcaacttctgcctcccgtgttcaagcaattctcctgcctcagcctcccaattcgctgggattacaggtgcctgctaccataccctgctattttttttgtatttttagtagagatagggtttcaccatgttggccaggctgctcttgaactcccgggctcaagcaatcctcctgccttagcctcccagagtgctgggattacagttgtgagccaccgtgcccatccagaaaatagcagtgtttatggagcgagtggaagacccaggagtcccatttttcagggtaaacacctgtgcattctgctgagctttcttattacaatttgaaagggggccatggccagtgagtcccttgcaccttgccttcttttctccaccatctccctcgaaggcctggagatccattcacaggcctctctctttctctagccagcgcctgtgacaaggagcccagactggcctctccagacccaccccatcccgttccacaggtggaatgtacccccgttcccttaggccagcggctctggggcaccggctacttcccttattctttccttgagcatccactgccctggctgaccgatggcaccctccctttcccagaaagagatggatggaggacgaagcgggggaagagcagaggtcacaggagccttgtctctggctaaaagaggcccccactgtgtgtctgagggtgacctcgggcttgtctcccatctcattcccattgccacaccccattgaggaaacaggcacagagaggtgcggtgcctgcctgaggtcatccagccggatgcaatccccatcggcttgggtccaaagcccttgcttttcctagtgctctataaaccctggggctagaaggatcatctagatcccacccaccttccttcccaccccgaggcctgggcacatcctgttctctccatctggaagctctttcctcagatcccaaaaaggctcctttccccactcgattcaggtctctggtcagacatcacctcctcctagggctctcctggaccattcctcacccagccactctttggtcttacttgtcctgactgcattgttctttttttgggagacagggtcttgctcagttgcccaggctggagtgcagtggcacggtcctagctcactaccgcctcacactctggggctcagtcctcccgcctcagcctcccaagtagctgggactacaggcacgtaccaccat

SEQ ID NO: 914545 - DNA, 4001 bp, Homo sapiens
gcctggcaggtgagggttgtcagctcgggccgggtgggtggcaggaggccattagctcaccaggctgaggcccactctgcccaccaccctgggacagacgggtctctccaactctgagggcctcagctttcccatttgtcatgtgggccctggaggggctgctgggatgtatggaggggtccgtggggggggggagcacaaaacggggggcggtgcagacctgcactgagcagcacgtttcgggccgtggggtgccaggcgatgatgcccactcgcttggtgtgcccctccagtaccaccaccggctctgtcagcggggaggtcagcccgttctctgggatctgccacacctgtggtagggacagggccaccgagctcagtcctctgctggtcctattgctggcccccttcggccacacccacgaccctggcccagccagtcctgtgcctcaccatgaccgtgcagtcctccgagccgctggctatgacttcgtcgttgtgaggacaccagtcgatgtccaggacaggtcccgtgtgcccacacaccgtcgggtaggccttgtcaatgcggcccgtctgtgggcacgagggggcagtcagtgggctccatccctcccgaagccttggtcttcccctccatggagtgggaatgacatgcacgtcccggctcacaggtggcccagatgtgactgtgccccacttgccaggtgagcaggaaatgtttgctgcctctaaccctgcctctatggcaacaggctactttccatctgtgctaacacttggggcgataaatctgggttataacacctgcccagcagtgtgagaaacggcaagatgagggattcaaggtgtgcagaaaggcccagtaggggtggccgaggtgcctcctcttcccccaaccctgacaggacccaccttgcttagggggagcaccagaaaggcaccccctccactggcctccacaatcaccgccaggaacttggggttgacggcgcagaaggtgctgtcccaggtaacacgggacacgcgaatgtcctcatagcactggtcgttcttgaccggctgcccgaacacatgccggaatttgctctgccggaccactttgcggaaggacatgtctgcgggacagagaggcctgggtcagtccggcccatcccaacaactccagccctccccaggctgctgaaggtgagccgggaggatgcaaccgggggccaggccaccgtaaccctcctgggtctcggtttacccagttacagaatggggtcacaggtgcagagcctggccgcctgtcaccccgcaggcagtgatctgagaggtaaatgctccggccctgaccactgctgagtcctgaggggctttgcaggacgcagggcccctccctggctctggtgtgtgtcgggggcaggaggtgggaggtgccggggttggagagctctcagctctactgtaggtcccagccagtcgggagcagcctccttcctgctcccagagatttggaggctaggtaatggggaagaaggagagaggaagcaggaaaagtctctctactgtggggccgagtgagtgcccagttctgagtcccagggaatgtccagggagccccggcatggcccccaggaagggacggggtcgggacgcagctgtgggccgcgaagcaacccagagcggcctcgaatcggggtccagggtgaaccaggagcccaacttccagggacctccgcccaggagaggagaggctgggcggccaaggggagtgggactgagtggggtagaggggaggcgaaaggctcctgggacccgcgatcccccctcagccccctcagcccggcccctgcagccccgcccagcccccagcccgcgcccctagccccggccctgccgcgctcaccgggggcaccgggggcgcagggggctgcggcaccggcttcgggcggctccggatcccggcctctgggaagcaggaagcaggattcaggaagtgacagagggacccggagcgggggcggggcaggggctcgcgggggcggggccgaggtcacgcgcggaggggctgggcgggaggctgagcggcgccggggggccgggagcggggccgccggggacggggccagagagagcccctttcctaggacccggtggagcgcccccaccgcagctcctccggaagaagggggcggggcggggcagggccgacggcggccgccgcagaggcgccgcaggtgcgggtgcagccttacagcggacccgaggccccttcgcgttcttgctcctcataatggcatccgcaggagtctccaggattgggtgaggccccgccttcccggcccccgacggaacgcacacctccaaggggccccattaccgcccccaacaaataaatgtagaatctacacggacagtggatatgttcacgtgactctttttaagttatcaaagttaatgctctttttttttttttttttttttttttgagacggagtttttgtcacccaggctggagtgcagtggcgcgatctcggcccactgcaacctccgccctcccaggttcaagaaattcaccccagtagctgggactacaggcttatactaccacgcccggctaattttttgtatgtttagtagagacggggtttcaccatgttagccaggatggtctcgatttcccgacctcgtgatccgcccgcctcggcctcccaaagtgctgggattacaggcgtgagacaccatgcccggcctaaatttcatgctcttggttaacaatgtaaagaaaacaacagcaggtgttggggtggtttttttttttttttttgaggcaaggtctgtcactaccgggctagaatgtagtgccatgatcatggctcactacaggctcgacctcctaggctcaagggatcctcctgcctcagcctcccaagtagctgggactacagacacacaccaccacgcctggctaatttttcttttactttttgtagagatggggtctcttgctctgtcgcccaggctggtgtgttttttgttttgttttgagatggagtctcgctctgtctcccagcctatagtgcaatggcgcgatctcggctcactgcaacttctgcctcccgtgttcaagcaattctcctgcctcagcctcccaattcgctgggattacaggtgcctgctaccataccctgctattttttttgtatttttagtagagatagggtttcaccatgttggccaggctgctcttgaactcccgggctcaagcaatcctcctgccttagcctcccagagtgctgggattacagttgtgagccaccgtgcccatccagaaaatagcagtgtttatggagcgagtggaagacccaggagtcccatttttcagggtaaacacctgtgcattctgctgagctttcttattacaatttgaaagggggccatggccagtgagtcccttgcaccttgccttcttttctccaccatctccctcgaaggcctggagatccattcacaggcctctctctttctctagccagcgcctgtgacaaggagcccagactggcctctccagacccaccccatcccgttccacaggtggaatgtacccccgttcccttaggccagcggctctggggcaccggctacttcccttattctttccttgagcatccactgccctggctgaccgatggcaccctccctttcccagaaagagatggatggaggacgaagcgggggaagagcagaggtcacaggagccttgtctctggctaaaagaggcccccactgtgtgtctgagggtgacctcgggcttgtctcccatctcattcccattgccacaccccattgaggaaacaggcacagagaggtgcggtgcctgcctgaggtcatccagccggatgcaatccccatcggcttgggtccaaagcccttgcttttcctagtgctctataaaccctggggctagaaggatcatctagatcccacccaccttccttcccaccccgaggcctggg

SEQ ID NO: 914546 - DNA, 4001 bp, Homo sapiens
ctccacccagtgccagtggaggcatgagcccaggcaggagggaaggcacaatgaatttctgaagtaaagtttaaatagattttattgttacaagggggaccccaccaagcagggtcagtgacccccaaggaggtcaccatggagacatcaagaggtcatgattgcagaagaggtgactggaattgaatgacatgatccaggggaggccggccacaaatgcagtaacatgaccaggatgggccggtggggctggtcaggtcacagtgtgagggacagaacggaccccttcactctggcctcctgtaggtctccaggtgtgacaggatccagcccgctggcaggaggaaggtcacgaagcaggaggtaagcccaacggccaattcctacacagagcacaagaaagaaggcacctcggagtcagtattcccctaggctctctaagtccttgcagttcccaggcagcagaaagccccgctcagggagccaggactcagaggcaagtgggaggccccgcatcctcacgttaaaggaatccacgctccacggagcagacagagcaggtccaaagctacgctaacccttgaggtaaagggtcagttataaggagggggaagagtgagaggaaggagagacagctggggttagggttcagggagaaatgcaccaccagatggtaaaggaagggacaggaagcaggatttattgaaacctgttttaaagctggtctgggccgggcatggtggctcacacctgtaatcccagcaatttgggaggccaaggcgggcggatcacaaggtcaggagttagagaccagcctgaccaacatggtgaaaccccgtctctactaaaaatacaaaaaattagccgggagtggtggcgggcgcctgtgatcccagctactcgggagactgaggcaggagaatggcttggcttaaacctgggaggcggaggttgcagtaagccgagatcgcaccactgcactccagcctgggtgacagagcaagactccgtctcaaaaaaacaaacaacaaacaaaaaaagcaaagcctgtatgttaagacccaggatccttgcatgggccagtaactccaaaacgatacctatccttccttgcctgaaaaccccctcccaggccgggcgcagtggctcacgcctgtaatcccagcactttgggaggttgaggcaggcggatcacgaggtcaagagatcgagaccatcctggccaacatggtgaaaccccgtctctactaaaaatacaaaatttagttgggcatggtggcacgcgcctgtagtcccagctattcgggaggctgaggcaggagaatcgcttgaacccgggagtcggaggctgcagtgagccgagatcgcgccactgcactccagcctggcgacagagcgagaacccgtctcaaaataaataagtaaaataaaataaaataaaataaatagcagtaacaaccattttcgtcgctgacagcgtcaggcatcccccagtgaaccaacgagaaaatgggctcagagcggctaaagaagtcggcaggaggcggcgcagcgaggaggcgacaggagagggagggcctgacaggaccagacccgagatcctggggctgtggggaaagacctaacgccgacagccccgactgtcgcccgggcactgtccccgtcgttcgcgccctccagacatgcccaaaccggcactgctgctccccgctacgctgcggggcgcgaggcattctcaggaccacctgaggtcagctaggcagaaggggtcagcccacggcgcctcccgcgctcttccaggcccgttcctcaccatgatcccaagcttcccctccggcggcaacgaatggatcttggcgcgcggcactgggagccgccgggccgagcctgtcaagccccgcagcagcagcggcgtcaggacggacatgatggcacggagtacaccacaaaaaacggtcagccgtagcccaaggtcaggaagccaaaatggctgcgctggccggaagttctggagctggggaagcagggaaactgcggcgcggaagtctctcggaaatgacgcaagaacacacctcccacagcccttggcagtttttggcgcgttcctcgaaacagccaattgacaccttcctacgctatgggcggagcacaaaagggctcttcttcgagttatgttccgcctccaaggcttatacttgtgaatgacatctggggccacccaatcatgtacgcgagaagcctaaactgttcttgactcctcccttcattcatactgttaaatctctctctattcaggctgggcgtggtggctcacgcccgtaatctcagaacttttgggaggccgtctgtactaaaaaaaaaaaagtacgggctgggcgcgttggctcacgcctctaatcccagcactttgggaggccggggcgggtagatcatctgaggtcaggagtttgacaccagtcttgccagcatggtgaaaccccatctctacgaaaaatacaaaaattggccgggcgcagtggctcacgcatgtaatcccaacactttgggaggccggggccggtagatcatctgaggtcaggagtttgagaccagtcttgccagcatggtgaaaccccatctctacgaaaaatacaaaaattggccgggcgcagtggctcacgcttgtaatcccaacattttgggaggccgaggcgggtggatcacctgaggtcaacagttcgagaccagactggccaacatggtgaaaccccgtctctactaaaaatacaaaaattagctgggcatggtggtgggcgcctgtaattccagctactcgggaggctgagtcaggagaattgctgaacccaggagacggaagttgcagtgagccgagattgagccattgcagtccagactgggccacaagagcgaaactccatctcaaaaataaaaaacaacaataaaaaaagttcgaaagcagcctggccaacatggtgagactccatctcgactaagaatacaaaaaatagccaggcatggtggtagatgcctgtaatctcagctactagggaggctgaggcaggagaactgcttgaacccggtaggcagaggttgcagtgagctgagatcacgccactgcactccagcctgggcgacacagcaagactccgtctcaaaaaaaaaaaaaaaaaaaaatctctctattgagagtcccctcctctccaccaggcctccgtcgtttttgttgagaattcctgacactgacctagtaaccaaacctccctcaattactattacactcttcaattccagttaccatgctggagcagccaacttcccttccttcctaccctatcactctctctccctcccccatcccttccttcttggttttttaaacctaaatctgaccaagtcatatactttcagtggctccccattgcttcctagtcaaaatcccaattcccggatgtcactgtccagcctcaactctcaaaactcttcaatattccacaccttcgaccctgctctctgatttccaccaacaagccttttgttgcattcaaaatgcactctgcattttgttattgatgttgagacaaggtctagctctaagcccaggctggagtggagtgtggtgtgatctcggctcactgcagccttgcaacctccacctcccagactcaagccaacctcccacctcagcctcccaagtagctgggattacaggtgcccaccaccatgcctggctttttttttttttttttttttttgaaatagagtcttgcgctgttgcccaggctggagtgcagtggcactatcttggctctctgcaacctccgcctcccgggttcaagcaattctcctgcctcagcctcctgagtagctgggattacaggcatctgccaccatgcccggctattttttgtatttttagtagagacaaggtttcaccatgttggccaggctggtctcgaactcctgacttcaggcgatccacccaccttggcctcccaaggtgc

SEQ ID NO: 914547 - DNA, 4001 bp, Homo sapiens
ttaccaggtccttatgtgtacccactggaagatgcaaatgggaagagccagcttacttacatagaatggtgctgaaaataacccaggcaagatattagtacgttttcaatagaaattttggaacattcttgagaattgacctcaagactgaaaaacttaactgcatggaagattatttctttgagagaatttttcttgtgtttttaagagtcagggtcttgttctgttgcccaggatagagtgcagcggcccaatcatggctcactgcagccttgaattcctgggctcagggagtacctcttgcctcactctccagagtagatgggactacaggcacaagccaccatatctcgttgttgtttttttttacatttttgtagactgggtcttggtatgttgccctggctggtattgaacttctggtcttaagtaatcttcccatctcaggctccagagcagctgagattacagtcaagagccaccttgcccagctctagataaatttctgtataatgttccctggtacaataaaaacaaatccaactgagggtatgtgcatgggtctattatcagttttctaactggtttgtctaacgtctttactcttttattccctctagaaagactaaaggtaaccaatacaatttattataccaaaatgcctgtggacttctcatgactggagtcaacctacttataaaaggaagtaaaacttaattggaatggagttgaaactaaatgttaaagtcatcttttctactttgcttttgcactgtcacgatggaggggactacacttctccagctgcaggttgagaatgtaaaggaaccggtatcaacactgtcctcatgaataccgtagcaaatgtacttttgatttttaagtgtggttagtctgacacccacctttggcttcctggggagtaaattccacaggttgattcaccattctattacacctgctttttatttgctcttaaatcaaagcctttaaaattaagcctggagcttcaaattaacataaagaggaatggagtgtagtctttaaagtttctgcaggagaaaaattttagaccggatagacgcgtgttcaagcctaggactggtacagcttgaaaccactgccagtttgctgaaaatgattcctcagatgatcaaggaaaatcccaaagctcctgatgacacctcacctggttgaactcctcgtcagcatatatatcaatcaagtccactccttctgacatggctccggaaggaagatcgcgagtccggaggatggacaaagtaaggaagatgccactgcgggattcggaaaaatgcaagaattagaaggcacgagggtcctgggctgggaagagggtaatgattgctaacctcccatctccagagacgcagcatcctggcggccccagctcggccccacccgctccgccccgcccccggcctcgcgccgcccaccgctctcccaggccgccgggggtcgctgcccatcaccctcgggcccgacccgggtagcgccgcgtctgcgccgcagctgcctatggcgcgacggaaaagtcccaccctcgggtcctagtggccctaggacggcgttgcgaagaatgaccgcggcgaagcccgcagcccctatccgctgcacctgcctagcccccaaggcggctccggccagagcccccaggtgtcaagcagctccagccgcctctgcccccaacccaggcctactcttcgcccccagctaggcccgccccgctccctcccgacaaacccggcccggcgcgctctgcctcctccctcaaaaggcccgcgactccctccgcccgcagactccggccgtcccatctcaaccgacccccttcccgcctcagtgccggcccggacccctcttccggcccaacctgcccccgaccgcgcgcccccgttaccgggaatatggcggcggcggcggcgagtccggactaggcccgaagcgcgcgaaccgctctccgccccaggtcccgccccccccgccgccggcgtcacacgcaccgccacttccggcatgcgcagggacgcaccttccggctcagctcctccgtggctgccgtggtcggctggccgggcggctaggagttcccggaagtgcccgcgcagccggtttccggtgcaggtggggaaaatggcggtgtctacagtgttctcgacttcgtcgctggtgaggagagagaacgttctagcgtccggggcgggcggcagcggggattaccctttgtcttcctctgtggtctctatcttggggagagttcgtctgcccgatagcgcagggcaagggcaggcccagggagaggccgatcctgcaactcaggaaataaaggtcgcttccattctttggtgagcctactgtgtgccggtctggaaatatctgcttaaacgatcagtcatcgtccaagacccaattcgcctctcacctacgtcccaggcgggattagcccaacttccctgggctccccttctccccgttctttagtctttaatgcttttcgtggtttcacatagtatcttcagctttttgtttgtttataattgacatataattgtacgtgtttatgggggtacagtataatgttttaatacatgtgtacatcgaataatcaaatcagcgtagttagcatgtccatcacctcaaatctttatcatttatttacggtaataacttttcaagatctttttctagcatcttgacatatacagtacagtgttattagctgtagtcactctaatatgtaatagaacactggaacttattattcttttttcctagcctgctgttataaagtaactaactttgcctctatcttcccctcctacccccatccctatctttattcttttttttttttcctgcagacccagggactcgatctttattcttttttgatgtaggcgtttacactataaacttccttcttagtacagcttttgtcgcatctcataattttgtatatgttgggttttagtttgtctcaggatatttcctttttgtttgttttttgttgttttccttttttttttttgagacggagttttgctcttgtcgcccaggctggagtgcaatggcacgaacttggctcactgcaacctccacctaccgggttcaagcgattcttccgcctcagcctcccaggtagctgggattacaggcatcgccatcatgcctggctaatttttgtatttttgtagagatggggtttcaccttgttggccaggcaggtctcgaactccagacttaaggtgatccgtccttctcggcctcccaaagtgctgagattacaggcgtgagccaccgcgcccggcctgttgtttcccttcttttttctttttttcgtagagacaggttctcactatgttgcccaggctggtctcaaactcctggcctcaagtgatcctcctgcctcagctttccaaaaagtgctgggattactggtgtgatccaccattcccggcgtgtctcaagatattttctaattttccttttgatgtcttctttgactcattgattgttcaagagtgtgttgtttaatttccacatatttgtgaattttccaccttttcttttgccattgatttccagattttaataaaatgtctcttgtgcggcatatagttgaatcttttttttaattcattatattcagccacttcatgtcttttggttggggaggttatgttatgttatgttattttcttgagacagagtctcgctctgtcgcccaggttggagtgcagtggcatgatctcgactcactgcaagctccacctcctgggttcacgccaatctcctggtttaggagtagctgggactacaggcgccccccaccacgcctggctaattttttgtatttttagtagagacgagatttcaccgtgttagccaggatggtctcgatctcctgacctcgtgatctgcccgcctcagcctcccaaagtgctgggattacaggcgtgagccaccgcgccaggcctgga

SEQ ID NO: 914548 - DNA, 4001 bp, Homo sapiens
atccgcctcttctgttgcctcatatcaaagtcagggtcaaaccagggaactttccctttctaacccattcaatacatgctcttaccaggtccttatgtgtacccactggaagatgcaaatgggaagagccagcttacttacatagaatggtgctgaaaataacccaggcaagatattagtacgttttcaatagaaattttggaacattcttgagaattgacctcaagactgaaaaacttaactgcatggaagattatttctttgagagaatttttcttgtgtttttaagagtcagggtcttgttctgttgcccaggatagagtgcagcggcccaatcatggctcactgcagccttgaattcctgggctcagggagtacctcttgcctcactctccagagtagatgggactacaggcacaagccaccatatctcgttgttgtttttttttacatttttgtagactgggtcttggtatgttgccctggctggtattgaacttctggtcttaagtaatcttcccatctcaggctccagagcagctgagattacagtcaagagccaccttgcccagctctagataaatttctgtataatgttccctggtacaataaaaacaaatccaactgagggtatgtgcatgggtctattatcagttttctaactggtttgtctaacgtctttactcttttattccctctagaaagactaaaggtaaccaatacaatttattataccaaaatgcctgtggacttctcatgactggagtcaacctacttataaaaggaagtaaaacttaattggaatggagttgaaactaaatgttaaagtcatcttttctactttgcttttgcactgtcacgatggaggggactacacttctccagctgcaggttgagaatgtaaaggaaccggtatcaacactgtcctcatgaataccgtagcaaatgtacttttgatttttaagtgtggttagtctgacacccacctttggcttcctggggagtaaattccacaggttgattcaccattctattacacctgctttttatttgctcttaaatcaaagcctttaaaattaagcctggagcttcaaattaacataaagaggaatggagtgtagtctttaaagtttctgcaggagaaaaattttagaccggatagacgcgtgttcaagcctaggactggtacagcttgaaaccactgccagtttgctgaaaatgattcctcagatgatcaaggaaaatcccaaagctcctgatgacacctcacctggttgaactcctcgtcagcatatatatcaatcaagtccactccttctgacatggctccggaaggaagatcgcgagtccggaggatggacaaagtaaggaagatgccactgcgggattcggaaaaatgcaagaattagaaggcacgagggtcctgggctgggaagagggtaatgattgctaacctcccatctccagagacgcagcatcctggcggccccagctcggccccacccgctccgccccgcccccggcctcgcgccgcccaccgctctcccaggccgccgggggtcgctgcccatcaccctcgggcccgacccgggtagcgccgcgtctgcgccgcagctgcctatggcgcgacggaaaagtcccaccctcgggtcctagtggccctaggacggcgttgcgaagaatgaccgcggcgaagcccgcagcccctatccgctgcacctgcctagcccccaaggcggctccggccagagcccccaggtgtcaagcagctccagccgcctctgcccccaacccaggcctactcttcgcccccagctaggcccgccccgctccctcccgacaaacccggcccggcgcgctctgcctcctccctcaaaaggcccgcgactccctccgcccgcagactccggccgtcccatctcaaccgacccccttcccgcctcagtgccggcccggacccctcttccggcccaacctgcccccgaccgcgcgcccccgttaccgggaatatggcggcggcggcggcgagtccggactaggcccgaagcgcgcgaaccgctctccgccccaggtcccgccccccccgccgccggcgtcacacgcaccgccacttccggcatgcgcagggacgcaccttccggctcagctcctccgtggctgccgtggtcggctggccgggcggctaggagttcccggaagtgcccgcgcagccggtttccggtgcaggtggggaaaatggcggtgtctacagtgttctcgacttcgtcgctggtgaggagagagaacgttctagcgtccggggcgggcggcagcggggattaccctttgtcttcctctgtggtctctatcttggggagagttcgtctgcccgatagcgcagggcaagggcaggcccagggagaggccgatcctgcaactcaggaaataaaggtcgcttccattctttggtgagcctactgtgtgccggtctggaaatatctgcttaaacgatcagtcatcgtccaagacccaattcgcctctcacctacgtcccaggcgggattagcccaacttccctgggctccccttctccccgttctttagtctttaatgcttttcgtggtttcacatagtatcttcagctttttgtttgtttataattgacatataattgtacgtgtttatgggggtacagtataatgttttaatacatgtgtacatcgaataatcaaatcagcgtagttagcatgtccatcacctcaaatctttatcatttatttacggtaataacttttcaagatctttttctagcatcttgacatatacagtacagtgttattagctgtagtcactctaatatgtaatagaacactggaacttattattcttttttcctagcctgctgttataaagtaactaactttgcctctatcttcccctcctacccccatccctatctttattcttttttttttttcctgcagacccagggactcgatctttattcttttttgatgtaggcgtttacactataaacttccttcttagtacagcttttgtcgcatctcataattttgtatatgttgggttttagtttgtctcaggatatttcctttttgtttgttttttgttgttttccttttttttttttgagacggagttttgctcttgtcgcccaggctggagtgcaatggcacgaacttggctcactgcaacctccacctaccgggttcaagcgattcttccgcctcagcctcccaggtagctgggattacaggcatcgccatcatgcctggctaatttttgtatttttgtagagatggggtttcaccttgttggccaggcaggtctcgaactccagacttaaggtgatccgtccttctcggcctcccaaagtgctgagattacaggcgtgagccaccgcgcccggcctgttgtttcccttcttttttctttttttcgtagagacaggttctcactatgttgcccaggctggtctcaaactcctggcctcaagtgatcctcctgcctcagctttccaaaaagtgctgggattactggtgtgatccaccattcccggcgtgtctcaagatattttctaattttccttttgatgtcttctttgactcattgattgttcaagagtgtgttgtttaatttccacatatttgtgaattttccaccttttcttttgccattgatttccagattttaataaaatgtctcttgtgcggcatatagttgaatcttttttttaattcattatattcagccacttcatgtcttttggttggggaggttatgttatgttatgttattttcttgagacagagtctcgctctgtcgcccaggttggagtgcagtggcatgatctcgactcactgcaagctccacctcctgggttcacgccaatctcctggtttaggagtagctgggactacaggcgccccccaccacgcctggctaattttttgtatttttagtagagacgagatttcaccgtgttagccaggatggtctcg

SEQ ID NO: 914549 - DNA, 4001 bp, Homo sapiens
tattttggcctgtgcatgatgccaacttctgccactttgaaacaaagtgtgtgcactcccaaacctggccctttttattgtttgattccaactgttaagatagggttcaagtgcaaggtctaggctagcaatgcttcacaggaaggaaaccagtaatttacatgcgaaaagcagtccacaggctcttggtattgaggcaaaaccaatccaaagaaccagctgcgaatgctgatagtccccagaccaactgacagctggatgttcgctggcctcagcggtgtgcattctcagcgacacttatgtcctcaatttattgctacgttcactcggtcagagtcgccttaaagaatttggaaaggcccgggggtgggggtgcttcctggcataaatagaagaccagtgctcagccattttttattcacttggtttgtggcttagaatgaaataaacatgcttgcatatctggaatgaccagaaaccggacacctgtggaagaaaatggtgtaacaaaatacaacgttgcaaaaggtaaaaccgattttcattttattcggtaacttacaaagttaccagcttcctactaaaatctgcccttaaatattttataacacacggagccgagaggaaccgaaagcctgtgccgagttgggaatattaactttgttatgtatttaacctggtaggtagttgggatttttaactctctgagttgttttctttttttaaagtaagatcggccctcatctttgagttctgcggctttaacgaaagccaagggcggatttacattataaagacgctgacccatggcctctcctgacaaaccgaaagaagccggctgttggctggccgcggcggtggctccgagaaggggctgccccgcgtggccctgaccgcaccgtcgggctcgcaggccaagttcgccagggcacggccacgtgacacccccaccctcccgcggccccgccgctcccagcccggcacgaccttgggcacatgctccgcgcccacccgcccttgacccagcgctgcacgggagaggctgcggggcgctcccaagcaggcactgggcccggcaccctcatcctgctcacggcagcgctcggaccgcgcctggagtccctgcgccaagggcgtgtcccgacggctgcaccgcgagggcgggcatggggagggggaccggggagacggacgctgggatggggtcagcggcgccctgccgaatcccgagggccgagcacccctccctcagccgcactgcacctgcccgtaggtgaccaacccacgggcggacccccagacccaatcctctccagagccagggtgggatgggcagggacaggagccggaggccctactggccccgggcgaaggcatcctggaaagcatccagagcgtccagcatccctcccgcggccacccgcaggctgaccgacccctgggcagaccctcagactcaatccagtccagggcggattaaggagtgggagacaagggagccggtggccccgctggccccgggccggaggcgtccagccaagtccggagggccgagcatccctcccgcggccgcacgggacccgcctgcggatggaccgacccccggtggaccctcagacccaatcccctggggaacatggggagccccggcctctttctgggttcaggatctccacaaccccgccgtccggggggaataccggggttcctctcggcgccccggttccggcggcgtcccccacccggtccggttcccggcagccccgcgccccgcccgtccccggcccccgcagcccgcagggccgccccgccaccctccccaccgcgggcgaccgggcctcaccgagtcagctacggaggtgcggcagcggcagcggcagcggcggcggcggcggcggcggtggagtgaacgagcggcgagcgggagccggggaaggagggccgcgggcgaggccgagcgcacccgacgccggcagcagcggattggctgaggcgggtccggctgcggcgcctgcaggcgggtgactcccggcgcgcggagggcgggcccggggcctcggcggggcggggcgtccgcggggctaggaggggagggaaactgaggctcgagcgggtgctcgcgtcctcgacctctgccggaatggggtctaggacgagattcctcaccctccgagcctcagtttcctcatccgtaaaacgagccatctcgtggaggccgtgcgcataaaatcgcttagctccgtgcctggctgatcctcgcgacttatctatcggcattgccccgtgtaatgctccaggcaccccctgatggtattcacccctgactctttcatgcagacaagggtcgcgggccaggaaataagttaccccacatcaccgagctgagaagcaaccgatccacagggagtggtggggcgcgcctgtaatcccagctactcgggaggcgggaagtcgcttgaagccaggagttcgaggccagcctgggcaacgtagcgagaccccgtctctaaaaaaaaaagcgcggggaagtgatagatcggacattgggtccagatctgattccacagcccatgccccaaatcagaccttataccacgagtggcagtcatcgcgatccagaggcagcgtggctcctcctcatctagctaggataaaaatgcctcacttggggggctttggtgagatttactaaaataattcttccagcgtcaagaacataataggtgctgggagaggagtagctggaggccagggcagagcgaccgagagacccttgtgctggagctcgggagaggggccgggagcgggaactgaacatccaccggtcccaggagtctagggcgagcgcagctgcaggggacccagggggttgagggggagggagaggggccccaagcgtaacaggagggccaagggggtcttcctgaccgggagccacccctcccctatctttgcccgcaatgcttccaggcgcgagctggcggctctgcatacagcaggtgctccataaatgcaccgatgttatgaacaaagactcttttaaacctcttttatgaaccctgctctttttaagttcgaccacttcttctagttatgaaaaaatccatgtttgcaaccatccttctttctgtatcatttagttgttaccgcagaagaatttagaagagaaaatgaaagttctcctttgatcccgccccccaccaccgctgcagttaactctccctgcggttcccgggctcgctgttttaaaggaaggctaggatgcaagctgtctgtaaggctgttttgttttcacttggcttacgtcgtagacaggtctctgctgggggacggagatgaccaccggccttcccaaggctgcataagatttcctttgactatgctgtgatccatttacgcggcccccattggacaattagggcctcctccccgccccccaccccaccattgcaggtataaataaaagctgcgttggccgtcgatgtacctcctggagctcctgattatcctgtaggatagatccctggaggggaagcaaccaggcacgtgcgacattttggtgacacaggccaagctaccatgccgaaaagtttaccaacttccactgccacccgcgcgtgcaagcggggccctgtctccgattatggattattttaatctttgccaatcctaaaaggaggggtgggggagggaagaatctctcatctctccttttaatttgcatttctttgaggttagaagttgggggtttgtccccctgcttgcgcttgtctggaccaccagtgagcccaggcactcgacccccgcagatttcaccgccccaagaggccagtgggctgggccagggcacacgttcctgacgcgcggctgcaccccacgagcccgggcggctctcgcgcgtgaggctctccttgcacgtgggccttcgcggtttgcactacggaagctggactgtcattctcaccgcaaatgcccttccctcctttccctggaacctcagc

SEQ ID NO: 914550 - DNA, 4001 bp, Homo sapiens
cgctctcgcgccttcgggggaccgggcgaccccggatgagaacttgccagcgctacagccccctggcaccgcctctgctgctgccctgaggccctccattggcccccataccccaccccggccctcacctccgcagcgcctgctccaggccgtcgcgctcccgggccgcctcctccaggcaggccgacgcgcgtatcagaacatcctcgaaagagcccagcagctcggggcgctcgcgctgcagcctggcccagagcgtcctcacagcccgctgcctggagggcgggcgggaactgaggctggagctggcagaagcgggaagcaggcttccctccgccagcagcaaacccttaggagacttcttcgcccctgggcaggacaggagcacttgctgcgtgcagggcatccctcccgtgagcgctttcgcccctgcccggcgtgcgtggtcggtgaggtgtgtgtaccctgggcagtgccggtatgtggccccgcgcccggcgctgcccctcctccctgcagccctggctgctgcctcatgaaatgcaaattctgcgggaaatcatgccgggtccctcccagggaatcgcagctgacgctaggctgggcctgacccggcctagagaccctgtgcagaaccagcactcgggtgacaagggcagacagcatgcaggcagagaaacagcagagcgggcagtgggagcggggccagcgccgactcacttgcccaggaccggggccacccccagctgctccagcacagtgtggaatcgctcctcctcttcctcctcctcatccagagagcccgccgtgccctgcacgtcgagcccgcccgactcaaaggtctcctcgggagtcctgcaggggttcgctccctgggctgacgccacccccacaaacatccctgcgggcatggagcgagcgattaccagggctgtgggtcgccaccgtggctgtgtccccgttcaccctcccaacgagtatcctgccctctctcagggcccagtttcctgttttccttccttattctggtcctattggcctggaaacaagaggtgacaggccagctcccagccctaccggagcttagcacaggagaggagctgggggccaggaaggtcagctccacacactccaccgcagctaggagcccccaggcgcgagtgcgtgcagacaaagcacgggccctggagggaggaggacgagaggcaccggcagccctcagggcgccacaagtgccaggcctcctgatcaggcctccagctctgggcagtgggggataggcaggccacaggctcacccaggcccaggcagaactccctggcggtgaggaagccagtgtgagcccggtccagactttcaaacacagcctccagctgctctggcgtgaggggcaggtcgctctggagaccctggtcggggaaggagagcagagatgagccgctgcggtcaacccagggccgaagcagtctcttggggtgggggactcacctgcaggtcgtgcttggtgatgaagcccttagcctccttgtcacacagcagaaacagctcctcagcctgctccagtattgcagcccgcggccctgcagagcccccctcgagttccccctcctcctcctgggcctcatcagccccaggctttccagggctggccatgagagcagggggcctcagcctggccttcaggtgctgtgaagccaagggagggtcagaagaaattcaggaggggagcggatggggtgcaagtgtgtctgaaggctcagccgagggccctccctgcagcaggtgggaaggtgggcggaaggcaaggtgggaccagggggctgggggtggaaaatgctgcaggcttggggtgtcactggggtggttgatgtaggctcagggcctgtgggtactgccccagtgggtctggcatctcaggaggctggaacccaggaggggctgccaacttcaggagaggaggagctggaggtgatggcaatctcaggggccagtggagaagacctggtgataaggaaggtggggtcctgaaagctgagaggagcaggcttggggtcagtgagggaggagcccctcacactctgcaactggagatctgatcccaagtgagggctcagccagtcctgaccaagtccttagcccctggcctgggcctgtgtggcccagcctcatgacagctggcaggcagggcagacttctccctcctgcccaccggcccctccctccccacaactgagcccacagagtgcaggggcaaggtcccagcctgcagagcccttcgcctctgacgccccactcaggaacacttccagattcgagacctaacacccttgccccacaacactgaggcccttccccgtttcagaactccctggggcctcccttcccacctccttgcagggacgccccgccccctaaccagagccacctgtccttcacacaatgtcctgatcccggatttcccaaagctgctccccaccaacacccgccttcccccaccggggagctgggatcctctcccctcactctccacccagcgtccttccatgttccttagcccgggcgacctccaaagagggcaagtctgggcgggtgagagaaggggacacgagaggccagggccattgcctccaggccacgttgttgtctcgcccgccctccggcttgccggctagacctgaggtccaccccagccggaagccgcgcggcagcagggccccagggaggtgggaggatgggctggtggggtggggcggccagcctcctgtgctccccgaaactctgggggacaaccccgcccttacccctgccgccttgcgccccgagggggtaaccggagttcccgaccgagacgctcaggtttggcgcgggccacggcggcccggagggggtgccgggcgggcggcagtggaggggcctcagcggcgggaccagcggtcgcctacccgcgagttgcgccgccgcacctgccgcgcgcccgggccgctcctcccggaaacactgggcgcgccccgccccagctgggacccggacgggacgtagagggcactgggccccgagcgacccctgccgcttcgcaggcaccgagacccccgcttgggccggccccgggaggagccactctgcgccgctgtcgcctgtccccgcctctctgcgctgccccggcggcccgatccctggaggctcgagcgagcagtgaagcaacgatatgccccagagacccagggaccccccggagcagggacaaggctgcggggggcgggcgcagacaccagcgcctgggaggggcccctcctgtccggggggagcccgacttaaggcgccaaaaagtgtgtgtaggaaaaagccgggcaggaaacagaccaaatactttcagcggttatctctaggggtggggagcctttactttcttctctatactttcccggtttttaaacaataaacatgtaggccgggcgcctgtaatcccagcactttggggggctgagacaggggcagatcacctgaggtcaggagttcgagaccagcctgcccaacatggcgaaaccccgtctctactaaaaatacaaaaaattagccaggtgtggtggtgggcgcctgtaatcccagcactttgggaggctgagccaggagaatcacttgaactcgggaggcagagtttgcagtgagccgagattgtgccattgcactgggcaacaagaacgaaactccatctcaaaacaaaacaatgaacgtgtaatgctagaaaatgtttaacttagcagtattcagtgtatatgtatgggtgaacgagctggggactcaggcaggtcccacctcagtagcccctcctggctctccttctggggcccagccctgactggggctccccttgggggaggattggaaggaggagctgcttgaggcccgagtgaaaccctcctgtggggggagaaaattccaccccagaccgaggagccctccccagccccagccccagcctggcccctgcacccacctgaagg

SEQ ID NO: 914551 - DNA, 4001 bp, Homo sapiens
tgatccaacctctcccccattttacagacaaagaaactgaggctcagggaggagagccagtggtaggggccaagctcacaggggaagcagagccaggactagaaaccaagtctcgctgcagtcaatgcaagccctctgcccttatacccttgtcttgtctgctgaattatgctctctctgcctgggacaggggccttcctcagagcgcagggtgaccaggatgtgctgcttaatggagaacagggagacctcagcccccatgcctccttgactccggctcctgtcccttggcctggttcctcaccatcaatctagtggcctgggacagtttaggtggaagtccaagatgctcaagtcctctaaggacttgactcttgcctggccaagtttatcttggtcctgggaggtagaggtcagcaggtaaagagtctcaagtgcttgatcacagggtgtgtgtgtgtgtgtggcgtgtgaacaggcatgcacacgcaactggtggttcactgaagagggggctcccactagactccccaaacaatccacatttcatctgggcaggcccttctgaacccaaatattttctcccattctaagtccgtgcccctcccccatcaaggccttagggctgagcctgagagagggagggagggaagaagagagagaagccacgtttccttagggagggaggggaagagtgagaaagaggagaaagacaagctcacagtcggacctagtcaagaagacatagggagagggagaaagtcagccagactccaggaacagagggacagagcagagatctagaggcagatggagagaaatggctccctcctcctgagccatcaccctatgttgccctgaccgcctcttcccagcccccagcctcaggtccctccctggggtggggggtctctgggcctgattccctggggctgccagggtagcaccctgaaatttctgggcctggcttccccgaggggtcgggtctcaggccctctgaacgttccccggtgcgccccccagcggagatccagcctatgagccaccgaagccccaagggaggcgcaggaaagggcgctgccactttgcgcccagtctggtcctggaacctggggtgggttggggacggctagaagacgtgggtggagggcgggattggtgtctcttgagctcagatccgaggatcggacggacccgatacctcgatggccccttccccctagaaggtggaggccagtgtattcaaagattgagcccccaggaggggcgcttagctccaaacacatgtcgctcctggagaccctgcgctgaaccctctccccggctcctgcccagtgatgtgtagtcgggtccttctaggggcccaggcgcgccgcgaggacgggtgccgaggggtggaacgggaacggagacccttcatcttaccgcattgttgaggaagtccgactcgttcagatcccccaagtccaggaagctggatccggggaacagcctgtcggccgggaagggttccaagacggcgtccatcgcagccggctcccgggacccccttccactgggcttccctcactccagggcggcggcgcgcccagtccagagctcctgcctgagcgctggcaaacgggcggggggcaggtccggggcgaagccccgggggaggggcggacggaggcggcgcggccccgggtggggggcgcggggcgcgcgggggccttagggcagcggctaggagcgggatgggctcaggggccccgggcgcaccgtgggcattcagccgactccacctcctcctgctcctcctggggcacagctggcttccatggggagcccggggttggggctgagggcttcaggagccccccggacagggtgggagccggggcgggggagctaagtgctcccccgagactgggtggctgccggcctctcctctgtctctgcgtctccctccgcacgtcttctgtcactttcctctctgtgaaaccgggaacccctggctggctagcccagctggccaaggcgccacgcccccacatcaatattcacaataatttaatattaatgagaagagggcgtggctcgaggaatcctctctccttttttaaagagacatctgcaacttcgtcttagtaatctctcttctctgaatgctcaaggtgggggcttaaagcaacaatagtcctggaaccgataacagtgttcctggaacattggcattttaaggcttcaccaaccactgtcccgtaaattgatgagggagctatttccatccttccagccttatactaaagcctgcacgaaacccagtcagggaattccatttcacagtcccctcaacagatctcccctcaacgggggagattttcagctttttaaaaattttatttattattattactatttttttgacacggagtttcgctctttttgcccgggctggggtgcaatggtgtgttctcggctcactgcaacctccgcctcccagtttcaaacgattctcctgcctcagcctcctgagcacctggaattacaggcgcgccccaccacgcccagctaatttttgtatttttagtagggacggggtttcaccatgttggccaggctcctctggaactcctaacctcaggtgatccggcctccttggcctcccaaagtgctgggattacaggtgtgagccaccatgcccagccgattttcagcttgtaactctcatttctcatctcacctgtttcttcttccaggaagccttccctgaacccccaggctggagcagttaccaacggtatacacccacagggcatcatgtgctcacctccactgtttccagtctaatgtggtattgtccttatttgctcacattgtttgtatctgtgaccccactgagctgtgaggctcctcagggcaaggacagtccccagcttccctctgtgtgaaagggctgggtgaacagccagagataggagagtccccctcttctcctcgatagtcaagtccctccctaccccccaatggttctgaagagcaggaagttggaaaacagtggttctggaatctgaatgagccaaggtgctggctggctgcacactccacagtcaccagacactcccagggccccgggatccattacctaagtggcttgctcctgcgtacaaacttaatctcttgaaagggctgatagcaatcgccaagcacctgaacaaatggaggtggttcagaaaggcactccctcagagggctgggcacactgtttcctgaccagaagttattaataagattaagcatgtcctttctgtctgggacgtttaattagctcaggaaccaaaggcctttaagaggtagagatgtcattgcagctaagccatggatgtcaccaaaattgctctcagcaccaggtgggagaagggttcataccaaggctgagacagcagttgtttgcttccctggcaggcaggcagtcacgtggcttttccccaccttatgatctagttgacatagttctggagagtgaagttctgaccttccaggctgtcacatgactgttagctcccaggcctcctgtagaatttgctcctgagaaagtaggattataacccatgctctggggaccagttcaccagccatgcaactccgagaagtaaggctgggccaaaaagaaatcaattcactttcacaacagtggcgggtagaattagggtgctgggaccatgggtgtcttccccaaatgcgtcacatctggccaaatggggaccattcaaacactgggatgtggctgatacttctcagggggaggggaggggtctctggctgggtgaacaggctatcgtgagtgagctccagcagcaggtgtctggagtcctggctactaagctatagtccctacaggcccccaggaggagaaaaagtggccccccgcctgaggttggctggaaattgtgcctgtgttcctcccagcctgctctgtaattagagacacaggtaccatttaagtgattggggaagat

SEQ ID NO: 914552 - DNA, 4001 bp, Homo sapiens
tttgcaccttgtacaactcggaacttccattcaacttcacctgtttcactgtctccaaactgtctctctataagcaggtttcagtgtacagttggaaccgatgtcatccaaggccatgtccacactggggacagaagagctaggtacacgcaagtctgaataaggggacacattaatagctatttcaaccagaagaggcatcttaaatacattcttgaccagcacaagtctgtttccagggtggacagggcccaaattagatttccctcccaccttccaaaacagaaaaaaaaaaaaaaatcacacacacacaaactgagatgttgcccattaaagtagacaaagcagcagagcatgagcgttacgggaagagatggatccttaccaggttgtgaggcgggaacgactgttctgtaacccctacaacggagcctggcaggaaggaaatcacctaaaaaagaaactgtcagagagatttaatagtcacatgttatcattaggagttggttactgtgtcacattcatgcttttagctaaacactttaagattcaatattactttttttctctcctctgaaatgtgtccggtgaagatgtcccactaaggtaagtttgacatggtgtaagggagttgaaaggggtaaacgcggataaagagcagattacttgaccctacattttaagagaagacgacgccttccgggcgcacgccgagcagaactccaccgacaccttatccttgtccacatggagacagactcctcccgccgagtcgtcctcttccagcaggtcctgcttctgctttcccaccggcagagcgtagtcgtggtcaccggcgggcgagtctctgaagagcgaggtggtcagccgcagtcccacgccgctcagccggctcagcaagcgagccagtccagtctcgttggctaagactgcccgtaggtagcgactctcctcctgcagtgcctgtacgcgtttgcccagctcccgattctcggcccgcagctcctggttctcggctgccagaccccggactcgactctccagccccatcacgtactccttcttcttcagtcgattaaggcgggcagcggccgccgccgccttccggggactctttgtcgccgcctggttgttgtcgttaccgctgccgccaccgccgcctcctcctggggactttctccgcctcttttcggcgctgccactgtcactgctgctgctgcagcctccgataccgtttaacagcctttgcagcaggtcagagaagcgctgcatttcagcagccgcggcctcatcgtcatcgtcccctctccacaggccgccgctatccgagcctccgccagacgaggagagaggccccggcgagctaagcccggggtccaggtgccagtccggttgcctggggtccaggagatccgccagttccagcccagacagaaagtccatatcctccgtctcttcccccgggaggctggcgatcgcctcctcctccatctcctcgggggagggcgcgcgcacggccacgccgccgcggctccccctcccggcttccaactctccttcgtcgccaaactgctgcttgcggccgggagatccggccgccgccgtctcctcctcccccgctgcagcccgggtcaggtcagagggcagcgaacaagttgcagccggctccgggctctcactgcgggttggggagttgctgcccgaggctgccagcagcttggtcaggctatgcctcatgagggccagcggcgggccgcggtaggccccggccgctaagagtgggcctcacgggccccaaggatcccaggccccagggcgggtagcccccggcactggccgaaacgaaatgcagggaaaggtccgagtcgcctcccgcctcacttggctagtcgaccccccgcgccaaggcgcggggagggacgggagaacgaagcggtgaggccctgcgatgactcgaccgcgccacccagacaacggcgtagccggaagtcagtggttttcgccccagtcccgcccaccgcgtttcgcgcgccaccaggccgtagtgtcgcgagatttcagggtgctttagagtgggaataattccagctttctagtgatgtcataataacagcggcaaaaataacaagtctctagatttatccaccctaattcaataccacccaatacccagactcaacagttcaacacaacattttgctatatttgctttatctttacataaatgcttgtaaattttttttttgctgaatcatcctaaagttgcagatgagacaccacacccctgcgtacttcagtgtgcatctctaaaaataaggacttttttttcataatcataatactattaccaagtcttcagaaaattaacaatcgtttactaatactatttaatacctgggccatactagatgtcctcagttggataatggatatgctagttaccctaacctgatcactacattccatatgtatagaaatatcactatgtacccaatgaatatgacagttattatttgtcaattaaaaaaaattaaaaccaaagcaaaatgaatgtagaatacaacattgcttacaaaaattgtcttcagttgttcttgccatttttgtaagtagatgttttcacttgagccaaaatccaatcagtactgacttactgcatttgggtaacaaacaaacaaaaactctgacaaatagagccaggaaaggctatgaagagagggtactcatgcttgtatgcctgaaaacaaagactgtaaaaaccacaacgttgcacaaagaccatcacgaccttatacaaaacctctgcaaggatgtctgcccagaaactgcctgtccaacctttaactgacgtcacccttgttattgacctttgtagctaagataattagttcaaaacaatgtgtaaccatcctcatttttttttcctttaaaactctttgtcttccttcgtcttcctgaatacacacatagtttactatggcatgcgttttcccactgaaatgctccattctcaaaacatgtcttttattttagagaccttttctgtttgttatttaggttcacatcccacaagggatttcagatttgaagcagtttacaaatacagatatttaggttcacatcccacaagggatttgagatttgaagcagtttacaagtacattagaatatagtaaaacaaaacattttgaatttttaaaaagcaaggccaataaaagatgaactaggaagagaaggatttctgaaaggggaaaaggttaatcttggaattggatggatgcaatatcttactcagttgtttgaattgggctaaaaattgtttcctgacagcccaaacaaaaaaagagaaatgaattttcctttgttcatgagtaaaatatacatgaattctttaactgctcttctagttcttaaatcttaaagaaacttctctataggatactgaataatgtagtagatatcctcgaggatagctgcttctatacagtatttcttagagacacagaaagcaaggtccagggaagttgaacactgacaggtcccaaatattgagaaacgtgcctggtactgcataggcttcaacaaatattgagtgagtgagtgaataaagtctacagttttgactgaagccataacactaaagctcacctgaatgaaaacaattatttcaaggtgtgaaaaaagtatgacctgtggtatctagaagaataaataaaaggactccttgtcctgcttaacattccattaggaaagattttgccaaagtacaagagcacacagttcaaggtgatatatgtatactctggcctcccttgagtacaggtgttttgtatggctggtaatcccatccaactacattttccccttaggcaaaattcaatattattaactgattatattttttaaattacgaaattttgttttaaatacacatgatttggctgggcgtggtggctcacacctgtaatcctaccactttgggaggccgaggcaagaggatt

SEQ ID NO: 914553 - DNA, 4001 bp, Homo sapiens
gaacgagttttcaaataggactttttaatattgaatcctccaaattgtgaaagtcagtggttttccaacttttgatccacattaatacattttctgtcacaactagtacacacacacacacacacacgttaattagaagtttcatgaaataaatacttttactatgtgctttataggctggtatttatgttgtcatattctagctttaaaacttgggcaggttacataacttcttttctcatctttaaattggggatattagtacctacctcagtacttccgctatgattaagtgtaattaacacaaagtactcagcactgtgcatgaaacaatatttttcctctctatataaataatatttaagtaatttaggtttaccttgaaacataatttttgctatttatttaaaaaatgtatttttatgagttattttttatgaggcaataactcaaagcctgaaaaagttaaggtcagtgaaaggctttaaactctggaaaaattgaaatcatcctaattttagctgtctaaatgtactctttttgaatgtattagctattctttaagccacttaatgaagaaactaatattattcattaccaaaattgaatccttattaagtgcctcagggtacagggaccaaaaaaagaaggcattaattgaagtatataaaatagggaattgaagtactatgtaaaataggaaatcgagttttttaaagtagcgtccttcagatgccattccagattaaatgtagatttagaaggataggtgcatttcatgaaacagaactacagtttcaatatttggtaacaaacacacaaaaagcaaaatttttgagtggatttgtgagggatgtcctttgcatgaatctgatacaattgtaagcagagactgagggacaacaggagccacttcctacacccctgcccccacttttgggtagaaaataatttgacctgctccaaaaaggtaactgcttctatccttaattttcataatgctacattaggattaagcactaaaatccaaatttgaaaattatagtaaaatgtaaagtataacttactctttaaaaataaacacgaagttttcattggtctcattattacctctgagctaaataagtgttgcacagcgctttatcattttcaaagtgctttcacatttgaaatttgatccttctaacaatccagggagtttggtggatcaaaagtttttatcattttcattttaagatgcagaaactgagtttcaaagagattaaatcgtttggctaagatttatacagcaaggaaattttaaaattcaacgtggaggccgggcgcggtggcttacgcctgtaatcccagcactttgggaggctgaggtgggcagatcacgaggtcaggagattgagaccatcctggctaacacggtgaaaccccgtctctactaaaaatataaaaaaattagccgggcgtggtggtggcgggcacctgtagtcccagctacttgggaggctgaggcaggagaaaggcgtgaacccgggaggcggagcttgcagtgagccgaggtcgtgccgctgcactccagcctgggcgacagagcgagactgtgtctcataaataaataaataaataaaataaaataaaattcaatacggatgctctttcaactggtatgcccttaaaagacagagcctaataagcttgtttcatcttgccgtaacataggacccacagagacacacactataatgatcctttctatactccttagccattgaacgagagatcaaataaacgcagtaacatccctcagatgcatgatttgagcatggcttggaaagtattagcagttacctgggttgtcttctacagcagctcctctgtaaatgcagttgactgactgataggtagatgtggcaaaacattaagtcagctgagcaacaacaaaaataactctaagtccttaccttgcaaggggaaccatgccagcaagctgagaactctccaccacatactgtgctgtgctgctgtggcacctttgtcaacttcctctagattctgagacaaatggagctgagtagtttcttttaaagggggagaggcagtagatctgtgacctcatgtgtatcaactcctccatctgtctggaagccccctcttagttagctgcccccagaacacctcctggtggaacattttggggaccacatgtattatcttgatggcagagaggtgtgagtgatgtgttggtgacaaaaattgttttaccacaagtgggtagtactggtaaatcaactagttgcaaggtttttagagggagcatgggtgggagaaatactgtaaaatgtccctgtgtagtgacgtcatccttatttttacttttctagtttattagataaatacaattagataatttttgctcaacctttgggaatattttatttctatgctgacatcaatttataattgttgtcggggaggaattcattcattcatatagatatactcatttttgaaatctatatatctgtccacccacccatccacccatcttttcatccacccactcacaaatacaaatctattcatccacctatccatccatccatccttccatccatccacccacacatccatccacccatccatttatccttccatccacccactcactcatgtattacctgcccactcattccccatccacccatccatccatctattcatccacacatccatccatctctccatccatccagccagccagccatccatctatttatccatccatctatccatctatccatccatccatccatccatccatccatccatccatccatccatccatccatttatccacccatccatccattcacccatccatctatccatccatccatccgtccatgacctattcattcacccacccatctatctatacatgcaaatactcatccatccacccaaccacccatctatctatccacccacgcattcatccattcacccactcattcatccatttacccacccatctatctatacatatgtccgtccgtccatccatccatccatccatccatccatccatccttctatccacccattcatcttgtcacctgtacagcatctagtatgcactactttgagacatgctcaaataaaaaacataaattccttgtttttcaggagaatataatctagtgggggagacaatgtacatatgaacagttctggtatttaattttcattaattggacaaattgagatagatttaatgtagtttttccaggagcacacagtaaaatattagtaagtttatgtttagaaaacagagatcagtctgcaatgcttggaaaatgaaaaggaaacactacttactggctctaattgaaattagtgttaatactctgataaatttgatgaagtttgggtaggaaaagtcttactcatcaaaaatgtcttccaaatattttgttggctgggcacagtggctcatgcctgtaatcttagcattttgggaggctgaggtgtgaggatcatctgaagccaggagttcaagaccaacctgggcaacatagtgagacccccatctctacaaaaaatacaaaaattagctgagcatggtggtgcatgcctgtagtcccagatacttgggaggctgaggtggaagggttgcttgaatgcaggaggttgaggctgcggtgagccgtgatcacactactgtactgcaatctgggtgacaaagtgacaccctgtcttaaaaaaataaaaataaaaaatcctccaaaacacaatattttgtctttcaaatttttcattttttaattttttcccttttgctcataatattccatccaggaacttctaatttttatacttgtcctcagtagaagagaacagtttacccagggtcactcttcctccatagggcatccatgagggggtctcaaggtccttttcccttgccttgaggtggagcaactctgaagctccccaagggatcagga

SEQ ID NO: 914554 - DNA, 4001 bp, Homo sapiens
ccaataaaagaagaaactctgtgacaatgtaacaagaaggtagtcggattccatttgcctggctccgactggtgcagggcaaagtctgaggcttggcttaatgtgcacactagggatggtcatttgatgatgcttgtcaaacccaacctcctatctgtagaaaactggagcagagacagagcaataaggcagcctgaaaactgtgggcaggctctccacaggactccttagttgttccttctgggcaggaggggacactgaacaggcccactgctagcagcactcactctcttagcagggcacacaccttggagagaaaagaatggtgtgccgagagccacggtatcctggaaataaccctgtccatcgatgcaacaaggccacaagcaaacattccccagaacaatgcaaacaaaccgagcgactgccactaggtgttctgaagagcgatgggtacattatgtctcaaaactctttagtttgaatactgtttacagtgaaaatacactaacgacctgttcatctttttccatgatcatgtcgactccatctcctggggggtcatcagaggggcccttgatatcatggctttcctgctccctaaccttaccacaacagttcataaaagtctcatctctaatggctctactgtcctctaaaatcatgacaagaggatgacggggtgacactttggattcttttaaatttttctatcgaggtcaaagctccagagcagggcttaaaacattttggagaatcccctggattctctggagctttgaacataaagcgactccacctgaagacgcctttggcttctttatttataatataggggagaagaccttatttaatgctaagccagggtcacttgacacccctagaggcaggacggtctgggtgcagggtagccaggatgggtggtagggcggattcaaacgagccagaggcttcggagtgatctccccgagcccagcaacgggctcttgaagaatgcgagcaaaaacccgtcccgccctcacactacgttatctcccttccgcccctccctgagtagaccgtaagagccctagaccaggagcccctgttctgccactcactggctacaagtccttgggcaggtcgactttgggtctccagggctcaagggtctcatctgtacaacggggatcatgatctccgttccacaggcagttgtgaggctcaaaggggtaacagtgcgaacgcgctttgtcagaggctgaaccctggcccaccggcgcgttaggaccatgacgaattacttccccggtctcggcttctcccctctggccttccagccgtggcggggttggggggatcgtgctgttcgccggtcaccccagggtcagggtcctggctgcgtccccgccacccagccccgggtcccctcacctccatcggttgatcccgactgaggaggaggccgcgaaccacgggtcgagaatgtaaacgcagcgcacgcagcgcgccccgcgcacggccgccagcaacgccgggttgtcgtggagtcgcagccctttgcggaaccagtgcaccgaagaggcgctgtccgtgccgggcgctggcgccggggccacagctgccgccgtcgccacagtcgccgccatgactgtccagactgctccagccacccccgctccgccccggtaggcgacgtggaccccgcccatagcccgcccagtgacctatgacgccgcaactccacccttagtccccgcccacagggccccagagcccctctgccattggctgagtgccttccacctggcgattggcccagaggcgccggaacaggcccgccccctcacgttcctaccatgtgtgggtccgcccgggtggagctggcatgcggacaagtgacgcaggctggggctgtccgcaggctggggctgtccgcggagtgccgggagtaggccaagtctcaagggacagcggatctcttacccacgtcctgttcagggcctgcttctagaagaagctgcctgggctggtaggggttgctgtgactacagccagtgacttgcaagactgacagctgaccttcctattatcaccaacatcgtcaccatcaccatctacatcattctactacagctgccatttattaagtgcactttatatggcaagagacatgatcatctccttacgtagacggtctcatttactattctcaactcagcccagttacattcatttagcgaaccccagtgaaaaagctgctgttgttttcgtttcacagatgaagaaaacggagggtgccgcaggttgagtgacttattcaatatcataaagctgctaagaggatttcacccagattattctgatttcgaaatttctgcttttatccacgaagctatacttctctttgtgcgaagatccttggtaattccaagtggcagagtctaaggacggggaaggagtgccctaatatgcagcagtagaggatttgggagtaaggactgggaatgtgggggacttgaattgagatagtaattatgccatcagatgaatttattttcttttagtctgtttagtagatccagtgtgtgcaaagcactgtactggattccgggtagggttcagagatgtggaggacactgtccccattcttctgggacgccaggtggaaccctcttgggctaagacggcttagtcaagctgcagctttggggttatcaggtggaaaacagtctgtttcaacttgaccctaggttgagcccatgcttggaacccttcctggacctgggacagagtgatgaaagcatttagtaatttagtctgcaatttagtggcattaattggcaccactctctaaaccagtgtcactgcaatcctaggcattctctgtcatttccagggcttttcacgagctgttccagcagtctagatcacactccctcttccatctttgtttctaactccagtttgctctgtatcattgttcagtatagatgtcaccttcttgctgtctgatcccaacctgaatagtgccccatcttattctgtgcttctttttggtcacttgtcttggcacacaatactgaaatttcttgcttaaaagtctttctgccccattagagtataaactcctggagagcaggggctgtggcttatttacatacagttgtatgtctgaagtctagctcagggcttggcacctaacgctcaaggattatttgagtaaaaattgaactagagtctcatattggcaggctcttaaaggtttatcctagtccgcttacctgaccctttccttatttttgaatttcctttccaaattcttgctgaataaatcgatgcaatctttcattacttttattttaaggttttgtgttccccctctcctatgccctcttctctccacaaggttggtgctttgctaggaatgaaacagagtgtaaggaggtggttctcccttaacctcagagatgggtcctcttccctttttctcctctaaattcccataatgctatatctgtattccgtgaaccctgtgaggcagggactgtgcttgtcttacttttcagtgtcttctcagctggtactctggtacctaacatatagtaggtgctcaaaaaacatttgttgaatgatcaaaagtcacttccctcccctcccctcgctctcttattaagctatcatgagaggcagtgtgatgtaatggttaaacctgaggctttgcacattggagttgctgagttcaaattctagttctgcttttattctctgtgaccttggataagctagttaacctctctgttcctcactttcttaatctttgcaatagggtgataatagcacttaggatatagtaagcatttgtactgtgtcagctactgttattctgaacagcaggacctgtgtctggttttgtcttccttgtaatgctcagccctgggtcttacatgtaatgtgggctccataagttgctgactacataaaatattttacttatttttttaaagtccttgaaattttgc

SEQ ID NO: 914555 - DNA, 4001 bp, Homo sapiens
agcaacatctagagcagtacctggcagatattaggcacttattaagtgatcaattaatatctgcattcttacacagcctctgacttcaggatttgactcaggcatctgagccacattccttttcttcttcactagattgatagcacgatcacaaaatgatgacccacaaaaatccataaacacctggttcctagcaaactggagtttaatcaacaggaattttattgttgatttttaatcttccctatcaaaaaagagtaggcagtactatgcaatgtcccccaaaacccaataaaagaagaaactctgtgacaatgtaacaagaaggtagtcggattccatttgcctggctccgactggtgcagggcaaagtctgaggcttggcttaatgtgcacactagggatggtcatttgatgatgcttgtcaaacccaacctcctatctgtagaaaactggagcagagacagagcaataaggcagcctgaaaactgtgggcaggctctccacaggactccttagttgttccttctgggcaggaggggacactgaacaggcccactgctagcagcactcactctcttagcagggcacacaccttggagagaaaagaatggtgtgccgagagccacggtatcctggaaataaccctgtccatcgatgcaacaaggccacaagcaaacattccccagaacaatgcaaacaaaccgagcgactgccactaggtgttctgaagagcgatgggtacattatgtctcaaaactctttagtttgaatactgtttacagtgaaaatacactaacgacctgttcatctttttccatgatcatgtcgactccatctcctggggggtcatcagaggggcccttgatatcatggctttcctgctccctaaccttaccacaacagttcataaaagtctcatctctaatggctctactgtcctctaaaatcatgacaagaggatgacggggtgacactttggattcttttaaatttttctatcgaggtcaaagctccagagcagggcttaaaacattttggagaatcccctggattctctggagctttgaacataaagcgactccacctgaagacgcctttggcttctttatttataatataggggagaagaccttatttaatgctaagccagggtcacttgacacccctagaggcaggacggtctgggtgcagggtagccaggatgggtggtagggcggattcaaacgagccagaggcttcggagtgatctccccgagcccagcaacgggctcttgaagaatgcgagcaaaaacccgtcccgccctcacactacgttatctcccttccgcccctccctgagtagaccgtaagagccctagaccaggagcccctgttctgccactcactggctacaagtccttgggcaggtcgactttgggtctccagggctcaagggtctcatctgtacaacggggatcatgatctccgttccacaggcagttgtgaggctcaaaggggtaacagtgcgaacgcgctttgtcagaggctgaaccctggcccaccggcgcgttaggaccatgacgaattacttccccggtctcggcttctcccctctggccttccagccgtggcggggttggggggatcgtgctgttcgccggtcaccccagggtcagggtcctggctgcgtccccgccacccagccccgggtcccctcacctccatcggttgatcccgactgaggaggaggccgcgaaccacgggtcgagaatgtaaacgcagcgcacgcagcgcgccccgcgcacggccgccagcaacgccgggttgtcgtggagtcgcagccctttgcggaaccagtgcaccgaagaggcgctgtccgtgccgggcgctggcgccggggccacagctgccgccgtcgccacagtcgccgccatgactgtccagactgctccagccacccccgctccgccccggtaggcgacgtggaccccgcccatagcccgcccagtgacctatgacgccgcaactccacccttagtccccgcccacagggccccagagcccctctgccattggctgagtgccttccacctggcgattggcccagaggcgccggaacaggcccgccccctcacgttcctaccatgtgtgggtccgcccgggtggagctggcatgcggacaagtgacgcaggctggggctgtccgcaggctggggctgtccgcggagtgccgggagtaggccaagtctcaagggacagcggatctcttacccacgtcctgttcagggcctgcttctagaagaagctgcctgggctggtaggggttgctgtgactacagccagtgacttgcaagactgacagctgaccttcctattatcaccaacatcgtcaccatcaccatctacatcattctactacagctgccatttattaagtgcactttatatggcaagagacatgatcatctccttacgtagacggtctcatttactattctcaactcagcccagttacattcatttagcgaaccccagtgaaaaagctgctgttgttttcgtttcacagatgaagaaaacggagggtgccgcaggttgagtgacttattcaatatcataaagctgctaagaggatttcacccagattattctgatttcgaaatttctgcttttatccacgaagctatacttctctttgtgcgaagatccttggtaattccaagtggcagagtctaaggacggggaaggagtgccctaatatgcagcagtagaggatttgggagtaaggactgggaatgtgggggacttgaattgagatagtaattatgccatcagatgaatttattttcttttagtctgtttagtagatccagtgtgtgcaaagcactgtactggattccgggtagggttcagagatgtggaggacactgtccccattcttctgggacgccaggtggaaccctcttgggctaagacggcttagtcaagctgcagctttggggttatcaggtggaaaacagtctgtttcaacttgaccctaggttgagcccatgcttggaacccttcctggacctgggacagagtgatgaaagcatttagtaatttagtctgcaatttagtggcattaattggcaccactctctaaaccagtgtcactgcaatcctaggcattctctgtcatttccagggcttttcacgagctgttccagcagtctagatcacactccctcttccatctttgtttctaactccagtttgctctgtatcattgttcagtatagatgtcaccttcttgctgtctgatcccaacctgaatagtgccccatcttattctgtgcttctttttggtcacttgtcttggcacacaatactgaaatttcttgcttaaaagtctttctgccccattagagtataaactcctggagagcaggggctgtggcttatttacatacagttgtatgtctgaagtctagctcagggcttggcacctaacgctcaaggattatttgagtaaaaattgaactagagtctcatattggcaggctcttaaaggtttatcctagtccgcttacctgaccctttccttatttttgaatttcctttccaaattcttgctgaataaatcgatgcaatctttcattacttttattttaaggttttgtgttccccctctcctatgccctcttctctccacaaggttggtgctttgctaggaatgaaacagagtgtaaggaggtggttctcccttaacctcagagatgggtcctcttccctttttctcctctaaattcccataatgctatatctgtattccgtgaaccctgtgaggcagggactgtgcttgtcttacttttcagtgtcttctcagctggtactctggtacctaacatatagtaggtgctcaaaaaacatttgttgaatgatcaaaagtcacttccctcccctcccctcgctctcttattaagctatcatgagaggcagtgtgatgtaatggttaaacctgaggctttgcacattggagt

SEQ ID NO: 914556 - DNA, 4001 bp, Homo sapiens
gagtttgaaggcagctctttccctgcagattgtcatgaaccaaaccagaaaggggtatcctgtagagaagttaggggacggaggataaacttgacagtgcatgaaaaaatgtaataaatgggatacagaggactatcaaatagaaacaggtgatgggggaggaaggcactagcaacctcctcatttttcttcacatttggacacacatgtgcctaaaatggtttaggcagggtaggaaaggaaaatggatggagaagtttccaggaggttccagtaaggactctcccgtcctagctgtggggagactcacctctgagagtccagtgtcaaaccagctgggtgcccgcaggaaggagggtggccgaaggtagaagggactcagggaagtagacgtcgggaaaagatcagactccaacaggtgctctccgaagaactggtcaaagaggcggctgggggagtggaaaggaaagaaggggcggcggatccaggggtggtggatggcgatgtccatggtggctaggtgagtgtgaggggtcagctggctggtcagctccttcagctgcagctacagccagccccttatatatgcagtcttgtgaagcttctggaatggtgatgtcaggggttttattatcctagctcaccagcagttcatggagacttgtgatccgggatttggcaatgtgacacatacccagtactcactgagctaagaaaagagagacacaaacacgtctgagccggccagtgacttgtcatggtcttgtttcactagctttctgtccacacccaatggcacccacccccacccctgttctctgaagctggtacagagtcaggaatcccaagcaggcacgcggggtggggggaggatgggagccggcgtagtgtgcccctcctcctcctttccagtcctgaatgccaggggaatcaggccagcaactatcttgggcctgggcagggactggaatcttcctaggctgagccccagggacattaactctttgtgagtccttggaagagagcagtgatggtcaacatgtcagcaccagccatctgcctcgtgccctgggttgacctgggtttaggagaggatcccacatctgggcagaaagaccccaccccctgaaaaaagagcaaacagatttcttgcatctttcgttctatgtggctctcagaacattaaatccaggagtgctttaggaattgggtgcacagtgcctgccaccgaagaggagaaaatgaggtgtggaaacgtgcaaaccgtttgtgagggtctcagcgaggcctcttcatgccccaggcaccaccagctccccctccccagctcgttcccagccaggaccctcagctgtcctctcaggccccctgcgacagctgaagagtgtgcgggggaggggactaggggtccgggcggcgctggtcacaccctcgttgctctcactcagggcccccactcccagcccctccccccccaagaggctcggcactattttgggtggtgtcgaccccgcccccacctcctatcgagccctggctctccgggcagctggaggggtcgcgctgcgcctgttggggctgcacctcggaccagggcttctgctgcatctgcagccatgtcgggccgctcagtgccacatgcccacccggccaccgccgagtacgaatttgccaacccgagccgcctgggtgagcagcgcttcggagaaggtatggcacagacaccacccccttgccccccacccccaccccctgaaattctgggctgacctcccaacgttgctggcctccaccccactctgggcttaactgatctcctgggaccagccaccccccaccccagactacccctcatcccctccaagcagagatctttcccattcctgctgacctcaagacacacttggtgcttgcagtgctgatacctgctctttgccggcctgggtgtgcctccttgtcccccttctatccacccaggccgtttggtgcctcctcctcctccccctcctcctccttctcctcctcctcctccctttcctttccgttctctttcccctcttccgagctgccttctcctcctagctacagtgtggcctccctcccgttccctactcctcctgactcccctcttgctcttcccaatccctcctctccagatttcccatttcgcccctgtgccagcctcatcctccctcatcctgcctcttgccttctctctgccctttaggcctcctgccagaagagatcctgacccccacactctaccatggctactatgtccggcctcgggccgccccagctggggagggcagcagggcaggggcctccgagcttaggctcagtgagggcaagttccaggcatttctggatgtgagccactttaccccagacgaggtgactgtgaggactgtggataacctgctggaggtgtctgcccggcacccccagcgcctggaccgccacggcttcgtgtcccgagagttctgccgcacctatgtcctgcctgctgatgtcgacccctggcgagtccgagctgctctctcccatgatggcatcttaaacctggaagcacctcggggtggccgacatttggacacagaggtcaatgaggtctacatctccctgctccctgcgcctcctgatccagaggaagaggaggaggcagccatagttgagccctgattgccacagacccagcacccagcaaatccctctctacctcccaaggtgatatgggcagctgcccaccactccagaggtagcagcatccttgggggaagggaaaggtgcatggtccacaatgtatggtttggtcccatgggacatgtcatagccttggtttagttttgggtggagctgaataaacccaaatctcagggccttgtttgtactgctccctattctgtggccgggaagctgggatggggagggagggaggaggtcacagccagctagacaaaaagctcctcagtttgatgtgcccaacgtcataggaccctgagctcgcacttggatgctgagatcacacccggaagctgactctggctccagatcaaattcctagccataattttctcacaatgcaacaaaagagagagtgatcctgggagggaaaagggatatgccatccaaacagcccagagggcactgtctgagctggtgattagagacacaaaaacaagggtctccagactgtctggccctttttgggtaggggctgggaaaatggtttttggctggtgagagttgcctaaagtcctggagtgaatactttgttttcatgtactaaggtctgtccacttaaatggtcactgattttgagagcctgagtatgcatacacagggcacagacacaaagcctctccaattatcacggaaccccattaccttcccatcctctgggggtacggtgtattcaggaaagcctgaggtctgtcccctcagttattctctgcaatcaagagaacatccagctacatgatttgggggaagtgtccaaaagaccttcctgcctccaaatacatatttcattaggctgtggtagatacctacaattcttccattaaagcagttgtttcttggctgggtgcagcagctcacacctgtaatcccagtactttgggaggccgaggcaggaggatcacttgagcccaagagtaagagaccagcctgggcaatagagtgcaaccttgtctctacaaaaaaataaaaattagccaggcatggtggtgcatgcctgtagtcccagctacttgggaggctgaggtgggaggatgagctagggaggttgaagctgcagtgagctgagattgcgccactgcactccagcctgggtgacagagtgagaccctgcctcaaaaaaattaaattgaattgaattaaattaagtggttgtttcttaacttttgggagttatagacccttctgaaaatctgacaaaagctatagctgctcttaccagaaaaatacatatgctcccaaatttggcaatacaatttgaa

SEQ ID NO: 914557 - DNA, 4001 bp, Homo sapiens
aagttcccctggtgattctaatgtggcccagattcagaaccactggcttaaatggggcatcagcatcccatcatcccatctaaggcgatcaaatcaaaggccacatctctggccataatagtaacaacagcaatatgtctatcctaacttagtcttctagacattgatttgtaacccctgatcccgactgttatggcttgggactggaatgtagccagcctccaaagctgatagcactacctggactattacagtatgcactgaatgaatgagcagaaaacaaaaaaacaagctacatacctggcgctcttcatgttttccatgcacctcaatcacatctcccaacaccttaactttgagttcctctggggagaagtgcttcacatccaggttgacagagaacctgtccttctccaggcgcatctagaaatagcaaggtaagggaatgggatgggagaaagagggcaaaaatactgattacacaggtgctgtcttattctgcagagctgctttctgtccgggtaattcatccttctcttctctgcttaaaaaatctcctttttaaataaacatagctgtctgcttcagggagccaccacagtgatacctaaggctcatggtgatcagacccaaactttatttacagggacagagaagaagacagatcacccaggggaccagtcgcaaggatgggtgcaagcctggcatctgctgcctctctgactccaatgcctggctttgtggtttgtctgtgagacaaaggcctcttcttctggctcaggtctctttgccagttttccacccacccaatctggaatgttctgctggtcctgcttgtccttccaaagcccttgcccactcagctcctgtttactcacacttgaatatttttaaaccagagtgttatctgtgacagctctgtcaaccttatttgttcaccctgttcttccaccctcttaggacaaatgggcgtccctatattgtttcctcgtagggcttgattggacccaggccagcgccctgtcgtagccctgagaaacccagaaaatcatagaagagggaatagaaaggcagaaaatacccatggggatgaacagctcaggatgaggcagggctctctcctggctctgaaacctgagatggtaaaatcggtcaagagtccaaggtgttggaagagataagcaaaggagtttgaaggcagctctttccctgcagattgtcatgaaccaaaccagaaaggggtatcctgtagagaagttaggggacggaggataaacttgacagtgcatgaaaaaatgtaataaatgggatacagaggactatcaaatagaaacaggtgatgggggaggaaggcactagcaacctcctcatttttcttcacatttggacacacatgtgcctaaaatggtttaggcagggtaggaaaggaaaatggatggagaagtttccaggaggttccagtaaggactctcccgtcctagctgtggggagactcacctctgagagtccagtgtcaaaccagctgggtgcccgcaggaaggagggtggccgaaggtagaagggactcagggaagtagacgtcgggaaaagatcagactccaacaggtgctctccgaagaactggtcaaagaggcggctgggggagtggaaaggaaagaaggggcggcggatccaggggtggtggatggcgatgtccatggtggctaggtgagtgtgaggggtcagctggctggtcagctccttcagctgcagctacagccagccccttatatatgcagtcttgtgaagcttctggaatggtgatgtcaggggttttattatcctagctcaccagcagttcatggagacttgtgatccgggatttggcaatgtgacacatacccagtactcactgagctaagaaaagagagacacaaacacgtctgagccggccagtgacttgtcatggtcttgtttcactagctttctgtccacacccaatggcacccacccccacccctgttctctgaagctggtacagagtcaggaatcccaagcaggcacgcggggtggggggaggatgggagccggcgtagtgtgcccctcctcctcctttccagtcctgaatgccaggggaatcaggccagcaactatcttgggcctgggcagggactggaatcttcctaggctgagccccagggacattaactctttgtgagtccttggaagagagcagtgatggtcaacatgtcagcaccagccatctgcctcgtgccctgggttgacctgggtttaggagaggatcccacatctgggcagaaagaccccaccccctgaaaaaagagcaaacagatttcttgcatctttcgttctatgtggctctcagaacattaaatccaggagtgctttaggaattgggtgcacagtgcctgccaccgaagaggagaaaatgaggtgtggaaacgtgcaaaccgtttgtgagggtctcagcgaggcctcttcatgccccaggcaccaccagctccccctccccagctcgttcccagccaggaccctcagctgtcctctcaggccccctgcgacagctgaagagtgtgcgggggaggggactaggggtccgggcggcgctggtcacaccctcgttgctctcactcagggcccccactcccagcccctccccccccaagaggctcggcactattttgggtggtgtcgaccccgcccccacctcctatcgagccctggctctccgggcagctggaggggtcgcgctgcgcctgttggggctgcacctcggaccagggcttctgctgcatctgcagccatgtcgggccgctcagtgccacatgcccacccggccaccgccgagtacgaatttgccaacccgagccgcctgggtgagcagcgcttcggagaaggtatggcacagacaccacccccttgccccccacccccaccccctgaaattctgggctgacctcccaacgttgctggcctccaccccactctgggcttaactgatctcctgggaccagccaccccccaccccagactacccctcatcccctccaagcagagatctttcccattcctgctgacctcaagacacacttggtgcttgcagtgctgatacctgctctttgccggcctgggtgtgcctccttgtcccccttctatccacccaggccgtttggtgcctcctcctcctccccctcctcctccttctcctcctcctcctccctttcctttccgttctctttcccctcttccgagctgccttctcctcctagctacagtgtggcctccctcccgttccctactcctcctgactcccctcttgctcttcccaatccctcctctccagatttcccatttcgcccctgtgccagcctcatcctccctcatcctgcctcttgccttctctctgccctttaggcctcctgccagaagagatcctgacccccacactctaccatggctactatgtccggcctcgggccgccccagctggggagggcagcagggcaggggcctccgagcttaggctcagtgagggcaagttccaggcatttctggatgtgagccactttaccccagacgaggtgactgtgaggactgtggataacctgctggaggtgtctgcccggcacccccagcgcctggaccgccacggcttcgtgtcccgagagttctgccgcacctatgtcctgcctgctgatgtcgacccctggcgagtccgagctgctctctcccatgatggcatcttaaacctggaagcacctcggggtggccgacatttggacacagaggtcaatgaggtctacatctccctgctccctgcgcctcctgatccagaggaagaggaggaggcagccatagttgagccctgattgccacagacccagcacccagcaaatccctctctacctcccaaggtgatatgggcagctgcccaccactccagaggtagcagcatccttgggggaagggaaaggtgcatggtccacaatgtatggtttggt

SEQ ID NO: 914558 - DNA, 4001 bp, Homo sapiens
tccaggttccttggaaagccacagacagaagccctgtggcaactccacttacgcaagagggagccagctggtgaggccagggctgcagccagactcttccaacccttgtaaggggacacaaaatctagaaggatctgaccctcacagcttcccgatgcacaaggctgggaaggtaagctagttcaagtccaggcatatctatggaaccaaaaccctatagaagccccaaactcagagacagaagtattagcaagttccaaatcagggtcccattgacacctgcgctatctactgtaatcacttctttgttttgaaataggatctctggcccccattactgtcactggtgctgccagagaatgacaatgagcttaaatgtcatagggatttggggagcaattttcttttttttttttttcagcctattataatttttttttatgactgaactactataaatccacaagcaacggttcagacacgttgcttctgaagtgtttcacccctccccgccaggcgcaagctgcatcaaggagggggtggactcccccacctctgctcaggcatcaggagacagatagggccgttactgctgagcgccagtggcagctggaacaggcatcccaagggggttggcagcagcaatcactggtgagcctgccagaggtccaaggggtgaaggagttggcactgaagaaatccctgacatcacattggcgctgctgacgggcgtactgccccctggcatgctagatgaacccattcgagcctggtccttcacaacagtgtagaaataggggtgctccatggcctctcttgcagtaagccgtgactggtggtcatatcgcagcagtttgtccaggaaatccaaggcctcagggctgacaaggtgctgattttcactgtggacaaagcgttcccatcgctttcgagagtgtctgcccaagatatcattgaaacgtggatctaattcaatgttgtatttgtcaatatagccatataaatcttctgtccccagaaacttggctatcctcaccaactgatcataattgtcacgtccatggaaaaatggctccttccgaaagatcatacttgccagcatacaacccaatctccacatatccaaactataatcgtacatctgatagtctacaagtagctcaggacctttgaagtatcgggaagcaactcggacattatattcttggccaggatgataaaactcagccaaaccccagtctattagtcgtagctttctgtgctcatgatcaatcatgacattatggggcttgacatctctgtgcataattcccatgctgtgacaataatccagggccttcagaatctcatacatgtaaaatcgaatatcatagtctgttaacgtctggtacaattgcttgaagtctgtgttgtttacgtgttcaaaaaccaaggcgggggttcgtgacacagggtcttttacaatgtctgccagtgtgatgatgttgggacctcctctcaaattctccaaaatctttatttcacgcttaattttcttcttttttactggcttgagaattttaacaacaactttttcattatttgtgatgttgatggcttcaaatacttcactgtatttacctcggcctaattttcgaaccagctggtagtcatcttgatttccccattccaccacatgtgactcgtaatcccagtattctcgaggtctgtgtgtattaacatctgtgtaaactctggccctgcttggcacgggtcccgacatgtcagacaggttggcggacaaagctggacttgatgtttggagatctggcagtcactgtgttcagaagcagcttgggggtaagaccttgtttcagacctgttttcttcacactgtggtggaagcggcagcggctgtggccgctctcccttctgctcacacagacaatatggcggcgatggagtggggagcaattttctaaaatccaaataaaaaccttcccatctctaatctgagagtcatttttatcagctaactgggctcatctatttactcagcatattcagagccctttttgggggttaagtccctttcaattgctgtgaggcaccgtctccttgtggacatgcttgtgctatccagctgctattcaaagcacatctcctggaccatgtttaatttatactttcctatatgaagatgaaccacttactcacttaaagtatttctttttttatgtctctaatcagtggctgtttctttcctctctctgaagcttaatcgaatcagaaacaaatcccacacatatgaatggctcattagcatgtcccagtcagattcaaattggccgtccataccagatgcccccaaaaggataacactggcccaaagaaggactctttaaacgagtgtccaaagggtgttgccatgataagccaggagggttctttctgaaatccagggtagatacactctgtcattcccagcaccatagagccaactgatggcaggtaatggatgtgtcattgagatggggttggtgggaggcaatgtggccaagcctggggagcagacatcagaggaatgtctggtgtctatgtgtctggctcaagcatcatcctcacacttggctcagtggggcccttttatcaaatgatacaaatgaggctgagatgctgaacattctctcgctcagaaatgatatttgttctaaagagcttcccctcttaatcaaatgaaactcagattataaacactggtatgctacatcttctcttaaaggatttgctcttttcatagacatcagaatgaatcgtcagcatgggcatcatcactggtgtcatctctgaaagtcaccgatagcaaactctcatttaatacagatttacaaaagagatcagcatactgcaatagagtagaactgaagggaacctaaccaggacctcccttcatttcccaggtgagcaaactaaggttcagggtcacaggataatttagaagcacagtaagatatggatccaagagcctgccttttggaagacaggaagtcattatggttcagagcatagcctctggggccaaacagtcttggtgtcaagtcctacatttcccatttgctgaactggtgactttaggcaattcacttcaccttccaacactcagtttccttgtctatgaaatggagataaaagtgataaattccaaagatagttgctgtgagaattaaatgaagtaatacacagagacagtttatttcatcacctggaagaagtttagaggcccctaagtatcagctataattattatcactataatattccactgatgataagattcactattgctataccacagcttttcgggacaggggaaaacacactacattcctctgagctcaagatttatatacccaagtgcctacgtctcaccttcactctcatgtgtctcaggcatctcaaccttaccatgtccaaaacgaagttcccgattttcttccctgcctccccatctgtcccttagtctgcccctcatccatctaatagccgaagcctgtaacctgtaattcatctgtagcaatgtcttcttcctccctctccacatccaatacatcggcaaaagcagacagttctacctcctaaatatagcttgaatttaatcacttctctccatctgcacagccaacatcctggtccaagtccctattatttttgtgtgggcatctccatccagagcctcttccctggtctttctgcgttgtcgtgttgcccttcaatccgtattgccctccaatccactttttaaaattatacatcagagcatgtccctcctctgctttaatgcagttcagcaattatttactgagcacttactatgtgccagtctttgttgtaggagatgggaatcttaccacagaacaaaatataaaaaatccctgactttctgatacttacactgtgttttttctgttacagcactccctatggactgaattgtctcccccttcctcaaattcatatgctga

SEQ ID NO: 914559 - DNA, 4001 bp, Homo sapiens
ccatgcgttgcgtctgtgaaaagcatggaaatgggcaaagcaacacataagtgcatcaagatggttctttttttccaagaaataataacaaatgtcatctttactgaaatgaaatgagacttgatgaaacaaatggctcatttatttacatcatccagatttttaaaaacgggcctccttattttcatggccattcactgcttgctgtgataacagtgttttcagcttaaaagcactatgatgtgtttgattctctcttgggtgcaatttctctcctctgtgtccctttatctctgtttctgcctctctctgaatcaaagggaagatataggtgttattatcccctttttatagatgaagaactttgtttgagaagttaggttacacagctagtatatggtaaagtcaaaccttgaactcagattctctgttccagagccaatgctctgatggaaattttaactagtagaattgctttagtcagaatttgatctagttggcattatgtagttgggagagaggacagggtggggctgagcacccacatagccaacgtaccagcttaactttatcttgcactgagagattagcagggttttacagaaacagtccgacagattcagaagaggctgtgcctacatttgctattcagctggtacaaagcctttaggagaagcctggagcagcacaagtccccaaagtgggtatcacatggccagcaaatcgacagaagtaaatcaaattgcagaggttcagagtggatcagtgggattgtcttaggaggtgtttccatgggctgtgtagtctttatgactcttcacctgtgtcaacaacaggcacttcaatgtcttttgaatttagcccttcctttgtgcctcctcttcttattgccccagttcagatgtattgcctagactttttcagaagccccccacccaggtttcccacttcccttccatttgttacaccaccaccagagtcatctttcaaaacctggatctgatgatggcacccttcagctcgcagacttctgttagtgcccccttactataagatcatgttaaaaattttgacatcattttcaaatttcttcatcttgctccagattaactttcccacttcttctcccaccatcccactttcctttatcctatctaccaacctcttcagtctaatcactgttctccaaaaatagccagtactttcatgcctctacgctttgctcatgctccctcctctgcctggaatgtcctccgcctccttcacctcctccctctggtggaatcttcctcatccttcaataaacagcccaaatggcctcttcaggggaagcctccatccctaacctttccaggtaggatgtgatactctgcactgggaccttaaaacatgctctcattatggggaactttgtctggttgtatgcgtgtctttttggatcattagatggtgaactcctctgtaaaaaagagagcatcttatttgtctttgggtcctcaatgctagcacctcgtaggcatttagaagttgaagttgaatttattcatgtagctgaataattttgagaggtcttgaaagggctacattcctaccatatctgagataagctgcaagagataaagcacaaattcagcaaaaaacatttacttacttaagtctatagccactccatctaaacataaagattggatgcatttttataatagctgggagccttttttttttttttttttggctttcccaataagtttgtgctgtgtctatagtgtaataacactggattggaatgaatagttatgggtttctagtcttaacttttctattaattagctgtgtgccctctgacaagtcagttctcctttctagttccttacttacagaatattcgtgtgaggcagatgattcctaaggtgctctctctctttttttttttttttttttgagacggagtctggctctgtcgcccagtctggagtgtagtggcgcgatctcggctcactgcaagctccgccccccaggttcacgccattctcctgcctcagcctcccgagtagctgggactacaggcacacgccgccacgcccggctaatttttagtagagacggggtttcaccgtgttagctaggatggtctcgatctcctgacctcgtgatccgcccgcctcggcctcccaaagtgctgggattacaggtgtgagcgaccgcgcccggccggtgctaattctataatttgataattcttattttccagttaggaaaactaagtctttacttcccttggagcatgatggagcttaaccaacaaagggtaaactttctacattgtcataaaaacatctttgtcctactatgaccctattaccaaaaaatgtgggtattagaaatggtacacggtattttatgaagtgagaactcctgatatggggaaaaacaaaaacagaaaaaggcagacgcagctaacaaccaaaaaaactccttattgctaaaacatcagagttctgctcctttaaagttggaaggcctcacatcaggagaagaaaaagacctcagaaagattagttgatcttttgtgttcacaaagacgaaggagttaagtcgtcaagcccccccgaaagatggtttggagtaaaaggagaagatgcttgcatgtcgagtttaaaactcgggtcctcggggaatgcattctacaaagtgacacaggtccaaagagaatcagaatcttcaaggtggtgtgtgcagcggtgtcactgccccttaatggatgctgtgacaattaccctttatataagaagagatctgagagtcccccaatattctgaagtgctgtattccaatttcttaaagatagtcttggtcgggcgcggtgtctcacgcaggtaatcccagcactttgggaggccgaggcgggtggatcacctgaggtggggagtttgagaccagcctgaccaacatggagaaacccggtctctactaaaaatacaaaattagccgggcatggtggcgcatgcctgtaatcctagctactcaggaggctgacgcaggagaatcgcttgaacccaggaggcggaggctgcagtgagcagagatcatgccattgcactccagcctcggtgaaaagagtgaaagtccatctcaaaaaacaaaacaaaacaaaaacaaaaatatagtctttatattttagagcaattttaggttcacagcaaaactgagtggaaaatacagagtttccatacatcccctgctcccacacatgcattgccccgcccactatcaacactctgcactggagtggtacatttgttgcaatcaatgagcctacaatgttacatcattatctcccaaagtctatagttgacatcagagttcactcctatggttgttcattctgtgggcttggacaaatgtataatgacacgtatccactattatatcatcatacagaataatttcactgccttaaaaatcctttatgctccatctattcatctcttctccactagcctctgtcaactactgatctttttacagtctccatagttttgccttttccagactatcatatagttgaaaccacataggattgtagccgtctcatattggcttctttcacttaccaatgtgcatttaaggttcttccatgtcttttcatggcttgagagtgcatttctttttagcattgaataatattcccctgcctggatgtgccacagtttatctatgtattcaactactgatgaccatcttggttgcttccaagttttggcaattatgaataaagctgccataaacatttgtgtgcagattttcatgaggacatagttcttgtgcagacattactcatttgggtaaataccaaatagtttgattgctggattatatgataaaagtaaatttagttttctaagaaactgccaaactgtcttccaatgtgcctgtgccattttgcatttccatcagcaataaatgaaagccctcgttgcaccgcatcctcaccagcgttt

SEQ ID NO: 914560 - DNA, 4001 bp, Homo sapiens
ggactctgccatcgttgggccacatgcaggtggaggaatctttataggctgggagctcagtgtcctgggtgaggacactgcctgattgaagccccccatgccacccatgagctcctcctggggctgagtgggagcacagcacagactcctcctcagagtgctcccaggcagccggccctgttcttatctcaggccatcgcccctcctctgtgagtctgccgccacccctgacctctgagaatattgggagtctctggctgtgtgtgggggctctaaggtttgttcctctatgcctgtgatgctggggtgtttgggggctccacatttggaggctcagccctgcaccttcagcactgtctgggctgggacagcagcagctctgctgcaggtggcagggtgacctctcagcttgggctggggagctgggagctgccagaagtgggagtgggggatgggggcagaagcgaagcacttggaagaaaccaatgcaagaagcagcactggccatttattgtgacagatacggcccacggacctgaagtgccctccaccatggccccaaacccaatggccttcgccctcggggacttatcacatctgcacacagttgtgctttaggagctgagaggagttctgccagggaaccacaaggacctcaaagtcacagcgcagcttctgtggagggaatatgggggagaaggaggggtgagcccagcctcgacctgtctcctcccaacagccagccctctgcctgccaggctgctccaggccaagagagggacaatcactgacccaacggatgtcaagccgcatgtctggggctagactccagatcttggtagccaacttccccattcccgagggaagccccagcttcctttctgcaccccatcttggcccagaggctgactcatccagaaggacgacaggttcagccagacatctagacatctacgtgtccagccaaaccagttcaggatggacaacctgagtgcctgaggctctggggagggctggggctggaggagcccagctgttacctcctgctgcgcccctgctgccagggggcaagtggtgaggtcgacgtggtctccagtgaccctggtcttgcggcagtctgtgctccccatctccatcgtcaggaagtacttgatgccggccaccagctgggggcatagggtaggggcaggtcaggggtcttgacccttgatcctcacttctcacctcttgatatattctcctgttgcccccaggcactcaggtggggagagagggagaggggatgattcagacggggtgggggggggtgggggggggtgggggggggagttctggtggggatggagggtggagaggcctggaggctgagccccaccagcagccttggcagacatcagacatgccccatctagggagctgcccactgtccccacctgccttccctcctccccgatccaccccatcagggcagagactaggaccaggcaagccaggaaggcaggtagtgcaatacagggtttaattatgtctttccttgaaatttagatggttgtccatcgtggagttttagcattaattcgatttttaaaatattgcatgaaaatatcccgattgcgcttttaggcccccttcatgcacgctggggcagcgcctgtggcctcccccatctgggccgggtgtcccctcccagcaccccgcccgccgcacctggctctgcgccttgatgatgtgcgtgtctcggaagtagtagatgctgttgctgcccatgttgtagctggccacggccgcctgcgccgccttctgcacctgcgggtcgtcgggcgacaggtcccggagttctccgaccatgcgctcctgcggccgggcccgggcgtcgcgtggcagcgccaggaggcagaatgcgaccagggccaggcccagcgccagcgggaggttcgaacgcgccatggccgtcagtgccgtcggagccctcagagccgtgagtgccgagcttgcggccgcgcagcttttacccgctgggccgccccgcccgacgcccgcgatgcgcccccgcggcctggagctggggcggggctcgaagttgccggggtcctgcgaggttcagggagcccaggaggccgagggggcggcgcgcacccgcgtgccaagacgcttccctgccctccaggacacacctggcccggggagggagaggacagcgacagtccccagcaacaagtgccagtacagggacggttcacgggagggctgtccagaatgaactaccaaccgcagctcttcgtgggctcttactgttgccaccatttcctagctgtgtaacctcggagaagtcacttaaccactcgctgcctcagtttcctcttctgtacaatgggtgttgtgaggattcagtgagctgaaacaggtaaagttcttagaagaggtctggtgctggataaacagcaggtgagtaggacacattactgctcagcgctgcctgacaaccttcctggagcgcgagtgactaatgtttctacctggccaggcacctaggcatgcttgtaattccagcactttgagaggccaaggtgggaggaccacttgagccaaggagttcaagtcagtgaatcgtgatctcaccactgcagcattccagcctgggcgacagagctagacgctgactcaaaaaaaaaaaaaaaaaaaaaaaaaaaaaagaaggccgggcatgagggctcacacttgtaatcccagcactttgggaggccgaggcaggcagatcacttgaggtcaggagttcaagaccagcctggccaacatggtgaaaccccgtctctaccaaaaatacaaaaattagccaggcgtggtggcacacacctgaattcccagctactcagaaggctgaggcaggggaattgcttgaacctgggaggcagaggttgcagtgagccaaaatggcaccactgcgctctagcctgggtgacagagagagactctgtctcacaaaaaaaaaaaagaaaaaagaaaaaaaatagtttccactttacagagaagggaaaatggatttgcccaaagacaccggcaggaaataaatggtgacactggcttgtgtgtgctgacagtctaagtcaaatctgtggtcttaaaccagactgagcccacaggacacaaactgcccagaaggagggggtgtcagtcatgtcagctctgccatcttactgacggcatggctttgggcaagtccctcaacctcccacacagagcctccgtgccctcgtctgaaagacaccttatctcctaagtttgttctgatattgatgtttcgaatctggctgtcccgtggatacagtgagcatgtgctggaggtaccagcaaacaaggcccatgactgtgtttttaaagactccaataattgccaggtgtggtggctcacgcctgtaatcccagcactttgggaggccgaggtgggcagatcacttgaggccaggagttcgagaccagcctggccaacatggtgaaaccccatcatagcccgcacggacctagggggactgaacaaagccgggcaaacgtgggaataaaagacaagagacaaaagagtatatttggaagaaggggtcagggggcaccttgcctctagtggacaagggccctgagctttacacagccctctgtatgtagtaggcaaaagagatagcgagaaagggggagggtgattgtcgggtatgtcaggtaattgtcggtcagcactttggttcacagcaggcttgtgagactgcatcctttgaacaataggtgctaattttctcagtagataacttcagggaccccagtgccaaggagtaaggccctcagcaaaccttttggtggcagggcagtgggagtttgcccacatcctgcattcgtgataaacaggtggctgtttgatcatatagccttcagtggaatgctgagttggtcacaatccctttggccctttcggctcccaacaccccatctctactaaaaatacaaaaattagctgg

SEQ ID NO: 914561 - DNA, 4001 bp, Homo sapiens
gtggctgaggcaggagaatcgcttgaaccgggaggcggaggctgcagtaaggcgaaatcgcgccactgcactccagtctgggcgacagagcaaggctccatctcaaaaaaaaaaaaaaaaaaaaaaaaaaaattagctgggcatggtggcgcgcgcctgtactcccagctacggaggaggctgaggtggcaggatcacagagcgcagggaggtcgaagctatggtgagctgtgatggcgtcacagcactctagtgtgagtgacaaagactctgttctcaatctatcagcatggggagataaagcaaatatggcaaggctttcagctgttgattccaggcgaagagttgtcctacaggtgttcactgcacttttctttcaacttttctctatgttctaaactttgcacaataaaacctttgggagaaattatttttctataaattttcaccaccatctgtcccactgaaacaccacagttctaaaacattcaagaggtcatggtaacatttccgtgtctttgtaattttagataaattctaagaattaacaatgaatttcgaaaactttcaatgaaacctcagttcattagtccttcactttcagataacaaatactagatcagaaaaggggtaaacagttttgatacagtaattttaagactttgcatgcttgggcatgctaacactatgtaaaatgtaaatagtgcgaagatttctggactgaaaccagtcctcgggcaaacacaaaacaatttaatcaaactgccgacataatgaaatctacagtcttacagactatgcaatagaacgctcctattttgcctcatctctgccaacctccaataacatcttccacgttataagctagggaacctgaaaaacgaaaacctaagtgcatgtcgttgctatggcaatgggaaatttcaggaaattgagactgcaggctacctagcctccattttagaaactgtatttatctaaacacaccaggacttagatcgaaaaacacatttaatggcatttttcataactatttagcttcctctttcacactaaaaggtaaatactatcctacaaaattctgaatacaaagagcaaaagaaacaaatcacactgatctaacctaaaagtgtgaattttaaaatatttagttgtcactcatatttactattaaaacagatgcttttatttacagtggccaaaacagacttctcattttcaacttatacctgcaatgtttatgtagctggaaaaatgaaaacgaaatgtggctaaaagaaaagaaaacgaaagaaagccacaaaattcccaaaacctcagcataacttgcttctttcttcactcgctctcattaagtcttaattctccagattagctttgtctcaaatatttctcaaactagtaacctatttctgggtacagtatatttggcggggtaaaagaaacactgtcaagtttttctaaaacgtcgggtgcacgttaaaataattcctatccactctaataccaaaacgatatcaaaggaaagcatcccatctggagtagtcccatgaatctaaataggacgaagcagcctaccgctattgtctaaatcaagtatttactcgtattcatgcctaagagagagaagtaaaaaaaaaaaaattaaatcttagatcttgctccccattcccaccactcttctatataccctgtcccccgggttcactagacccaattccttcctcagccgaacatgtctggagcagtcggaggaacagacgtggagaagaggtcgccacgaggccccaccactctccttcctcacctgctccgtggctccgtctcctgacatggcctcagctgattacaacgtgcgcactgaccgtcgatgggaagctagaaaagaaaaattaaactaaaaaccacccccaaatcagtaaagttaccccctgcccagctgagccagaccgccaacaccaatcgccaccgcccactcaaatatgaattaaaatggctgcgcccctgccggccgaggaggaggtgtgtggcttccgcattaacttccggggcagtgggcggggctaatttcgcgactctggttattccgagcgtgcagaaagcagcgagatcccggggcgggcccaattcctgggctgacgtcactaccctggcttggagaggctgttgctgagccggctccaaccggctggaaggcgggaagctgtttcgcctggaggctcgcgcgctttttggaattcagttatcaagctttagagcctggctactcacagttgaagcctgattgcaggtcagcaatgctaaacgttaaatgcctcttatatttaggggataaggactccgtggaggttttctctggtcccagctcctgctttttacttttcttgggggtgggagggatagatcaagcccccattaatttttactgccaccgtcgactcttgtgtagaaagctttgaagtctgagacctgggttttcagctcaacatctcagcttggttccttgactgcaaagtaggtataattgtttgtagcccagactgcttggattttaacgaagataagtaactctggtaattaaacttcgtacctcagctttctggcctatagatgggaataataatagtacctgcaagtgaaataaattatacatagaaaagtgttagaacagtacctggcattaagattaaatgagattgactgggcgcggtggcccacgcctgtaatcccagcagtttgggaggccaaaacggatggatcatttaaagtcaggagttctaggccaggtgcggtggctcacgcctgtaatcgcagcactttgggaggctgaggcgggcggatcacaaggtcaggagatgagaccatcctggctaatacggtaaaaccccgtctctactaaaaatacacacacacacaaaaaaaaattagccgggcgtggtggcgggcgcctgtagtcccagctactccggatgctgaggcaggagactggcgtgaacctgggaggcggagcttgcagtgagccgagatcgcgccactgcactccagcctgggcggcagagcgagactccgtctcagaaaataaataaataaagtcaggaattcaggaccaacctggccaacttggtgaaatctcgtctctaccaaaaatacaaaaaaagtagccgggcgtggtggtttgcgcctgtagtcccagttactcgggaagcttaagcaggagaatcgcttgaacccgcgaggcggaggttgcagtgagccgagattccagcctggactacagagcgagactccgtctcaaaaaaaataaaaaataaaaaattaaatgatactaaatcttctcaaactgctcttccatttaagcgtcatcgttagatgtctgcaagcatttctcgcctacgggggtccaatgccctaaaataacctagtgaactgttcccagactcgccttattcttttaggtctcctttcctctgctcaaacttacacttactccctttccacaggctgaaatcttacccttaaaataatcagacacatgagcaaaagatatgtattaacagatgttcattgcaccatccagcaatggaggactggttaaaaatatcacaagatttatctctgcaatggaatatcacacagcaaactgatgctaatgtacgatgactgacagaaaggcaaccaccgtattaaatgaagaaaagcagaatatgaaagtgttttacgtatatatacttaccactttagcatcctaatctgaaaatccaaaatctgaaatactccaatgagcatttcctttgagagtcatgtcagtgcttaaaaagttagattttggagcgttttgagttttggaacatttaggtttttttttttttttctcttgaggcagagtcttgctctgtcgcccaggccggagtgcagtggtgcgatctcggctcactgcaccctacacctcccaggttcaagcgattctcctgcctcagcctcctgagtagctgggattacag

SEQ ID NO: 914562 - DNA, 4001 bp, Homo sapiens
actctggaagcaacatgaccaacactctaaagatccaagaaacctccccaggctggagtcaaggcagagagaacatttgaaagaaaatttggaaaatattaaacaagaactacagttcaacagcctatacacattgtattttttctttctttttaactgtacttgttataattatgagattcagacatcaaaaatttcctgcagcctttgcctaggttgtatttgaaggaggaacaaagttctgtttcctcctgaagccacaacttcacaaggatgaaatcgtctttcaagaaataccctcattctagaaaagaaattcaaggaagtctagtcttaaaaaaatttgtggcaggggggtgaggggagaacgaaatcagattattaaagatccataccagtttaaagctaatgagcagcttacacactaaagcccatcttgttacaattaggacagcatctataattttcaggcggattcacattttcaaaaagagaagagaataccctagtttttcagctactgatgagttggctatataattatctagaatccgtacttttgcaagaatgtatttgcaaaaacaaaacaaatcttaagattaaatataagatatgaaagcacagtcatgggccttcagctctaagagatttcagatttcatggtaaattaactaaacaataaattcaactccaaaaaacaactttcaggttggtttaaaaataaaaatctcccttgttttctgaaatgtattttaaacactaaactttgtataaatggtttttctaaacctaattttattccacccttggccctttcagagtgcaaaaagctgaaaatattttcaggtatgttgccactttactcaggtgaaataaaaagcatgattagaatttccttatccctttaaacacataaaccaaacgttatcgtatttgcagatttaacaaacacctccacaaatctttgctatcaaaggtagtttagaaggaagaaggagatggcaattcagttaacatggttccatttgttttcttttataagccaaagaagggagactacatctagcaggagaatgaggctcccacccaccgcacctggaaaagtaagagggatccacccaggaacagcagggctgaaaccgatacgggccgttcaaactctctgggggaaaaacaataccatttacactgcaaagctccctgcaactttccacttccacaaatccaatgataaaagaaaaaaaaagttttaaacatatgaagaaccatcggtataactgggttccgacacggacaaatttctttcccaacccacatgcaacatgccaaaaaaccaacttttgatttgggctctgaaaacagaaatatgttagcttaatccagaaaaataaataaataaaatcaaagaacacaccaaaatgtaaattttcaaacctgctcttacccctctggatctattcagcttcctgtattaaagagacctagaagtttgtttctaggtcttgtatattttacctttttaaatataataaaataccaaaatctcccccgccaaagtactgaaagtagaaaagaaaaataattgcttaaaagttactcatcagcataacagactctcccgttttttaattccctccggttaccgtaagacaaaaattcgacttgcttatcctccttttcccgtcagtacatacattttcttcaaaagccacacacctcaaatgtggagttctaaaaatcagtcctttaagaaagaaacccaaggcttcgccaaggtgctgagaaagacaaatccagcagggcagttgatttttcgccacctcttcctcctttcgggatctttcctgctcttctttctctctctctccctctctcttttttttccccctcagatccaacacctaaaatggaagttgcacccagccaaaggcaagggagcctgggtggtgacaaactgatctggcagccctacccccttcgctttcctaagtgatgtcagcccctgtgagcttccaataggaaccaggcataaatcagggagctgaccttatccaataggaaactttattatagaaaattaaaaaaaagagaggagagaaagacagggggaagtttatacatatatatatttatatttatatatttatatttaaagtggagagactgtacaatctctgaggaattactgcagagctgaggggggcggaagaggcaagggagacaaggaacaagggctttttagaatggtacgcctaagtctcagttctctttgatgatgagttcttgctccctcttctgtactatcccagtggggaaatagaaaagagctgattttacttgcctgctgctgtttggtttgttgcttcctaccccaaagcatttccctaaaggaagacgggaaagaaaggagagagaaatcctaaaaacaggactactatatgttgactgggatggtaggggatatctgaggtaaactcagtttcactgttttggattaattgcattagagctattttttttttttttttttgagatggagtttcgagcccaggctggagtacaatggtgcgatctcagctcaccgcaacatccgcctcccaggttcaagcgattctcctgcctcagcctcccgagtagctgggattacaggcatgtgccaccatgcccagctaattttgtatttttagtagagacggggtttctctatgttggtcaggctggtctcgaactcctgacctcaggtgatccacccgcctcggcctcccaaagtgctgggattacaggcgtgagccaccacgccccatctagagctatttttttttttaatgcctagacttgttaacagttttaatctccatactttgaattagaaggaagcagaatccactgggctgttaaagaaaatcactgtcttcccaatttgtccccaaatcaaaataatgtgggtttgttggaaagaggaaatgaaatccaataaacaagcaatatatttagagggaataacagcataggtaaagaaagtaaatctcatgtcaagaacattttatgccgggcgcggtggctcacgcctgtaatcccagcactttgggaggccaaggtgggcggatcacctgaggtcaggagttcgagaccagcctgatcaacatggagaaaccctgtctctactaaaaatacaaaattagctgggcgtggtggtgcatgcctgtaatcccagctactcggaaagctgaggcaggagaattgcttgaaccggggaggcagaggttgcggtgagctgagattgtgccattgcactacagcctgggcaacaagagcgaaactcctgtctcaaaaaaaaaaaaaagaacattttatttctttgtgaacttcaagcttaagatgatctagcttatacattctctttttacatttgacctaaataaaggattattggggtattatttttctgagttaggacatatttttaaactgttagaccatgatggacagaggctggattttttttttaacatgcttgacaaagattagcattttatggttattccctgattactaaaacaaagacaatgatgaatcaaagatttccttcttctttcttactaatctaaaacttaccctatagactgctgccaaatgagtcttcatcaagttatcaaaatctagaatagaaatacgaaaccttggctgggcacagtggctcacacctgtaatcccagagctttgggaggccgaggtgggtggatcacctgaggtcaaaagttcgagaccagcctgacccaacatggcgaaaccccgtctctacgaaaaatacaaaaattagccgagtatggtggtgggtgcctgtaatcccaactactcgggaggctgaggcaggagaatcgcttgaacccaggaagtggaggttgcagtgagccgagatcatgccattgcactctagtgtaggtgacaaagcaaaactccgtctcaaaaaaaaaaaagaaagaaatatgaaactttaagag

SEQ ID NO: 914563 - DNA, 4001 bp, Homo sapiens
ttttgcctttaccaacatatactaattcaccagtagagcagcatatcatttaggaaaacggccttattgttccataaattattaacacaattaacttccatacacatggtataactaatctaccatgcagccaagctggctattactatatctgaaaacagaaactacatattttcctagtcaacaaataaaaaatatttgctacatgaatactgaccgccaaagcaatccatatgtgcagttgtgtgtgttcctgtttcagaatactgataacttcatctccctccggtaactgatcgaagtcaagttcaatgacctaaaatacaaaaggtaggtcttaactcttattccactttaaaattcacatttcatctttgctgcttttcgtgaatataatcaacatgcatatacatagagtacgtgttcactttcaatacggttgagctaatccatgttaatgtttaaggagcacatgacgaataggttatactataataaagttaaagcacagagaagcaaacaaaccctgctacttgtccccagatcactggaactataaaatactagaaatggtctgcttactaaaaaataacaaaacaaaatcctacttaacatagaatccaagtaaagtgcagataagcaccctagagactattatgccataggtctgactccttgagatgcatgaccctacaagccatgcaaagttgaatgccactgcacacattaatcatggaggtggcacctgcgtgtaacagacagtcctgactgtaagcacaaaaataataataggaaaatgtcctggaattagaggtaatgactatacaactttgcgaatacactaaaaaccactgaattttatacctcaatattatatctcaaacaaaaaaaataaaaataaaagatatacaagaagactgaacatcaaagctgagagctttactcagacaagccacaggccacccatgaatgagacataggtaagcgagaggaggttaaattttatcagcacacaggggcggctaaatcttgggatatctcgttgaaggagagttggtgtagagaacacagcgcaccatgacagactcgagtttctaagggagaagaggcgacctcctatatattcccagggaaagatctcgagtttgagcagcaagcatataaaccccggaaacatcagcgcccacctctgtaatctgcgaggtgttttacagtttatcgggtactctcacacctctgctcccgtgggttggttaggaaaagagtagcgcactgtcaaattcgaacaggctggagaggaactttcaagaactccttctccgagtggccctgaggctgcagagacgcggtgcccccagcctgagagggcacaggggctgaagaagatgatgatcagaccttggccaggtatttcgatcagggctcttagggaaggaggatgctctcgcttcagaaacgaagtcgagcgaagtcggtgggggcgatcgtacaagttcatggcccccacccgcctccatacacgacacttacctcgtcagtgtcccggaggggaatctcgatggagccccgcgacatgatggggtcaaaaggcgagcaagtgtctcgccccgccgctccgcagccggtagtctccgcttcaggctaatccagaggtgagtgacggctccggctctggtcttgactgccgccccgcggcgccgctggagctctggcttctccttcccgtcagccgcttaaacaacgagcagcggacggcggacggccacttccggcgaccccgccccctgtcccggaagcactcccgggggagcgtgccctacgcgagctcagcttgtggctccggtgtttccgttttggggttggcggctccgaagcttttgttggcgtgtcggctgtagggtgccccgagagcctgcaggaccttcggaaccatctggcgtctgactctcctcagcgctggcgcggccccgaatgaaaacttggaaggcgtagccgcttggtcccgcggtgggcggggcccctgcctgacgtggacctctcgggatgggcctggccaatcctgttttcttcccaagattgttagggataattcagtcattcgtttcgcaacccatcttttggcccccgttaggtgtaagtcatacctgtgatacctttgtgactagtttaaataaaaaaatttacaattaattcggtaatcattgtgataattcatgtcttattttttttagttcttcgaagcatgtaagaagatctagtatatttgtgatttaagtaaaattgcagatgaggccaggcgcggtggctcacgcctgtaatcccagcactttgggaggccaaggcgggcggatcatctgaggtcaggagttcgagaccagcctgaccaacatggtgaaaacccgtctatactaaaaatacaaaaattagcccggcgcggtggtgggcgcctgtaatcccagctaccagggagactgaaacaggagactcgcttgaacccgggagacggaggttgcgctgagccgagatcagccactgcgctccagactggggatcgatcgagactccacctcaaaaaaaaaaaaaagaggaaattaattttagtaatatattttatttaacgtaatatatccaaaatctcatttcaacatgtagtcaatataaaaattcagataatttttacatttttttatactgagtcttgaaaattcgatatgtatttcacatgcatacactgatctcagttgcctgattttaattggaaatattggatctgtgtttagattttataaagtttgcagttgaaaaaataggttcacacactttagtttttccaaaatttaaattaaaaaaattcctaattaaattccttaattggattagtcatatttcaagtgttcaatagccacatgtggttagtgaatactgcattggatggcatcagacagtatttcccagaaatactgtttaatatattttaaagtttataaagtaagcattaaacaaaagtacacatagtggtgattgttattctccatgcccaaaagcctccctgatattaaaaactctattgataggtttggtttttcagttattcgcatccaaaggcatcatacctgataatgcagagtgctatgattgaatagttggggcactcagtttagagtgggatttggaggaagtgacatttaagttgcatctgggaaaatgagtaaggtttggcaggtaaagtatgtaggggaatgtgtaccagacagaggggacggcatgttggggaagagctttgagaacctgcaagaaggtcatgtgactagaatgtagaaaatgagggggagagtggcatgagttgaagctgatataagaagtacccagacatgctggggtttatgcttataaagcaaaactgacatcttgtcctgtttccaaaatgagtgagtgtacatattacttcccacaggaaaaacaaaatactttgtgttctgaaataaaccgtgaaacaacagtatcacactctgtagtctccaaagtgaacaaaactttcagcatttcccatatattactgactctcttacagtttaattgctgacttttgtactgctacagtctgaagatatgtgggagcttggggtcatatggcaatcatatgagaaaattgctcttttctcaccatgaagcaactaactgtaaaccttggtgtgtgttcatttgatgtatcagtccttctaaagcgtaaattcacctgtatacttttgcaagtgtttttgtaagtaaactttttttctaaatgcttttgtccttcagaatttcttttgacttagtatatattaatgatttggggttttatcttacatgcaaagtgattgaaatgctttaagtgatgtgtatgtgtcaatgagagggagaaagaataaaagagaattggttttggccaggcacggtggctcatgcctgtaatcccagtactttgggtggccgaggtggcctatcacatgagtttaagaatt

SEQ ID NO: 914564 - DNA, 4001 bp, Homo sapiens
aaggtatgacaacaaaaagataaataaacagactatcagatcctaaggaagacaatgtgctaagcccaggagaagacacaaaatgatctattcggagaagaaatggggtacctttctcctcaaaggctctacagtttagaacctcataatctgaatccttccaaagtttattcagcaaactagaggtctgtatcctataaaaccaattagtgctgataggaatgatacgtttaaccttcatagatgagggctcagacctgtgggtgcctttaattactgaattaaggccaaaggtaattttataggcagagccttcctgaaaatgattcagctgtgtccatctggagagttgtgtattttaaagtttttccatgtttgagagtaatgctctgacatgggagattgcatgtgacagggcagtgcaaatcctgatctctttctgccccaaccttcaaactcaaatttaaaaaaaaaaaaaaaaaaaaggccaggcgtggtgactcccgcctgtaatcccagtactttgggaggccgaggcgggcggatcacgaggtcaggagatggagaccatcctggctaacacagtgaaacccgtctctactaaaaatacaaaatattagccgggcgtggtggcatgtgcccgtaatcctagctactcgggagactgaggcaggagaatcgcttaaacccgggaggcggaggttgcagtgagccgagatcccgccactgaactacagcctgggtgacagagcaagactccattctcaaaaaaaaaaaaaaaaaagttacaatgttcaggattatgaaatgctatacagtcagttaaaaaggtatttctttagtaacaaatgacttaatctttgttctgttgacaagaaaattatagctgattttttactgactctgcagaagtcacaggctgtaagagggtttgggtagaccacagtgtgactcttctaactagtgattgtcttttttccaccccacccccttcactaggttctttgttctaggggtaaccatgttatctgaaggcatatggaatatctccagtatgttcaaacactaggtatttattgagagccttccatgagccaaacattgtgcagactctgggcatttctaattactaggttcagagttaagttttctttgttattaattttttaaaaaatttttacctccttgcaatgcatgaaacaatgcagagtggtactagccgttttctagtactcatcaacacccgctcaaaccaaaatcgctgggcagaaagtccctttcccaccatctaacaaaaagagaaaacttcatgctatatcctcgagagtctctgagctcatctatcttcactagtaaaatagtaataaaaaataaaaataaattttaaaaataacgctaccagatcggactggagaaccaaacgattgcagttcccaagtctctctcaaagcaaacaaaattaagcgggaggaataaaaaagttcttgatcaaagtgttgagtccccaagataaccaagaaagtgtggagttagaagttctcagcagatgaactttaacttcgcgagcctggcggggaagaaggtccccaagggtccccgaatccagtcaagatgctctggccacccacaagcgtctgcctggggggaagcggtagttggcgtggcgctgcgttaggggctcaagggcagaaaggacgacccggaggactgccgagccggcggcttacccataaccgagcagttgacatcgcgctgggaaccgctggagcccacctggaagacccaggtgcccagcaggtcaagataggtgcagttggcaggtgtgtcgcagcgcacggcgccgtcgccggagagaagcagcaggagggcggcgagcagcaaggagggcccagcacccatgctgcagggagctgagaaaagaggtgaagaattaccaggaagccgagcgctgcgggctagcggtgagtccaccacgaggcgcgcgccttgaaatagctacgccggcccggaaacccgtgggcggggtcactgagcagcaggggattgggggttgggcgccaggcgcgtgcgcgtctctgaaacggggacttgggagcgcgcgctgcccctcacttggctgcaactggacccagaactagggaagaggccagggacagattttttttttttatttttattttttttgccgagggacgtttcaaaattttgcacggccagggtgacaaaaagaggatttaagagccacaagcggtccgcacatgacccagacttcgttcctgtgcggtaacgtagggagagaaggaaagggtgtggggggaataagggagtgggtcaggtgaaagagcgcgacagagggagagatctagcaagtggagttctgttttacttgctattcttcccctttagtcttttttctcaggtccacttgcctcataaccaacttcttgttttttcctctgaaaaacttcgctagctaacatcaactattccagctgtttgagaacttatcttccttccgttttccaactcttcctacttttttatgtgcttgattttgttttgtttcctggtaaatgctgtttgcctgtttgcattcagcagaattcagtttttgtgcaaacctgcagttttgatgtattagcgttgtgggggttttccctctggcacgcacacacatggcgctctcagagatgatattgctcaaccccttttatgttacagaggaaaagcaagaggcccagagagaggaagcggcttgcccagggtgagaagggtgaggaaggaagctagccaatgggagaaggctggtcttatgaaccgttctagtgtgtcagtctgatcgccaaaaattattaggtggcactatttccaggtgcctccttgctcagtttaagtatcacccttttccgtaagagcctcccgttctttcctggcttttgttggtaattggggctcctttctcccactgagcctactaggtgtcaggccctgtggacacagtgatgaacaagacagacctgatgtgtccccgttttctttgggatatgaatttttgccccctttgcactggtcacaaatcaatattcatatgtccattttttttccaccagattataaacattcaaagagagcaggtccaaattattcacttatatctccctagattctggtttattcagaaagtgtccttgagtgttaaaataagtgtacttaatattcttatcttggttgccaagcttgaaagccagtttcaatgaggcaaaaggagttgtccttgaaagttcagaggtgaaaatactcttcaatgggggcacaaatttccaaagcctggggcggggttggtggcggggggttggggaacaccttgcttttaggttttatataccttcttagaattgaaagctgacattgtataattaagctaacacactatttatttaaagataccctgacagattaagcttcccttcctgaatctctaggaaggtgtgttactgattgttaaaacattaaatttgtattaggtcatcaatattgaagagccagtttaggtggaaatttctttgatgaatgtaatcaaagcaacacacttaattgtaaagaaagtttaaaacagtctttattcaatgattgaataatagaaaaagatcttgtggacctcttagtctaatggattcattttaaaattgggaaatggagattcagagagttaaatcacttgctgaatgtcatattgccacttagtaagatttaagaatgaacctcaggcacattgattttcagtttagtttatttctactaatctaataattcccatactgttctctctcaaaaataactactaactctccattccacgcacacacaaaaaattgattctcaaactgatcagaccccaaatcctttactttctgaaatgaaattaatatataaactgcttacacacttaataaaaagaaatgtaatgccaaatgtaatataaagaagaaatcagatatttt

SEQ ID NO: 914565 - DNA, 4001 bp, Homo sapiens
gctctgcctggcctcctctggccatcagatgggccctccacaccacctccagaagccctccttgactacctgtcctcctccacatggaccctgtggctgcccagtgccctcatcccacatctgtttctgggcatccgcacctctcctcactccatgcggctccacgaggtccaggactgcacctggggccttagaggcttctgtgctgccccccccaccgccctgcctcctccgacagctgcactcagggtacccctccagagtcctgtcacccagcacaccgccagccagggtgcaggagggagctccagactgagatcggggtcctgagttctaaacccaggaagcgagtaagagagagaggggtccctgctcctcccccagggccactggccttccccttggtgtgaacccactccttgttccaaggaagctcccctgggcttttaatcacttaaataaaacctcttccctgccccagggacttgagagtacaaggtcatagctggcttttcctggcttgtcaggggcgtgatcccggaagatgagattattgcctaagagctggtgggctggaagagctccaggttttgtcctgggggagggacacgccctccagggaccaggaagcaggtgtaatagtatcagtcgcacaagagctggaatcgggtgagggcttggattcagctacccttccctccaagaagccccaggatcgtttcccctctgctgtgtctgtcctccttggagaggggaggcctgtggataggctggcaaggtcaaggcaggctcaggcttgtggctactcccccacaacgactttaattggggctacccgcccccgggccattccccacagcctttggtgaggctcagtcctacccagctggcccagccagctccagcccctgcagccttctgacctcacccacctgccaaaaggcagtggacccatcgcagatcccaggtctcccacaaaggcccagagcaagggtggggcaggtgcccaatgggatgggtcagcatacccctcctgggaatgcgggctgccttgcaagggctggggagggggtcaagaaagcagactgcagcatggccctcctctgcccagctggtcaggcatggccgggccccatcccatccaggcccaatcggtggcctcacctggcacaggggatcggcctgaggagcgtgtgggcctcactacagcacaaccccaggcccggggtgggtgagccgacccactccccatgcctcctcctctctcagggacatgggaactcctagggtctcgaggggtctcccagcccagggcctgtgataagagccgctggagcaaacttttaaagcccccagttcacaggtggtaaaggggtccctaaggaaatggactcgcccagactcgggggctctgaggcctgacctaggtctccagcaacaagggcgctcagtacagaccccaattccacctgccccgaatgagcactacctccccccgccccgccccgtctccagggaggctgcggtcagtctgcagtcctcaaggtacaacccagggtggcatatgggggagaggcatctggcgcctctgccccgggtcccctgcacctccggagcccggcgccccgtaggcgggtggtccgtgcaggaggccgcgcagggcggcacaggtgcattccagcgcggggggcgcaaggggctcgtgggggccacaggggagcgcgaaagtcaccacaggccccgggacctcggcgccgcgacccctgcccgtccctgagccccggcccctgaggcttcacctgacgagcgcggaggcgggtgcagccagcaggcagagggcgagcggcagaaggctggagggctgcatggcggcggcggccgggtcggagagggtcgccgaggccgtgcgcttatagccgggatgacgccgcagttgggccggatcagctgacccgcgtgtttgcacccggaccggtcacgtgggcgcggccggcgtgcgcggggcggggcggagcggggcctggcctgggcggggcaacctcggcgcacgcgcacagcgcccgggcggggggcggggtggtggtgcgcctgccgcgcctacagttcccgccgctcgcgcccgcggggtcagcccggcccagcttctggggtctggaggattcccgtttcggcctggcctggggtcgtggggcggcccaccctggagggccccgcggggtgacccctgtcccggccgccgcggccgtccccgcgtccaggcctgcgcggggcgctgcgccgtgggctcctgcacctgctcctcccggcgccccctcgtccccctccgagacgctcccagacatcctctctggaagcctcttgcaaaccaaggttaaattcaaagtccccagcccaccgaatggaccctccgctcctctacagggcttccagagaaacctggaaaaccagctcaggccctgccgcaaagggggtcggacccgctccgccctctccctctgggcgctgtgcttagagactcaggcctcaccgatggctctagcctccagatcccaaattccagcctcacactggcacagcctcacgtggcagacagcaggcccgaaggcaggcaaagtattccaccctaaaatacattcctttcacatgttttgatatggcactgcacagctgtctcttgagggggcgaaattcgcgttttctagagaagctccttcccttaggaggtcgggcaccttttgtccactcacgtcaactcttttttttttttttttttttttgagacagaatctcgctctgtggcccaggctggagtgcagtggcatgatctcggctcactgcaacctctacctcctgggttcaagcgattctcctgcctcagcctcctaagtagctgggattacaggcgcgtgctaccacgcctggctaatatgtatatatacacacacgtatgtatatatatatatacacacacacacatatatagtgtatatatacacatatatatacgtatatatatacactatatatgtatatacatatatgtatatgtgtatatatgtgtatatatacatgtatatgtgtatatatgtgtatatatatacatgtatatgtgtatatatatacatgtatatgtgtatatatatacatgtatatgtgtatatatatacatgtatatgtgtatatatatacatgtatatgtgtatatatatatacatgtatatgtgtatatatgttttgtatttttagtagagatggtgtttcaccatgttggccaggctggtctcgaactcctgacctcaggtgatctgcctgcctcagccttccaaagtgctgggattacaggcgtgagtaatcccactttaactctttaggcaaaacataactctttcaaccacttgccaatcaggaaatctttgaatcccctatgacctggaagctgcccctgccaaccctgtttctaggctgaaccaatgtatatcttacatatgttgatttatggttttggcctgtaacatctgtctctgtaaaatccgtaaaaccaggccgggcatggtgactgttgcctataatcccagcatactcggaggccaaggtgggagcattgcttgagctgaagagcttgagatcagcctgggcaacatggtgagaccctgtctctacagaaaagacctgaaaattttaaaaaaaagtataaagccaagctgttacccagccaccttgctcacatattctcaggacctgctgaggtggtttcacaggtcatagtcctcacatttgctcagaataaatatcttcaaatattttatagtgtttggctttttttcaacaacactccctatacccagggtacccagatggacctcatccttactctccaagtgtcccctgcccaagcgcccactctccacctcctcagagcagcacctcactgggccctgccctggccaccctgggccctcctcccttagcccagacttgcccatctccaatgtggcaccatc

SEQ ID NO: 914566 - DNA, 4001 bp, Homo sapiens
cttcccaggtgcaaaagcagtaaatggggtctaaaggacaccacccacaagaggtggtggggaaaggccatgttgtcaaggactctccagcacaaaaaatccagcctctgccccatcccaccctgccagagtgatggagatgcagagcttcttttttttttttttgagacagagttttcgcttgtcacccatgctggagtgcagtggcacaatctttgctcactgcaacctccgcctcccaggttcaagtgattttcctgcctcagcctcccgagtagctggtatacaggtgtgcgccaccacacctggctaatttttgtactttttttttagtagagatggggtttcaccatgttggccaggctggtcttgaactcctgacctcaggtaatctgcccacctcggcctcccaaagtactgcgattacagaggtgagccaccacgcccggccaagacccatggcttctgagcgggaagataaggtaggagaaggggccaggtactcagggtggctgccaggctgggaaggcttagggagagctcaggaattatggggtccttgaacaggtacactgcctcttgtctttctcctcccacacaccaaggtgccaagttggggggaaagtcctgttctgataggaacaggtacagccaaggctgggtcctcaccttcctttgactcatatgtccggttataggtaatgacaaagttcttgaagattgaagccatcttcacaggcaagtcctggataggcagaccagtctttaggctgaccagagaaacccactccagagggaagggagaagggtgatgaggcagcggctggctcctcaagctgagggctcctcaagctgagggctcctcacctgggacaggggatcctcattcaacagggaaatgactgagctgaaagtctcgtttctgttgtctggatggttttgggacagagaagaaatcatggctgagccctgagtgaaggctgacttgggctccccagcacctggaaccttggtgtccactgggccacagtccttccgcagcagcacgtgtcttccgagctcatccaggacttggaagctgcagagctggagggagaggaagaagctgctctgggggcctggatctggatctggggagcaagatctggccaagatggagctggaggctcctcagatgagagccacccctaaggcaatcaccccatcacagtggacagtgaggcacggcctgcaccggggcatcctccccttcatagcatcttggtttccagccctcggggcctgggaagtggctcaaggtggggcagcagctacctcagatccctgcgtcttgacctgacccgtcatcatccaactgctgctttactcggcctcggggcggggaaccccaagagcctcatcactcaccagggttttcttggacacggggagccggcacaccatggggtcgttgcagggtggctcctccagggtggcctccagggagtacagcgacccctgacccgcctggagagaggagtaggtgaggcgggcacagtcggcccttgacggcgcccaaggccccgcccgtgcggcgctgcccattccccatcaccagagatcggttcgtccagcgggcaggccccatcccaatgttaggtcaaagctcctatcccttggacccgggcctggcgcccccgcccccggcgcgtcctcacccggcggacgcggccgcgcacaaggcccagcacggcccgcgtccccgcagcccggccgcggttgaacatctccagcgcgaagcgggtgggcgccagcagctccggggacggcggcccccaggcctgaaagctggcggctcggggctgggcgggggcggccactgcgcccgggagcagccccagcagcgacaggagctgcagccagggcgccatggcgagggcgaagccggcggcccggacccaacagacgctccaccgacccaccgggtaccgagcccgcggccagcggggcctgagtcctccctccagcggggcgacggcacgccgaccaatgggcgctggtttgcggcgcctgcgcgttctcttgtttacaggaggcacgtggggcgcgcagggtagggagagcgggaggctgctggcctgaggctaaagctagtcactgacctctatcacgtgcttgttatatgttaggcatgatatgccagctccttttattcggcgtagcaatctctgaagtaggtgctatccccatcgtacagtggaggaaacgaggcttggagagattaaatggcgtggccgggctctgtgactcagccctgtaatcccagcactttaggaggccaaagcgggtggatcacctgaggtcaggagtttgagaccagtctggcacacgtggtgaaaccctgtgtctactaaaaatacaaaaaagagctgggcgtggtggtgggcgcctgtaatcccagctacttgggaggctgagccaggagaatcacttgaacccaggaggcagaggttgcagtgagctcagatcgtgccattgcactccagcccaggcgacaagagcaaaactccgtctcaaaaaagagagagagagaaatattaagtggcttgccaaatatctggtaaggaattgagctaaacttaaatccaggcagttggcttctgagcctgggtttgcagcttgatcgcctctttcaggcccctcttctcaacagcgagatggcaggtaattttttgagtgctggcagcgtctcaggctgttgtgaggttcaaatgcaatcatgcaagcattcagtagccactaaggcagggtgcacagggttgagactgtcccttgaagcattcacctgctgtgttccagggtctaccaagggaaagcatgcacagatgcattacaggaatagtgctgcgttcttggagctcacagtctagagagaagaacgacagatgggctgggtgcagtgtctcacgcctgtaatcccagcactttgggaggccgaggcgggcagatcacctgagctcaggagttcgagaccagtctggccaacgaggtgaaaccccgtcactactaaaaatatttttaggccgggcgcagtggctcacgcctgtaatcccagcactttgggaggccaaggtgggcggatcacgaggtcaggagatggagaccatcctggacaacatggtgaaaccctgtctctactaaaaatacaaaaaaattagctgggcatggtggcacgtgcctgtaatcccagctactcaggaggctgaggcaggagaatcgcttgaaccagggagtcagaggttgcagtgagctgagagcgcaccattgcactccagcctggtaagacagtgagactccatctcaaaaaaaaaaaaaaattgaaactgcctttgcaaaattatgacagtaagagaaatctgacatggctgactgcatcttgctttctagcctcacaggctggctgtcttcactcattcctgggcatgggccaaggtaacttttggataaatttagcttatactttaaattagaatacgccttcctgaaaactaaaccacccttgtaaaactaatgaaaggccaccaagttaggaggatgagaggggcctgaattctactaagatgtaggcatagttaaaggattaccagccattgttctggaagtcacaagatttgcaactttgccagttactcctgtaattaacatcactatcatggaatgtaagactgatcttttgagctatctcttccaggcttttgcatttgtgactatggaatggccccacactgacgtgtgactccaccagtcctgtgacccctacccagaagcagactcagtgcaggagggccattttccacactactatgatttcattcccaagcaatcagtagcacccatatcctagccgcctgcctaccaaactatctttgaaaaaccccgacctccaagccttcagtgagactgattgagtaataaccctgtctcctgtgtggcatggcaggtcttgtgtcagttaaactcgt

SEQ ID NO: 914567 - DNA, 4001 bp, Homo sapiens
caagaccctgtctcaaaaaggcaagggtgccaagcctagagaggctgggctccctgctgggtgcttccctgcagctgctgcgctggcccctaggctggattaggacacaggactgcagagattctgcccctgcactgggtgatttgataccagcacccaagcccctggtcctcagggaaatgaatttccttccctgggaagtaaaaattgaaggtccgctgggtccagctgccagtgtccctggggagatcgcttcccaaccaccacctacgagccagaagggttaatggtacctgtgaggtcactgaatggagtcaccccaaactcagctgtgcccaagtcctcctcctgcagcctctgagcctgggccaggttgtgggcaaagatgtccaggcggtgagcatgctctggaccaaaagggagttgtcctaggctgactcccaagcccttaggggcaggaagtagccgctggctgggcacccttccacccacacccacccagttgagcactggctcctttcctgtagcccccacaaggccccactgcagatacccaggcccaggaagtggttacccagcccaccgagggttgggttttccccagaggcagccagaggaccatctctggccaccctaggtgggaagccaggcaaggggtccggtggtggtgactcaaggatgtgtggctggagaccagcttcctgccaggccacgtcctttacacctctgaccacaggaggagagctggaacatggcagggagaggagatgacaaggcacaggcagtctgggctaaaaggcacacacagatcagccccctagagagatcagcacagcgagagggcaggggcaggggttagatcatgggctagagaagaagtccccaatgtggggacaaaatgggtgtccttgggtgtttgctgaatgagcaaatgactaggtggtggccccctgtccactgcctagaatcgcagggaagtggctgtggagccaggggatcacgtaggactagggcaggaccccacctcctgccactgccctccagatccatagcaaagaatgatcctggacccactcatgccttcgggaaaccagggaacacacccccagccctggcctgtcctgctgagtggccttggccatgcctgttccccaccctgagcttcgatttcttcatctattacaaagcgggatggctgggctccgtggcttacacctgtaatcccagccctttgggaggccgaggcaggcggatcacctgatgtcaggagttcaagaccagcctggccaacatggtcaaaccccatctctactaaaaatgtaaaggttagccaagtgtggtggcgcatgcctgtaatcccagctactcagaggctgaagcaggagaatcgcttgaacccgggaggtggaggttgcagtgagccaagatgacaccattgcactccagcctggtcaacaagagtgaaactccgtctcaaaaaaaaaaaaagtgggggcttggactggagatgtatgtgccctgtgataccttctgggctcaggtaactccggttgaactggatctggaacaacttgaaggcctctttcagctctagcggctggggacctaggtcctggcaaggaaccaagggtggagaggggcagtgggcagaggaatcattgctggggccccaccttagttcccagccgtgcaaggactgggctaggggtcagccagttagccttttctgtcttcccatgtgcccttgggcacgtcagccccctctccagcctcagcaactccctctgaaaaatgagaatgacaggccagctgtttctgaaggggtgaccccaggcgtgggactggcataggtaagggtttgggagcacttacctgggccctaagggggcctctgatgccttgggctaggcctgccaccaacagggccaggaggcaggaggggtgggcagtcagtgccatgccggtgcagtctggagtggcatggaggcaggaagccgcgcagatcgaggaggacggtgtgagggtggggctggagaaaccacgaaggggaagacaggcttggtgggtggagggtggacccctagaacccacaagttgctcaggccttcaggctttcagtccctgcctgtctgctccccatcccacccctttttctttctttctttctttcttttttttttccacccaggttggagtgcagtggcatgatctcggctcactgcaacctccacctcccgggttcaagcaattctcctgcctcagcctcccgactagctgggactacaggcatgcaccaccatgcccagcgaattttttgtattttcagtagagacagcatttcaccatgttggtcaggctggtctccaactcctgacctcaggtgatccacctgcctcagcctcccaaagtgctgggataacaggcatgagccactgcgcccagccaagggaaccactcttgctcatcctatgaagctcagtcagctcaatggccgcctctttcaagaagccttccctgcttccccaacctctggtagaagctttgcagccccttcagcccagctgcacctgtgcccattgggcatctgcctccaaccacaccagaagtgttcagttcgcttgtgtcctcggtgtcctcggttcccaggatagggctaggcatgagtcaggctcgctaggtgtttgttgactgaacaattgatcatcatgagttttaaacaggaaagcaggccgggcataatggctcatgcctgtaatctcatcactttgggaggccaaggtaggagaatcatttgagctcaggagttggagacaaacttggacaactgagcaaggcttcatctctacttaaaaaaaaaaaagttagccaagcatggtggtgctctcctgtagtcccagctactggggaggctgaggccagtgggattgcttgagcctggaagattaaggctgcagtgagctatgatcatgcctctgcactccagcgtgggtccaagatcctgtgtcaaaaaaacaaaaccaggccaggcacggtggctcacgcttgtaatcccagcactttgggaggccgaggcgggtggatcacctgaggtcaggagttggagaccagcctggccaacatggtgaaaccctgtctctactaaaaatacaaaaaagcagctgggcatggtggcgggcgcctataatcccagttactcgggaggctgaggcacaagaatcacttgaacctgagaggtggaggttgcagtgagccgagatcgcaccattacactccagcctgggcaacaaaagtgaaactccatctcaaaaaacaaaacaaaacaggaaagcgcagagtcagagtccgggagcagcaactgcagccagtgcctcccgttcctcatccctcccacggtctagggatgaggatgagggggctgaagagccagaaggataacagggtgagcatcacagacggagggaggccaaagcctgacttgtgaggtcaagggctgggcagcagcattaacacccgttactgctgcctttgttctaagtgggtccttgggctggggacctcccctataggagttcaggctgagaactggtgaccaagaccagagaagggtgtgaagagctggctttctagggttccatggggtgggagacaggacagctataatcctgggatttattcacttacatgctcactactgcgtttcttttttttgtttgtttttttgagacggagtctcgctctgtcgcccaggctggagtgcagtggtgcgatctcggctcactggaacctccacctcctgggttcacgccattctcctgcctcggcctcccgagtagctgggactacaggcacccgccaccacgcccggctaattttttgtattttttagtagagacagggtttcaccatgttagccaggatggtcttgatctcttgacctcgtgatccgctcgcctcggcctcccaaagtgctgggattacaggcgtgagccaccacgcccggc

SEQ ID NO: 914568 - DNA, 4001 bp, Homo sapiens
gtgtgctagatggcacctgtgaagagcctctgcactccagcctgggtgacagggtctcgctctgtcacccaggctggagtacagtggtgcgatcgagctcaatgcagcctccaactcctgggcttgagatcctctgcctcagcgccccaagtagctaggacaacaggtgcaagccaacatgcccagcgaatttctttttttgtagacacaaggtctccctgtgttgcccaggctagtctggaactcctggcctcaaacgatcctctcaccttgacctcccaaagtgcagggattacaggtgtgagccaccgcacccctgccccaggtcaaaagaaatttcttttcagtaagatatagcagaaggttagcttctagttctaggggacctaatatcaaaacaaccctgcctccccaactttttattgagtcccacttaaaagactcttccttgttccttgagtatctggcgaatacttctctaaccagaggagaaacaggactgactcagtgctctggagccagtgactcacccacacggtcaaacacgtgaatggagacaggggcaggcggccagcccctcctgcgccacggccttgggcccggccgggcttgagggctggatcatgcctgaaggacctagtgggtgaagtccccccgacagagcctgcgcagccaagtcaacactgagcccaaagggagcgcatgggattccagggagcgctcaccggatgcctccggagcttccttcagcagaaaatgaattcctccccaaggggccccaaacgtccacagattccagcgggaggaagccctgtcccttctcacccaaggccttccagcttcagggatcaggcatcccttagactatccaggtgatggaaacgtaacagaaagccccaaagcaccgttctggtgattttaaacacaccccgaaggagggacggttccaaatttagagcctcacgactagctgcagccgcgcctcgctgcctccactgacctgattgcaaaacctccgctcaggtgcaggccgggcggatccccagctgctccgccacgtcccacagcgagcccctcaaagtcgcgcaccccaaccgccttgaccccgcggaccccatcccttttccctgcgcctggatcccttcccctggagccccaatcccctcccctcggaccctatacctttcctccgagccccgaccccttcccctcgaaccccaattcccttccctcggaccccatcccagtagctctgcgcctggaccccttcccgtcagaccccaatctcctcccctcggacctcatccctttccctctgcacccagacacctccctctcagacccctcgccctttccttgagaccccccacacccaccttccttggcccctcgaaccccggccccctccgctcagacccccgaaccccacaggcccagcccctctccctcgggccctaataccctccccctcggagcccatccccctctcctattccctcggacccaagacccctcccagcctggcccctctcctgccctggagccccccggcgcccagggaccctcccctcagagctgataccccaatttggcccctttctaaccttcctccgcggaccccagccccaagccctccgtgcccccttgccccctgcccggcctccttgggcccagacccgtcctcgtggccctcgcggacccccggccctcgccctgccccgccccaggccgggaaagcctcgccactctgccccggcccccgaaaccgcaagcggaagagcggtgagaccgctgcggccgccgcttccttcccctttcgcggccaggcgacgccacaggagggaagaagcagagcccggcctgcaccccgggcggacgccgcgctcgctcaccgccgcctggggtcggtccggcccgggtcggccctggattccgccgcgccagccgctcccaggcaccaggctctacttccggttccgagggcgggggcggggccgcatccgggtccccgcgcgaccccgccccctgccccgcctcctcccgcgtcttggcccgcaagagtcccgggggtccgcccgcagctggctaagcgctagcccggcctgtggcgagtctgcagagctcgcccggaagtagcgttgcgcgcgcagaggatgggcgctgagcagcacacagcccgcggcggggtctcaggatccgcggcgctgcccggggccgggggaaggaagccagccgaggagacgcacgtgccctgagtccgggagcggggagcctcttcatctctccatcctccctccgcgcgcgccctcagccgtcctcgtccgctcaccatgcacctcccctccaagaaagggccacatgcgtgccagggacgcgagccccggccacagggacatagcagcctagaaggtgagtcaagcgttaaaccacatgggtactcacctgggaaatgagataaatgccaagaagtgagagtttcataacatcgtattggggagacggtaggacctgaacccctgggagaccagaggtttctttgggcgattcacatgttagccaagatgtgaaggccctataagagtaaacaaggtaaggagggaagaattttccaggcaggccaacagcaggttccaacagcagggccaacagaggtcccaaggcaggaacggtcttgcagcaggggaactggaggaggctcagctcagcatggtagagggctagtggtgcagcggagctgtggtgtgagaggggccaggtcatgcagaggccgatagagcacagcgaagacctcggtctttattctgggagacacgggaagtcctcggaggaagttaagctgataagagacatcatgaagtttgggccaggcgcagtggcccacgcctgtaatcataacactttgggaggctgacatgggaggatcgcctaaggccaggagttcgagaccagcctggtcagcatagtgagaccctcgcccccgcccgccatcgctaaataaataaataagacataatgaagtttgaattgtaatgagatcactctggctgctgtgtggaagatggatgggagaagggccaggtagagcctaatgtagccaattcgggcagaccgctggtggcaggtaagatggggagaagtggatagatgcaagaggcatttagaaagctaaactgtcagatgtgaggatgaattggaagtgcgggtggcggaaggaaatgtcaggtgttgaccatttttttaaaggtaaaatcatgaccttcatacacatataaaatgaacacgtcaaatattttatttaactcgataatgaatacatcataagttgttacaaattgtttaaagaatttggccagatgcagtgcctcgcgcctgtaatcccaacactttgggaggccaaggcaggaggattgctggaggtcaggaatttgagaccagcctgggcagcatggcaagaccctgtctctaccaaaaaaaaaaaattttttttaagaaaaaaattagccaggcatggtgacgtttacctgtggtcccagctattctggaggctgaggcaaaaggaccgctccggcacgggcaacagaaaccctgtgtcaaaaaaaaaaaaaacggaagacgaatgctgaaatgaatttgcaaaaactgctctatctctagtgcaaaggtcaattgcatttaactggacacagctaatttgcattttctgtgcacaaggattgttggccaggcttgtaataccagcactttgagcggcaaggccagaggattgcttgagcccaggagttcaagaccagcctgggcaatatagaccccatctctgaaaaaaaaaatttttttttttacattgctgactgtttttttttgtttgtttgtttaatctttagagacaggggctggagtgcagtggtgcaatcaaggctcactgcagcctcgatctcctgggctcaagtgatcctcccacctcagcctcccaagtagctgtagctggaactacaggcacgtgc

SEQ ID NO: 914569 - DNA, 4001 bp, Homo sapiens
tattgtattatactaattaagtgccaggcactgttttaagcattatagatatattaactaatttaatcttcacaatgttcctatgatacaggcgctactgataatgctgtcctactcataaggaaacttgcccaaagtcatacagcttttaagtggtggctattcagggagtctaattctagggcccctctcccttttaaaaggtgatatacagtactgcctcttagtaaaatttgttcttcattttatgagacagtcccatctattagacaatcaaatatcagtggtctaaagaagacatgatggttaggttcctgtatattttctattattttctagtattcatccacattgcctgaaggcatgagaggcctcaggaagaagtggttcatcctttgtattaggctggtgcaaaagtgactgcggtttttgccattaatattatgttccctgagctattcactacccccatttctgtccgtacttttaaggcaaatgattaactactacagacacatacacagaacagactagttctaagtcttcctcattcttctccaaactttttaactggtggagaatctgcccctgtgggcctagatctcccttgctatataaaactaactttaaatactgtctttgacaaggtaactttcctgcgccctaaaacgatggtatcgcttcatcagttgtcatctggttgtgtcctgtaactgggtgggggttagaaagcagtttcctaaggaaaaagatgaactcaagaatgggagaattaggagggaaggtgtaacacgcagaaaagggaggaaggggggtggagtgggaggcactgctggtctgactcggaatttcgtgcagacagaacgagaacagaaatggaagaagtggggggtcgagtcactgaaacctgttaggcagcattttcttggtttttcctttgatgcgtcttagacattgctttacaagaaactgagacctaacagtactaacggcccagctggtcaggacaccgcacgaccattcatctcccgctcccggccagagctggtcccttgaaagcatcgctcctcgccagcgctcagccaggcttttctcccagcggccagtcggcgggagcgaccaccagagcctgtcgaccccaaggccacagacccgcgttccggtactcgccggctgccaccgcggcttccctgccagtggacaacccctgaacactcccacacttcgcagctgaacctgagccgtgcctttcccaaagagccgaacccggcggccacacagtaaaacccaagctggagtgagggtcttacctttaacagattagacgtcgccatgttctttaacttggactctcgcgagacgacgcgagaattcgtggcgctcccggccaggccttgaccggaggccggagctcccaccagggcccagggcccgtcggcccgcaccagggtgtggtgggcgctggagcagcgcgccgacagcgctgacctcgtcccaagcaccaggagcttcctcactcttctcccctacatggtcaccggagcttccccacgcgaaagacctcatgcacgcgctcaggaagaccggaacggcgaatgctgagaaggtaacgggagccgacctgacttggaagaggaagcatcgactccacgagcctccccgactccttcggattagcctttgtggttgcacccgccgcggccacctgcaacgaatttagctcggcttaggccccgcagctcaggttccgcggccacgtcacgtgacgcgagggcggggacgcgctcgggagcgagcgtgggagcctggaagcctcggtgggtcccgaggctgcagcgaggccgggaccgtgccctctgctggcgggacctggcgttttccggcaccccgccccaaatcccggactcggtgttaagggaggtgcattgtcctgaaatgcttacaacagctgtcttcaataactcgtgcatagaatgcgcccagtaaatatgtgttgactgcacaagcgtgatgactcttaatatttctattcaggaatgcttggcacttagataaaatattgttcagtgctttgggaggccgaagggggaggatcacttgaggccagttcaacaccctcgtcattacaaaaaagtttgaaaaaaaaaaaaaaagattgtttagagaatgaatattaatcttcgattttctgaaggcacattatcctagaagatcctaaaccataagcctccgggttttaccccttcagaccacacaccactggccaatgagataatataatttacatgtggaacctgcaggatacctggtattgtattttgcaggtttacaaacagccttcatacggccataatgcgtagaaataagtaagagctctggactaagagaagagggatgggcctacttaaagaatccaatcaagtagttaatacttgtttgagcacttgtatatactaggcacaggaaatacaggattaaataaaagagaagacccctgctcgtttggagtttatggcctaataaggtagccaaatgttaaggatggctacacaagtcaaatattacttagtgggagttgtgataaatattgcaaagaggccgggcgcagtggctcacgcctataatccctatagggccccgtggctcacgcctataatcggcactttgggaggccgagacacctgcggtcaggagtccgcgaccagcctggccaacatggtgaacccctgtctctactaaaaatacacaaattagccgggcatggtggcgggcacctgtaatcccagctactcgggaggctgaagcaggagaatcgcttgaaccctgaaggtggagattgcagtgagccgagatcgcgctattgcactccagcctggacgacagagcgagactcttgtctcaaaaaaaaaacaaaaaaaacaaaaaaaaactacaaacaaaaaaatacagtgtgcacttgagagcgtaggaagggaaaggaaactagtatcctaatctccatctacccaagccaccctttgcttatgcttaactgaaccttaagacaacttttgagagcttgatttcagcgtcctactgtcaaccgaagcattccaattttcctaactcacttgttctggaaacaccactgctacaactctgacttcaataagttctccattccattgaccccacctgttatctgccatctcctgttttcactctttctcatccaatttagaatcggcccactgttataaaaatgtttaaatatttaaaatgcttaaatatttatttcttaaaaatagcgcaggcacataatacaaaattcagaaggtgctaaaaataatacaatcaaaagtagtcttccttcgactttctggggtgatgtaatgttctatattgtggtagggacttcagttattcaggtgtatgcacttgtcaaaactcagccagtatacccttaagatttatgcatttcagccaagcacagtggtgcaatcctgtaagcccagcactttgggaggcgaaggcaggcagatcacttgagcccaggggttcgagaccagcctgtgcaaagtagctatcgctataaaaaataataaaatttttaaaaaatgtgcatttaattcaaagagaaaatagttaacaaaatttgaagtttaatgctacccatactgaagaatttaggagtaagtgaatctatatttataatttacttggaaatgtatcaaaaaataagatgaactgatggttgggtagaaacactgataaagcgggcctggcgtggtggctcacgcctgtaatccctgcactttgggaggccgaggcaggtggatcacctgagatcaagggttcaagaccagcctggccaacatggtgaaaccttgtctctactaaaaatacaaaaaattagccgggagtggtggcgggcacctataatcccacctactcagggggctgaggcaggagaatagcttgaacccaggaggcagaggttgcagtgagccaagattgcgcca

SEQ ID NO: 914570 - DNA, 4001 bp, Homo sapiens
agacaagatcataatttaatctgaaggttactaacagccactcttgtgatgttcccaatatttcaagaagtccaaattcaatcacatattttcctataataaggctttacagtgattaaaatgtctttaatttttattaggattatatcaactcagaacttaacagtaatacttttaatatactgactggtgctcatagtgcatactctgaggcattattatttctattatttattgttctatctacatatgaaaattcctggttagtaggaatttcacattttaaaatcacagcagaattttagtgttaaacatcctattgcattctattcctatgaaaatagataagtgacataactcaaacatactactatatcatgaccatgccatttaacagatctggtcttgttttgtgaacaataaaaaaagaaagtcttactacctgtattttatctttgtatgagagggtaggtctctgcttgaatactgctttgaaagttggctcaaatcaccttctccttttccccttccacctctggcaggttcaaaggttggcctggctgctgttgtcatcttttatgctttgaagaaaaatataatcaagttatttccaacattacaaacactcattttatagagtattaatcaatatccatactggtaaaataagttctaaaactcattccccaaaacctgcttaatcttcttaaacaaaagttttcaagaaaacaaattatgaggcttaggctgtacaaggaatatggcttctcaggcttgccttagtacaaaaaattctgtcatgaagatctgagtttgcatccctattctccttctgactatatgggcttgagcaagtcacctggcttaactttgtcatctgtggaatggagatattcctcatagattataagaattatgacacttgacatgtcaaaaccctagtaaaatacagtactgccatgactgagttttaaaaatttccaactcaaccttactctaccagactctgtaaggtttgcattttatctaaacttcacacaatagcaaataggctagtagaaacaaaagctaaaaacaaacaaaaaatatcactgacaaagttactaaatgtcccagagaaaagtgtgttaaacttcaatgacagttacacagaaaaaaattcttaaacaaccgtttgttgagccaattttctcctacaacaggcatcatactataaattagatcgtttgtgggttataatttaaggcctgttcaaaaaaaacaggaacctcacccccagaggattctgatgccaaaaatcagggactcattcctcaagttactttctgcttggagcagtcacaagaatactgtgcagcagatgcagtcactaaaaccctgttagtgtcggaaaagcaagtgtgtggggagggtgggcgaattgggaggattttttggggggggggcgatgctaattctctcaactttcaaaaagggtagagacatgtatacaaagaagaaaacagggttatctggcgctgggggcgccgccccttcccacacacccacggaattatcactccggcctcccgtgagctagtctttggctataaccagaaactcgctgcctcttcacccgtgcccagcactgcaggggtgcgaagggtagtgaagggaggacctggggttcgctttacgcagtaggcgagctgcctgtacgctgcgatctcctcggcgggcccaagagctccagacgcgcctgacaggcactcggttccgcccctagcccgctgctccagggcctccaccgcccgcgctctgcactctgccgccgactccgaccccaactgccctttcccgtcccatcgcgataagaaagataatctcctatcctcttgccgctcacactggccgaggtccgatgcagcaggctccgaagatcatacagacgccattaccactcttggctcccagaaacctctgcgcccagagctagcgcctacgacccggaagcaaaatccaagcgcttcgggggcggaagcaacgaccaatccgcagtggccgaagtggaagtcggcgtaacggcactaaggggcggggccgaagcggcccagggggcgggcgtttgaaatcagtgccttagagtagaccctaaacctcattttataccttcaagaaccaattacttaatgtctcttccgtcttttccgtccccgaccccctcccagactccttcattccggtactgcgtggacggaaagccccgggtagccgacaccacgtccccggctagcgggagagagcgtggaaaaggattacaccaaactgtttaaatccaacgactcctgcttccatcctttctcctgagctagaaccaacaaacctagagagttgggcttcggaaaaactagtgttttcatttaattggatatgaagaaagaacaaatatgtacggggcaaccacgatctttacaaaggtaccattcctgcaaaaatattaacacttcaaagcaaaggttgtattcgtaatgtttgctaaaatttcttatttaaaaaacgttagttttagtgggaggggagatgtcagtatttacgagagcgtttacaatggtgggcccaactaccaggagcacaagatgtaattattaagatggctacttaagtgttaagttttaataagacaacgaaaagtagaaaacccgaaaaccaaaaacctaccagtcgtctctcctcccttccataaaaacaaattctgagaatagagatcttggttgtttagctcatcttggtatctcatcacatagaccttgacgtatagtagctgctcaattaatatttgttaaacaaatgaaaattcaacttccccaacttagtttaaaatgtaaggaactcacaaaattgaatatttaaatgctttcttacccctaaattctttgcaactttttaatgaagaaagaaaagcagaaaaagccctttcagtcatagagttcaagatgaaaatcctgatttttcttaccgaaggtatccctcctccagtcttaacaagtctcactaaaagacgcgatcatcatgctagttactcaaaccaaaatcccggagtgcctacttaaattccttttcattcactcttcacatacggttcatttacaggtcttaacaattctacttttaaaactcacccgcaattttattctactgccactacccttgcctttgccaacaccatctcctacctggattgtaattgcttcctattatatcttcctgcgtcatcttttatcctacagtcagtgttgcatatagccaagagagtgatcttttaaaattaataaaatggtgttactatcctgtgtacaatttcactgcacttagaataaaaatcacatttcttaatgtgacctgagaccccacggagtctggttcctgcctaccttccagacttcacttccaatcagtcactcgcttacgcactaagctctagacacagccaagtgggcatttctgttttataaaacagggcaagattccttctattttagggcctttgcactagcttttctctgttgcctgtgccccaaagtaactgtatcaccatccttcatgtctcaggtatcacagtgaggttttcctacccccacccctccaacacttgtgtttgtacaccatcacatcaccctgtttcatttttcataccactaaacattaccagagtctattctattcattttttatttccatgtctctcaggagacagcatgcgaaggtcattaagagaaaaggatcttcagcctgcccatttttgttctaaattccagttctgccctttcctagctctataaccttaggcaagtcattttccctttctgtgctttcagtttcctcacgtgtaaaatgggcgtaattctagtccctaacttgtaatactactctaaggattaagtgaattaatacttgtaaagtgcttagaactgtctcagcaaatagtacttgctaaataaatgttagctattattattattatt

SEQ ID NO: 914571 - DNA, 4001 bp, Homo sapiens
aaaacctctgtcatttttatacaaaaatatccactcatgaatgaatgtctattccttgccagggatttgcttctccagtgtaaaaaaataaaaaaataaataaataaacaaaacaaagcaaaaatctctccttctgcatttccaatctccagtgatttgagttaccaatcagagagaatccagggactgagtccaggccctcccatctctctaagctccctagctcaatatgacttggaatcccttttcccttcaccattcccatggctactgccttaagacttttgcaacagttagacctccacgccttcaatatgcaatgcctgtagccccaatacccagccccaaaaatgcctcaggaagaatcatctctgtataaagaaaggatcatattggtaatttttatccattcttcaatgatagtcaaacaaagcaagtttttcctaggaaatcgttcctgccctctttctttccctgtaactccaaagctcagtttggtccttttcaaattctatgcatatctctactataagatttatctcaacttacgaaacttactccctccaaaaactgctggaaataccaaagagaaaagaatgaataatatatatatacccacacacacacattacatatgttgaaattacgaaacaataccaacatttcacctacccaagactaatcgcccactcttcccctttaaaacctggctgtagtcattttctttttttttttaatcaaatataaaaataatttattaaaggtttatatcagagaactgctgaagcaacaagaactagaagagttaatattccagaaaagggaaaatcatggagaggtagtccaacattctgcagctagcttttccctgggtgcatataataattcttggtgtaggcaagaagatgaatacaatggttatataccaaacagaaaaatcgatatcagagaaaagagcagggcttatgatggactccaaagaacagggtgagaaaattggagattaaaggagaatggggctgcttcaccctcaaattatttgccaaattttgaaactatgtcattttccctttagagtctcctctccctcttctctgctggctccttctcatttgcatttaaacttgtttaaaactcttccaacttaaataaaaacaaaaaccctcactgaattctctgttgctctccaactgcaacttttctctttcattgccacacttcttacatattgaatagattgtcagataattcagaagcttactttctccattctttgtatgttacctctatgtatctgaagtttagtgagaaatacaatgtttcgcgatcttttgtgacaggctaaatatactgagattggtgttaacttttgtttggattggtaagagcttacagtaagtctggaattgataccaatagagacaggaggaggaaatgtcaaactgagtctattcaagtgtgacttgaatgtgtttccgaaaaaggaaaatctcatttcagatacagcagtagcaatgactgaggctgcgagacatgctggcagagtccttacaagccgcaggggacctacaaagtgtgcagtccgagtgatagaaatgtaaagaatgggtaacttaaaaggtaaagaaacttggagaaaaagcgacagatctgcctgaaaagagaattagcaactggcacctgccagaacatctaaaaaatcggtagctacaaaagggtttaccggcattgcaaagggagaactcacccaaattaaggtgagattcagtactgacgaggtaagggaaggggtgagtgggctagcttacgggaaccctcaactcccacaacaataaataactacaaaagccccaaaacagaggtacctggcgcaacacctcggccctggcattccgggtctgttctttccgctcttcgatactcttcgcactttcaaatctaccactagcagccgccatacttgttgccatcgtaaagctaagaagccgcaagaaaattctagtttacgacggtcgtaatttaacaaacaaaccgggacttccggacccgaggaaggaggagcacggctccaccaacagggcatgcgcacatctgaggtcgcttagggctcggattaccgcagcccagattttaaagacccgaagggtgttggagggtttaattctttcaggtgttgggtgcgattgtgagcaggattaatacccgtatatatttattatgcactttttactatattaacagctttctcaccaatttcgtcttaaaatcaccggagtaagttacaagctcttggaagttaagttggtacctctcaaaagttttctgcggaagtaccctttgtcgccagagcatcatttccctgtgctggaggaatgggataaagggaggctgccagaaaggtagtggcagctggcaggaaggacagaattgccttgaagattcagtgttttgttttggtggattttacttaatatatgaaacactcatgtgaattttgcattgcacttcacaatttacccgtgcttaacttgttagaagtttacattatattttttcctctgaccccatattatttactcatacttatccatccaagcatttttcattacaatggacagttacttatttatttctgcggagatttctttgttttgttttacgcatgtatcgcccaaacataaaacttttaagttcagaagaataagacattctaaggtgatgaagtgctttgagaacataagacactaagcttacatttacaagaagaagaaggctggggaattaattataaacgataccttaaagacgctaaaaataagtaacataagccaggttgaggtaaatactctttctcttcaggtttcataaaatttaatgtgtgtttgcaagaagctttccaagagtttttacattcactaccattctatgagtctgaatcttgaacacacaatgcctacttgtttgatatgcaatagaaagtattcattttattttaaaatgtaatttactaatcgaccttgtaatatttaatcaactgactacattgactgatatttgtcataactagcatcaacgtcttttcagattctcttggaattcagaaaaacatccatttcactgttttgcatcaattcaataaaaataaactgtgattatattagaaacgtgtgtgttttaatcagttcaggctgctataacaaaatattatagaatggatggcttataaataacaaacaagtatgtcttacagttctggaggctggataaaatcaaggtgttgggctatttgctgtctagtgaaggtgtgtcctggttcctagagggcagtatttttgctgtgtctcatatggcggaaagggagagggatctctctagaacttcttttataggaattcatgagggtgctgctctcatgacctaatcacctcccagagtccctacctccatataccagcacattggggattagatttcaacataagaattttggggaaacaaacattcggtctagagcaatgtgcaaagttatatgaagaaaactttaaaatcttgcataagctccccaaaaagactagaacgaatggagaggtatactatgtgcttaaagaagaaaacatcataaaaaatcatttctcaattaatttgtaaataccatgcaatacaaataaaactgcccaaaaaaaagttggggttagagaggggaactagatatgttaaaatagaaaaaagaaaagaaaagaaaagaaagaaaaagcaggttattttggctaggtttgcatttggccacacctaatgcgaatccagtcacatggcttaatcaaataaaggataacgtaacaaggagcctaaaagtaactggtccaggcttggtgcaattgctgaaggagccaaatagtttatcctttttcgctttgttgcagtctgtgactttagtatttgtagtcacaagcagggtatcatattctttcacatctgttcacggcatctgataaacaagaata

SEQ ID NO: 914572 - DNA, 4001 bp, Homo sapiens
gggacatgccctgctgcccctgccccctgcccccacctgtccctagtaggtcactcagtgaggtgaggcgtgcagttaggggaaactcttaaggtttctcagaagctgggacccgccgggtctccagttggttactaagatgtccaactgggtcagggctcgtggtcagtttgaagctgcaggcagaggaagacgcccagtaacctaatcaggcgaggccagcggctgtgaccgggggccagggtgggagcacattgcccctttggggccgcgggtttttagtctgatttggggtattgcccagactctgtgattagactcagggcagcttcatgggcttgcaactggggcagtcacacgggggcctgcacccagcaggaccccccacgaggtttagtgctctgctgttgccttcttatttataataatttttcaacaaggggccccatgttttcattttgcattgggtcccacaaattatgtagcaggtcctggttagatgaatggtccggctctgattccacctacggtttggatccgaggggccaggctttgggtagtcagcccttctgcccactttctccccgtgtcctacttacacttcccagccttgggatctgggcaagcgagaggcgggcttctctgagcaagtctgggaacatggttggtggaactacaaagtccactccacaaagtccactccagccgggggagcaggagggagtcagacaatatcttagggtaagtttgggacaggagagttggtaggagccagggtttggctccttcatgatctaacccagagtgcagccccgaaacaagtcctctctccagggggagaaaagacagtgaagaagtttccaagaaacccttacaaccagcctctgccgtcggctcacaaggaaccctgtgtttctctggttgagctgctccacacacacacacatcttctgggagcccagtgacaaccaagtcaactgcaccactacgcttcactggagagacttgagtggtggcagcgtagtgctggagaccattttcttagcccacccaagaaacctttccaagaataccttatctctagagattctacaacaggttccaagacatttgtcagattaacagttttctcaccctgctccctgactccagcctgctgggatcctcttccttgctaccatctggtctcacattccctcagtttagcacataattgttgcctaatagcttccagtgagtgatttttttctctggccagagcagaagctatttgagggcaaagaccaggtcctcaacttctccacccaacacagaatgtagtgccctgatgacataatcatatggccagagacgaacagctatgcattcattgactgattagcaatgccagcctccttacggtaagaaaacctccaaagtactttcctgtctagttccatattccgaccctaagagaaaaggagagaaagaatggagaggtgaagtatcctgttcccagtcacatagcaactcagaggaggatgcagggcctgaacccgtgtcttccagcttcctctaaaggatgtctcctaaggacagcagctctccttatctgcttcttccacagaatggaaaataaactcttaaagggcgggagctgactgacctgtctagattttacagatccacagtgggagaggattcccacactgtcccctctccctcggactctggcaaaggatgttagaattccagacagggcctcggcgacaggaagctacccgtgtctactcaccaggtcctccaggttctcgaggtccatttccagcgttagcgggtagttcatggctgtgccggctgtgagtcaccagactggtcactgtcttatgttgagaggctccccgccaggtgcctctagagaggtggcagccgtcagctgcaaatttaagcaaatgagctgcgcatcgtctcctgaggcagtagggccgcgacctgcctcacaactcatcacttttttttttttttccactgggtcttttctgtttttttgaagaaagagggaaaatcccccacagcatcagtgctagtcaagcatttcagcttctttcccggcaataattgtctcaactggggcctatgactagtttaaaggctgccctcacttctcctccctatacccccaataaggggctcacaacttgtaatgaaaccaccacgcaaagtcagcaggttgatgagggaaactcctgatcaacagagaacaggagaagagctctcccagcaacctctcctccaagccacctccaaaccttcattttcctcaccactagggtgatcaaccattccagtctgccaaggactgaaaagtcccttgacttgggaaacccctaagtcctggcaagttagggcacttggtcacactacttgccaccatccttttgcccaacagaggcaaaaccccttcccttctcagctcaagttcagaaaagataggttagaatttttcaaagggaacaacagtaaaacaatactggaagacaaaaatgaaatcaactttggaaggccgaggcaggaggatggcttgaggccaggagttggataccagcctgggcaacatagcaagaccatgtctctaaaagaaaaaaaaaaagtgaaatcaccaagaaaagcacatagttacagagtcattttctgactcaaaaataatgatgttctatctataaattaactttgtttgctcataaattattaacctcataaactaccaagctagagatggcttcagagatcatccagtctaaccctcaatttttattcaggaggtccgtgaggccgagagggagagcaacttacccgagatcccacagctaaccagtggcagagctgggacttgaactcaggtcttttgactccacctttagtgttttctctactccaggctgccactcttgcaggcactcataacctctgtcctttccctcaactctgtcctgtctgagggccgcttcctttaagaagccgttttgtagatgttgatcaatttcccttccaagtctcattttgtggctttttcttccagaagtgggcatttcctctcttgatccacaatgatgtgagaaagatgactgcacgcacagaggcacccacacatggtggctgcttcttggccccacccccacccttgttatcacgctccctttcagccaaatcgccctttgctgggatcctactaccctttccagtgccctccttcaccctctcctccatattcaccttccctctttcccctcttcacaccttgcttactgaagatgcttaccccactgcatccccaacagatgcatcattctttttttttttttttttttttttttttgagacagagttttgcacttcttgcccaggctggagtgcaatggcatgatcttggctcaccacaacctccacctcccaggttcaagcgattctcctgcctcagcctcccgagcatctgggattacaggcatgcaccaccacgcccggctaattttgtatttttatttatttattttgagacagaattttgctctcgttgcccaggctggagtgcaatggcgagatctcagctcaccacaaactccacctcccggattcaagcaattctcctgcttcagcctcccgagtagctgggattacaggcatgcgctaccacgcccggctaattttgtatttttagtagaaatggggtttctccatgttggtcagtctggtcttgaattcctgacctaaggtgatccgcctgcctcagcctcccaaagtgctaggattacagatgtgaaccaccgtgcccggccaacagatgcatcattcttaggattaaacagcctgaggagtttccagcctctgttggtggtattggggtcgtttcctcgctcttctccattcactgcctttagaagctgctttcaaagaagacggctttcaggacaaggcatcacacttcttctccagcacgtacagtcctgaaacctccaggaggaagc

SEQ ID NO: 914573 - DNA, 4001 bp, Homo sapiens
gtcactggctggcctccaagggcacctagagtcagccctgcctgcagaccacccaggatccggtgacatggggtggacccagcgctgtttcggtcagagccaggggcagctacctgaactcaaccagtctgagcttcctgcttggtcaagatgactgcaggcttgggggcctggcagaatgtctgtgtttttagggactgagttgtccgaaggccacactctgctgccagctggcctttcctcagccttaacctccactcatcccctggtgctcagcttctggctttgtttgacaggtgggcaggaggagagaggggaagctgtggaggtcagcagcccctaagctgatggagtgtgttctgggaggggcaggcgctctccgttggcaagggcagaagtagaagttgtttcttgagcattggatgattaggatgggaggtgcgtgaggttctctcagcccaggggggtgcagatgggtaaggacagccttcactgtgcctttgagctgctttccgctccctgggctccagcctagccccagggccggcagaagagctggcagggatgttctagaaatgggggttggttcctctagctaccccaaatgaggatactcctaggacactcttagccacggtgagcccttaggatcccagctcctgttggaaggagcatccagcatcactgcctgccccaaggaaaagcagcaataaaaggggacactgggacctagaacgtggtgagagaggtggcattctctgactcagagagactgctcctgcgccagctagggaagagctggcacagggaggcagggccggtacagcccagcttcgtcaggagccgcgacaggtcactgcggaacttcacgccggcgaaagtgtagagcatggggttgaggcagcagtgggccaggcccaggaactcacacatggtgatggccacggggagagagccattcagcttgcaggtattgtccacggccttcagcctcgccagggtgtccaggaagatgacgatgtggtagggtgaccagcagaggaagaagatgcttgtcaccaggatggccaccctgactgccttctgccgctgagggcgccgctgggcctggcgcaacctgtgcactacccccacgtagcaccagcccatcaccagcatgggcagcaggaatcccgccacatggtagaggaatcgggaggtgaaccaggcatgcgtttctgcttggttctcttgggagaaggtgcaacgtggcagggagttgttgtgatggccttggctgactttggcgaagagaatctctggcaaggcaaggaggaagcccaccagccagatggtcccacaggtgatgtggatggagaggaggcggcggtggcggtaggcatggacggcgtggacaatggccaggtagcggtccacggcgatgcaggccaggagcaggctgctgcagtagaagttgactttgtgcagggcaatcacagttttgcagaggaaggtccccaggacccagcccacagagccctcggccacggcaaagggcaagatgaagaccagcaggaggtcggccacggccaggtggaacaggaaggtctccgtggaactgcgtgtctgccggtgccgctccaggatcaccagcaccaggacgttgccgatcacgcccaggaggaagatgaggctgtaggccacgggcacgaacacggccttgaaggaggccatgaggggcccctctgtggcagggcagagatgattttccaccagggaggtgtcgttatagttgtccaatctgtccagttcccagaactgcaagggcaaggagacgggagggtgaggacctaaggacctgtctttcctctctgagaggaaccctagctctcttggaggttttttcctacatagggcccactgaccaaatgtcaagtttcaaatttcaattttgaacaaatcactttgtcttttccaacttcagtttttcgcctgtcaaagggaccgcattccttagagtggtggtgctgatgaagggaggcgtgcgggtggctgagctttgtaagtgctggagggctggaccccataagtcagcttgtgtttttgggtcctcatgtacggaagcctgcagccttggcggctggagtcacaggacttcaatttggggaatggacctgcttggtacaaggacccatctgttccagttctgagcagaacagtcgggcactgcaacttagcattgtgctggggactaggggcgggcgggtgctgacttggcctgtgggctccctcctcatgggtcttcctgttcctgactgtctctgttatcactgaaatggcagtaatagcctcccatctggttcaatatgcacaacccgctcaaggtatgtaatattattcctatttcacagatgtgtcttgctaaagatcaggtttgtgtgaaccgacgtttatctacttccaaagccagtacctcccactgaacaaccctgcctgggcttccttctaggggcagcagatgcaggctccctgctacttcccatcactggcaacctccctgcagctaggagcactcagaagcagaaagcccagaggcagagagaggcaggagaaagtgagggcgacacggggagactggcaggagagaaggagagagcctgctccaagtgcagggggtgtgcccgtgatgtctccggaagttccctcctccccatcctcctcttcctctccccatcaccccccccccatcaccccagcactcaggttgtttacccagctaaccacaaaggaagacatgtgcctgttttcacacctttcactcacagctgtcccctgcacctgttcctcctcacctcccagctctgttcttcccaccctccctacccaagcccctccccaggcaattcaaaaccaattataaccaacctatgtggattcaaaatggcaatactataaatgatgaacccagggaggcagaggatgggatggggtactctgtccaccaggctccgggtggcttaatggtgcccccatttcaggagagcaaggcacccccacaaggaggggatggtcacactgggtgccacagggctttcttgcctctcaggagccacagttgtgggtcacacactcactcctaatgctgagcagacccattctccaacctgggtctttccttctggctctgggggaatgagggtctgtgagaaggaggtgtgggagatacatcagtgcaagggtagagccatctgccaacccttcccgcagcatccctctgccattgcctcagtctggtcttccttctctttactctaatgctcaggagaccatctctccatgggtcccatccccaccagcttctctactcctgtccacctcctgcacagaggacagggtaagttttctaaaacacaaatcccatcgcatcaatgttctgtttaaagtcctttactggttccccatcacctgtaagcagtggttttcttctgctttttgtctttatcttattttttcaacttcactttttttttttttttttttttgagggggagttttgctcttgttgcccaggctggagtgcagtggcacgatctcggctcactgcaacctccgcctcctgggttcaagcaattctcctgcctcagcctcccaagtagttgggattccaggcatctgccaccacacctaggtaatttttttgtatttttagtagagacaaggtttcaccatgttggccaggctggtctcaaactcctgacctcaagtgatccccccgcctcggcctcccaaagtggtgggattacaggcatgagctaccatacctggcctcaatttcacatttaatagcaaagtcagctataagaaaaagtcatatttgtgatcatgttcatcaatagaagattgattggagtctgggcatggtggctcaggcctgtaatcccagcactttgggaagacaaggcgggaggatcacttgagccagggaatttgggactgcagtgaactatgattatgctgctacg

SEQ ID NO: 914574 - DNA, 4001 bp, Homo sapiens
acagagtctcgttctatcatccaggctggagtgcagcggcgcaatctcagctcactgcaagctccgcctcccgggttcacgccattctcctgcctcagcctcccaagtagctgggactacaggtgcctgccaccatacccggctaattttttgtatttttagtagagacggggtttcactgtgttagcgaggatggtctcgatcccctgacctcatgatccgcccacctcagtctcccaaagtgctgggattacaggcgtgagccaccacgcctggcctggcctctcctgtctaactctcaatttcctcatctgtaaaagggatataacagagcccacctcacaaacttgtaagaacaaaatgggatgatatatgtgaactgcacatggtaagctgctatcatcaatggcatcgtattgccattttacaaatggggaaaatgaggctcaccagggccccaaggcacagatttgaaagcatgggacaaagattacaaagatggatcccaggttgggcgcagtggctcacacctgtaatcccagcactttgggaggcagaggcgggtggatcacctgaggtcaggagttcgaggccagcctgaccaacatggtgaaaccccatctctactaaaaaatataaaaattagctgggcatgatggcgggcacctataatctcaggtacttgggaggctgaggcaggagaatggcctgaacccaggaggcggaggttgcagtgagccaagatcacgccattgcactccagcctgggcaacaagagcaaaactccatctcaaaaaaagaaaaaaaaaaaaaagatggatcccggaagagcaagcaagtccctcattcggtggcctgactaaaccatgagaggcttcaatctcctgttctctagagctggttaaaaactacagctcaggtcgggcatgatggctcaagcctgtaatcccagcacttcaggaggctgaggtgggcagatcacaaggtcaggagatcaagaccatcctggctaacacggtgaaacgctgtctctactaaaaatacaaaaaaaaattagccggtcacggtggcaggcgcctgtagtcccagctactcgggaggctgaggcaggagaatggcgcaaacctgggaggtggagcttgcagtgagccgatatcacgccactgcactccagcctgggcgacacagcaagactccgtctagagaaaaaaaaaaaaaaaaaaaacactacagctcaaaggccaaatccagctcgctacctatgtttgcaaataaagctttattggaacacgtgatccacacttgtgtgtatgtgttgtctatggctgctctcacaatacagtggcagagctgagtaactgcaacacagattctgtcttgcaaaactgaaatatttatctgaccctctatagaaagtttgccaactcctgccctagagtatttgtgaagccacccttctgagatgccccccatcttaaccccttcctcccccaaatgacagctaggcccagagacagcccaacccaccctacccccatagccccaagcccaacatttacaaaggccagccttggagagggaaagtgcagctttgtccagcctgagccctatcccgcctcccttcctgacctcttactcaccacctccatagaataccaccatgccagcaaccataagcactgggtgccagttgaacatgtagatgctgccattccaggcaaagccaccacgccagtactgcatccagtagatagtgaagaggatgcacatagagcccagggaccccagcagcaggcaggacaagtagaaccgtccagacaccattctgatcacgcactcctagaagaaggagaagtcacaaatctccactggctcagatgcacccagttctctggctaaaggaggtaacactgatttagctcttggcctgtgggatggaatctttttgcttcagttcccctgcatcagcctgggcaccaccccccgcccgaggcctcaatgcctgggtgggcctgatcttcagtcacaatgactgaggccccaccccagcacctggcagtgcccagacagagcagcaaactcaaggctatggctggccctggcgaaggccagatgccaaggcccaagacccagagtcctgggattcctctcccctcacaggaccagaaggtaaagaattaccaccccataccccccaggaaaaaagggacaggaatcaaaatccaggctaaattacgcaaacacccaggccttgggttctaagataagaaggcaaaaattacagtctgaaaagagcaaacaccccactattaccctagacaggaaggagtcagaaaagttcttccccatagagtaagctctatggggctaatcttcactggagaggtaaccaggccttcactccactgcccacactccacaccttgaaccagctgatgcccctcagctgtctccagccctgagacttctgctttctcttcctctggggaaagtccagagaaaaaaagaggaagcaacaactcatggtccagaaagcaagagatttattttgagatttccacaagtccttgataaacccagaaaccaactctggtttcaggcatggcaaatgcttaaagccctgagcagttgctcttaaacgctaggtgagtgggcaaagccacaggactggccctgctttcagctaatatgtaggcagcacgggcccaggcatcaaggcagtcaccctgtcccacggactcacaccaagaaggcaacagtgtggcttcctgcattgaggtccctcactcggaagcagctaatagccaatagcccccacggaggtaaaacatttgactgctcacctttagccctaatgataggctcagagaactggcctgggctccaattcctgcgaaatgggcaccttgagcaaatcacttaacatttgcaggactcacctgcaagaaaggcgtggcagtaagaatacttgaacagtaagaataacgaacaccagctacgagcaccagagccttacacacaagatcccatttactcctcttaaccctgggaggcatattattccgtgaggaaactaaggctgagagagataagtaattagcatgaggacccagtgagagtgggtggggagttccaaatcctgtgtgtttagcttcaaggcccacgctgcttccttgaccacaggttgtcagatcaagtgagaaaatgaatgtagcacactgtagaagtcaagtattagaattcttcgctgggcgcgatggcttatgcctgtaatcctgcactttgggaggctgaggcaggtggatcacctgaggtcaggagttcgagaccagactgatcaacatggtgaaaccccggtctctactaaaaatacaaaattagccaggagtggtggtgggcgcctgtaatcaatcccagctactcaggaggctgaggcaggagaattgcttgaaccagggaggcagaggttgcaatgagccaagattgtgccattgcactccaccctgagcaatgagagcgaaacttcatctcaaaaaaaaaaaaaaaaaaaggctgggtgaggtggctcacacctgtaatcctagcactttgggaggccgaggcgggcagatcataaggtcaagagatcgagaccatcctggccaatatggtgaacccccgcccccatctctactaaaaataaaaaattagctgggcatggtggcgcgcgcctttagtcccagctagctactcggtaggctgaggcaggaaaatcgcttgaacccgggaggtggaggttgcagtgagctgcgatcacgccactgcactccagcctggcgactgagcgagactccatctaaaaatatatatatatacatagaattcttagtcattgctgtcatgcacttcatcctaactactaacatgcagctcatgttccttgtgcctgcccaggcctctcagtggccctcagccatgccatgccagctctccccatgctaggggtccacctacttaggtaa

SEQ ID NO: 914575 - DNA, 4001 bp, Homo sapiens
gcttgaaaatatcctctcatttgttctaagggcaggctgggctgtgatcccagggtgtgctcactttgcagagccccattctaagggagcagtcagcaagctcttctgtaaaggtccaggtagtaaatattctaggctttgtagagcacatggtctgtcacaactatgtcatcaactctgcccatgcaagagcagccacataaacatcttaacaaatgagcaccacggctgtgttccagtaatatttatttatggacactgaagtctgagtttcacataattttcacgtcacaagatattattaacttcttgcgaaaaaggattctcccggctgagctaaaacaggtcacatccaggggtaagaaatgctagttcccatccagcccttagtcttagaaaaaggctctacgcaggctgggcgcggtagctcacgcctgtaatcccagcactttgggaagccgaggcgggcggatcacatgaggtcaggagttcgagaccagcctgaccaacatggagaaaccccgtctctactaaaaatacaaaaattagccgggcgcggtagcgggcgcctgtaatcccagctacttgggaggctgaggcaggggaatcgcttgaacccgggaggcggaggttgcagtgagccgagatcgtgccactgcattccagcctgggcgacagagtgagactctgtctcagaaaaaaaaaaaagaaagaaaaagaaaaaggctctactccaaactcttgcagtgttacttttataatttagaactacaaataaatgaaggggtagaaaatcagtttgttgctctccctccccgatggactgggggacttcaagaatcttgaggaccagatttaggatacaagccctaaaccctcatcttacaaatcaaaaacactgtgacactggggcccaaaacaagaaaatgacttagccaaggtaagtggccgagctggtacaggaattcgggtccactccctctcagctctgaggattccttattctcaaaggtagcttctgttaaagtcggaacatgaggagtgaagggctcaatattcctgccaaggaggtaggtgaacaagttaccccttagcaccggaataattatagaccccgacttcaggctgtgcctaggtccggctcaggtgtccaaagaaccgttccaggcacccgaggggtgatccctgactcctctgctgggtgctcgtgccagctaacaatgggtgaaaattggggtgaggagctccaggtgctttctgcgtcctctgaagagctttcgtgcctttataaccaccgcgttggaaggaagagcgcggagaaaggtgcccactttctaaaagagaaaattgaggccgagcaaggggatcgcgacagtgcgaagcgagatagcagcggaaccagcattcgaacccaggtccctgaactcccagccccgggatccttctcacccctaaccacagtgggacgaagtgaggccgggatctccggaacccgcctctcgctaccaggcgccggagctgccgctcccgaggttcctaggagatgcagaagacactgccctgaatgcctacagccggctggcaatgccgccccagagcagagcggcgggtgccgcctcgccttcttataggctcgcagcacttccagtcgcgcgcgaggcctcctgggaagtgaagtccggagaccaggggtggccggctcccagcgcgccaagctgctaaccccctaactcccgttcctcctcggcgtttcttctccaagtccgaagtcagggtccaggactgctgcgatgcatcagccccgcctctcatcccccatccagaggaggcggaaatgttcaggtgaacgcgaagcctcccactacgagccggccctcagcaaggccgtgcgcagtgtgggcgggagccctaagtcagctagcggcgacgctgggagggcccggagcaggccgggccccgaacagcgaaagctccaacatggcggccagactggccatagagcgggaagagaaagccggggactagcaggccgcacggcgcagacggggcccgcctcctccatttacttccggaatttaaagccggcttccggaagccgggacgatgtccgcatgacaaccgacgttggagtttggaggtgagagtgattgacgaggagtgggttaagtgaccagaagtcagaatttttggtgctgttgttttgggcttgggttttatgctttgttgttgtttgccaaggaagcctcgtttttaagtggattgggaagcgtgaggaatactgccctaggtacaaagggaaggcggcaggtagcggtggacgaattaaagagcttcatgagcttgtgagtctccactgccctaaactggaggggatcgtcgtacgtagagacaggcatgggcgtttctgcataacggatcctcaaaacagccctggatggtggcctatgagtagtggttaagagcacgggtttggcgtcacagttatgaagccgggttctgctgacttgagacctggaggaatgccttgagctctgacttctgtgtcctttcctgtagaataggaataattcccaccttgcagacttgtagggaggattaaaggaaacgatcttggttgacaagtttatcgtggtgtgagtacctaggtagtagctatcagtgttatttaatgcggccgggcgcagtggctcacgcctgtaatcccagcactttgggaggccgaggcgggaggatcacgaggtcaggagatcgagaccatcctggctaacatggtgaaaccccgtctctactaaaaatacaaaaaattagccaggcgtggtggcacgcacctgtagtcccagctacttgggaggctgaggcaggagaatcgcttgaacccgagaggcggaggttgcagtgagccaagatcatgccactgcactccagcctggcgacagagcgagacactctctctctctctaaaatttaatgaatgaggaaaccgcgaacatatgtccaataaggtgggacttcaccagctgaggtggaggaggtgccttaaccttccggagcctctgtgtaaaatggggataatatacattgtaatggctacttctcaagatggttgtaggattacgtaaggttagaaatatgaaaagagcttataaattgcaaaacattttaccgatgctaatttaatcgctaacactccagagcattttgaaatttctttatagatttggcacagcagcgggtcataggacacccccagagcaacttgtgggtcttggaatagatgaaaagaaacaactgccactgtgttgcaaccataaccctaaagataaagctttccaggagacccctgtttcctctctgctttttctgcctagggcacttcacacttctttgctggcatttttcctgcctagttaaatactagtctatcaattatgtaagagacagcttagtccagtagttaagagcacagactgtggacccgtgcagcctgcatctgaatactagctctgccacttactaacgacgtgaccttggacaaattattttacctctcttggcctcaaatttctcatctgtaaaatggggaaggtaataatgtattatgtcatctaccttgtgaggtttaaataatgttagtgcttgtagaacactccctggcacattgtaagcaatgtataaggatttgctgccatttttgttaccaccgctactacatgaccaggcagtcattcttctcagtaatactactagattcctttggttagagacagctctgcattgagaagattccaggcatggagaaaagctggtgaaggtcctagaataaatgacttcttgggggtttttgttgttggttttgttcactaaagtatcccatgcaactggagtggtacctggcacacagtaggtcctcagtaaatgtttatggtattaatacatttctaaccttgcttatctttttgctccaacaggtgcttgccttagagcaagggaaacagctctca

SEQ ID NO: 914576 - DNA, 4001 bp, Homo sapiens
ctcgtgtcagcccaattggaataatgaagaaaagaaattttctgtcccacatccatccccctatctatctccctgagctcacaggctcaggaggagcaagagggcatcttccacacctcaggacgtgggaaacctgtgtttctgttaagagaggagggcctagcccccagaggccccagtcctggtgatgacccaagcccggctcacctacaggaagccctaagacatggtccggcgaaggcagtccaaagcggaacctccgggtgttgtggctgattttctgataaaacaaaacataggcaggttctgtcagctttctagaagccttgctgggcagctgagatgcctgggaaaggaggtccgtttggcgctattccagcacacacacacacacacacagggcggcggggagtgaactggaggccatgagatgactgtctggatgccctgccatcccagccatcatccacttactgccttccacccacagggctgacccattacctctttctcaatcaagggcagcgggtacttggcttcagggtcctgtaaggtgattggctctctcctcctggagttcatgctcttcaggaccaacacgagcacagtgaccccagtgacggtgatggtcaggagcagggacgggtcctggcagacacaatgtgaacagagcacctcaggtcttgcccgccctggacagggcagctctcaggcgcagaacaccctccccacaccaaaggcacaggagctgagctctgcctgcaggaaataggcaaagagaacagtagtgacacagaaggcggctgggagagcctgtcgtggaccagagggtagggaggggtcagctgcaggtcacacaggaaggatgtttcaggcccctggagcaggcagcacacatggcctggggtgctcaggtcactaggcccctcctggctacagccaaaggttcatacactggaagtcccttccttgaggtgaagggggaggacatcacccctaacacacaatccggaatgaggggcccagtccctaaagacagaactagggtgcgtagctctaagaggtgccccgtgacttagggcctggggactccccaacagtctcctggacagggcgaagggggcctgggcactcaactgccagagactcgggagcctccccgcatctgtccctaccctacaaggccgccctgctcctctcccaactcaagcccgacagggaaagttgcctctcctcccgccgggtcactggagtctcagccttccggaatccgagccggcccgccccactccccgcccttcgcggtcccgcccacgacctctccccacgcctcccgctccggcccccaacctcccggtcggacgttcgttcccggctctagccggcctccgcgcctctggcctctttccttccggccgtcccgacggagatatttcttcaatactccataaatacaccccgccgcggaacccacccggagtgagacgcccaacacgtcgtcgaactggggttggccgggggccgctccccgccgcgggcccgcagactcgtggcgtcgccccgcagctccgcctggccgacggggaaccggccgagacccggacacgcacgcccgggaggacaaaagcgcgggcggaccccgcaggctgggaccccggcggctggcccgctccccgagaagggccgtggtcggggggctctcactcacgagccgctggctctgggtcagccctgcccccagggcagcgctccatcatgaggctggcggggcgctgagccgtggcgtcctcgctcctgcgctgcccctctgcatcctggccccttccctgcacacgcagagctgccacactgagcgcccctcagcttacttaagctcggcaaggctggagaaggccgtctgggtgaccgggcggagggggatgctggggaaggaagaattcaggcagctgcaaagagcgcgcgaatatattcattcgacatacctcatgggcgcctaccctgggcctggtccggggcgggtgtttgcggggtggggccgaagcaggggcgtcgccgagttgaagacgtgtactccgagcgctcctgcgttcattcattcgctgggtggagagaggaaggacaagagccccgcgccgatcggaggggagcagaatagtaggcacagttagagggtcttcacggtgcgtttcggaaccttggctgcccggctcgcccttgattacaggcaaaggcaaattcttgcctcaggacctgtgtgaaacagagaagcccagaagcagatccccacctgtttgactctgctagggctgctgtaacaaagtgccgcagactgagcggcttaaacaacaaaaatttattgtctcgcaggtctgggggctggaagtccaaaatcaaggtgtgggcagagtgggttccttctgagggctgtgagggaaggatctgttccatgcctctcctaggtttgtaggagaggggctaggagaaggggcatcttcttcctatgtctccacattttcatccctctgtgtgtgtccctgtgtccaaatttccccttttatgaagacaccagtcatattcaattagggtccatcctaatgaccttgttttaacttgattacctatgtaaaggctctaccttcaaataaggtcatatccttaggtactggggcttagggcttcaacataagaatcagggtgaaaacaataacccataacactttaccaacccttctccccaagacacacaccaccacaggctcaaaaattcttgctgtgtgaatgaataaacaaacttaattttctctctttgacttaatcaaatgcctttacttttgatttacctgcaggtgcttggttattataggcagatattttaatttttgacaatgcgataagtgtaaaatgatgtatcaggaatccaatttgcattacctaataactgctaataagtttgagcacctttcatatatttatttcccatggagtttccttttcagaaaaaaaaaaatgcctgctcataaattttgctcatttttctgttgtctttttcttactgatttttaggggttttatatgttttagatatcccttctttgccagttacatgaattagtaatgttttctcgtaatttgtaacttattctttcttttttctttctttcttttctgtcccacctttttgtggtgtagtctgatgaatagaaatttgaattgcagtataaccaaatataccaatcttcaatttttttgccgttatggttagtgatttttgtgacttgtctatttctacccaagcccttaaagatattctatattttccccaacaagatttaaagattttcctttcacatttaagtttttcaaccacttggaattgatttctgtgtaggatgtgaggcagggatacaatttcatttttccatgtggctaatgtgtgtttttcagtaacatttattgaattgctcacatctggccactgacctgcaactgacctgctacccctggcctatatcagttttcataggtgtgtgagtctagctccggcctcccatttctcttacattatctagctgcccaaccttgtcgcaatactacactgttttagttacggtagtttacaacaagtgtttatgtctttcattcttatacattctttagatctcaggtcagatatcactcccttggagatgcctgctgtgatcccccaacttaagtacatgtacatattataatctgttaagtttaacttaaagctgcctccttaatgttttagtttcaccctaaaagtttcttcgtacatagtgaactgtaacctactcttgtatcaatcatggaagtttcagcccattataggcagccaactgttcagactgtgttcaggtaaggcaaatcatgagctgtaaccaatcccgctgtttctgtacctcacttatgttttctgtacatcactttcctgtttctgtccataagtattatgcaaccacgtggcagccccagagttg

SEQ ID NO: 914577 - DNA, 4001 bp, Homo sapiens
tttctactcgctcagaaactgagtggactacatacgggaaattagtcgagacaaggaagatggaacagagagatggatagaaaccaagacctaaggtgcagggaggaggaggaggcaggaggagaaaaaagcaggcagagtaggcactagaggggctggtccctgaagctgattcaaggggatgagccaagtctttgaggtgccaacactctgggctcagaacaggctcaatgactctggtcatggtccctctgggcaccagggatagccaggagtaagtgagacacctagcttccttctgagaacctgaaactggaaacctggaaaggctctttcatatgcagccacctaggcctggcctgagggtgtccccagggcaaatggggctccctggctggtccttcaagccccatctctaacttgcttcacttccactgggctgggacgaagcagcgaactctgaggcctcatattagactctcccagaggcctctacattaccttgtcccactaactttgcacggcctaggccaaggctgaggagatagtgggtcaaggcagtttctaagcaattctctatctcaaagtttttcattcttttaggcttcctgccaacaggacctgcctgacaggccgagcagggagctgagagacggcacgcacaacactgagctctcgtgcatagagatggagtgagggaacagcaaggaggctcaggggcccagcgagctggctagagtgtaatctcaccacctgatagagctgaggtcaaggttttggcctgtgcatataagacaaataggccacggagtaggatccaccaggcaggcaagcagcactagcagattatacaaagctgctctgaatccctgattctagcagttttctactgcactaagactgactcagctatctagtggtgttacagattagaaatgggataactcaactctaggactcctagggctggaatctgcaactcgtagggctggtccctccttatgtgggtctgaggcccctgcagagaatctaagtgaccttgggggcagggcacacctgactcattcctgcctacccgcacattctgggcctttccccgaccactggttcctcccatccctcccaggtgcacaatactttgtagtttctgaattttcatatccatcagtcactctactttcacaacaacccaagtgaggtagacaggcaggcctgggaaatcccatttcatagactgaggctcagagagattgaaggacttcccttaagttccccagcaaggagccttccatgagattttaggccttttggctctaggttcagttcttttcaatgctcactgaggtaccactctcgtgtcagcccaattggaataatgaagaaaagaaattttctgtcccacatccatccccctatctatctccctgagctcacaggctcaggaggagcaagagggcatcttccacacctcaggacgtgggaaacctgtgtttctgttaagagaggagggcctagcccccagaggccccagtcctggtgatgacccaagcccggctcacctacaggaagccctaagacatggtccggcgaaggcagtccaaagcggaacctccgggtgttgtggctgattttctgataaaacaaaacataggcaggttctgtcagctttctagaagccttgctgggcagctgagatgcctgggaaaggaggtccgtttggcgctattccagcacacacacacacacacacagggcggcggggagtgaactggaggccatgagatgactgtctggatgccctgccatcccagccatcatccacttactgccttccacccacagggctgacccattacctctttctcaatcaagggcagcgggtacttggcttcagggtcctgtaaggtgattggctctctcctcctggagttcatgctcttcaggaccaacacgagcacagtgaccccagtgacggtgatggtcaggagcagggacgggtcctggcagacacaatgtgaacagagcacctcaggtcttgcccgccctggacagggcagctctcaggcgcagaacaccctccccacaccaaaggcacaggagctgagctctgcctgcaggaaataggcaaagagaacagtagtgacacagaaggcggctgggagagcctgtcgtggaccagagggtagggaggggtcagctgcaggtcacacaggaaggatgtttcaggcccctggagcaggcagcacacatggcctggggtgctcaggtcactaggcccctcctggctacagccaaaggttcatacactggaagtcccttccttgaggtgaagggggaggacatcacccctaacacacaatccggaatgaggggcccagtccctaaagacagaactagggtgcgtagctctaagaggtgccccgtgacttagggcctggggactccccaacagtctcctggacagggcgaagggggcctgggcactcaactgccagagactcgggagcctccccgcatctgtccctaccctacaaggccgccctgctcctctcccaactcaagcccgacagggaaagttgcctctcctcccgccgggtcactggagtctcagccttccggaatccgagccggcccgccccactccccgcccttcgcggtcccgcccacgacctctccccacgcctcccgctccggcccccaacctcccggtcggacgttcgttcccggctctagccggcctccgcgcctctggcctctttccttccggccgtcccgacggagatatttcttcaatactccataaatacaccccgccgcggaacccacccggagtgagacgcccaacacgtcgtcgaactggggttggccgggggccgctccccgccgcgggcccgcagactcgtggcgtcgccccgcagctccgcctggccgacggggaaccggccgagacccggacacgcacgcccgggaggacaaaagcgcgggcggaccccgcaggctgggaccccggcggctggcccgctccccgagaagggccgtggtcggggggctctcactcacgagccgctggctctgggtcagccctgcccccagggcagcgctccatcatgaggctggcggggcgctgagccgtggcgtcctcgctcctgcgctgcccctctgcatcctggccccttccctgcacacgcagagctgccacactgagcgcccctcagcttacttaagctcggcaaggctggagaaggccgtctgggtgaccgggcggagggggatgctggggaaggaagaattcaggcagctgcaaagagcgcgcgaatatattcattcgacatacctcatgggcgcctaccctgggcctggtccggggcgggtgtttgcggggtggggccgaagcaggggcgtcgccgagttgaagacgtgtactccgagcgctcctgcgttcattcattcgctgggtggagagaggaaggacaagagccccgcgccgatcggaggggagcagaatagtaggcacagttagagggtcttcacggtgcgtttcggaaccttggctgcccggctcgcccttgattacaggcaaaggcaaattcttgcctcaggacctgtgtgaaacagagaagcccagaagcagatccccacctgtttgactctgctagggctgctgtaacaaagtgccgcagactgagcggcttaaacaacaaaaatttattgtctcgcaggtctgggggctggaagtccaaaatcaaggtgtgggcagagtgggttccttctgagggctgtgagggaaggatctgttccatgcctctcctaggtttgtaggagaggggctaggagaaggggcatcttcttcctatgtctccacattttcatccctctgtgtgtgtccctgtgtccaaatttccccttttatgaagacaccagtcatattcaattagggtccatcctaatgaccttgttttaacttgattacctatgtaaaggctctaccttcaaataaggtc

SEQ ID NO: 914578 - DNA, 4001 bp, Homo sapiens
ggaggctcaggggcccagcgagctggctagagtgtaatctcaccacctgatagagctgaggtcaaggttttggcctgtgcatataagacaaataggccacggagtaggatccaccaggcaggcaagcagcactagcagattatacaaagctgctctgaatccctgattctagcagttttctactgcactaagactgactcagctatctagtggtgttacagattagaaatgggataactcaactctaggactcctagggctggaatctgcaactcgtagggctggtccctccttatgtgggtctgaggcccctgcagagaatctaagtgaccttgggggcagggcacacctgactcattcctgcctacccgcacattctgggcctttccccgaccactggttcctcccatccctcccaggtgcacaatactttgtagtttctgaattttcatatccatcagtcactctactttcacaacaacccaagtgaggtagacaggcaggcctgggaaatcccatttcatagactgaggctcagagagattgaaggacttcccttaagttccccagcaaggagccttccatgagattttaggccttttggctctaggttcagttcttttcaatgctcactgaggtaccactctcgtgtcagcccaattggaataatgaagaaaagaaattttctgtcccacatccatccccctatctatctccctgagctcacaggctcaggaggagcaagagggcatcttccacacctcaggacgtgggaaacctgtgtttctgttaagagaggagggcctagcccccagaggccccagtcctggtgatgacccaagcccggctcacctacaggaagccctaagacatggtccggcgaaggcagtccaaagcggaacctccgggtgttgtggctgattttctgataaaacaaaacataggcaggttctgtcagctttctagaagccttgctgggcagctgagatgcctgggaaaggaggtccgtttggcgctattccagcacacacacacacacacacagggcggcggggagtgaactggaggccatgagatgactgtctggatgccctgccatcccagccatcatccacttactgccttccacccacagggctgacccattacctctttctcaatcaagggcagcgggtacttggcttcagggtcctgtaaggtgattggctctctcctcctggagttcatgctcttcaggaccaacacgagcacagtgaccccagtgacggtgatggtcaggagcagggacgggtcctggcagacacaatgtgaacagagcacctcaggtcttgcccgccctggacagggcagctctcaggcgcagaacaccctccccacaccaaaggcacaggagctgagctctgcctgcaggaaataggcaaagagaacagtagtgacacagaaggcggctgggagagcctgtcgtggaccagagggtagggaggggtcagctgcaggtcacacaggaaggatgtttcaggcccctggagcaggcagcacacatggcctggggtgctcaggtcactaggcccctcctggctacagccaaaggttcatacactggaagtcccttccttgaggtgaagggggaggacatcacccctaacacacaatccggaatgaggggcccagtccctaaagacagaactagggtgcgtagctctaagaggtgccccgtgacttagggcctggggactccccaacagtctcctggacagggcgaagggggcctgggcactcaactgccagagactcgggagcctccccgcatctgtccctaccctacaaggccgccctgctcctctcccaactcaagcccgacagggaaagttgcctctcctcccgccgggtcactggagtctcagccttccggaatccgagccggcccgccccactccccgcccttcgcggtcccgcccacgacctctccccacgcctcccgctccggcccccaacctcccggtcggacgttcgttcccggctctagccggcctccgcgcctctggcctctttccttccggccgtcccgacggagatatttcttcaatactccataaatacaccccgccgcggaacccacccggagtgagacgcccaacacgtcgtcgaactggggttggccgggggccgctccccgccgcgggcccgcagactcgtggcgtcgccccgcagctccgcctggccgacggggaaccggccgagacccggacacgcacgcccgggaggacaaaagcgcgggcggaccccgcaggctgggaccccggcggctggcccgctccccgagaagggccgtggtcggggggctctcactcacgagccgctggctctgggtcagccctgcccccagggcagcgctccatcatgaggctggcggggcgctgagccgtggcgtcctcgctcctgcgctgcccctctgcatcctggccccttccctgcacacgcagagctgccacactgagcgcccctcagcttacttaagctcggcaaggctggagaaggccgtctgggtgaccgggcggagggggatgctggggaaggaagaattcaggcagctgcaaagagcgcgcgaatatattcattcgacatacctcatgggcgcctaccctgggcctggtccggggcgggtgtttgcggggtggggccgaagcaggggcgtcgccgagttgaagacgtgtactccgagcgctcctgcgttcattcattcgctgggtggagagaggaaggacaagagccccgcgccgatcggaggggagcagaatagtaggcacagttagagggtcttcacggtgcgtttcggaaccttggctgcccggctcgcccttgattacaggcaaaggcaaattcttgcctcaggacctgtgtgaaacagagaagcccagaagcagatccccacctgtttgactctgctagggctgctgtaacaaagtgccgcagactgagcggcttaaacaacaaaaatttattgtctcgcaggtctgggggctggaagtccaaaatcaaggtgtgggcagagtgggttccttctgagggctgtgagggaaggatctgttccatgcctctcctaggtttgtaggagaggggctaggagaaggggcatcttcttcctatgtctccacattttcatccctctgtgtgtgtccctgtgtccaaatttccccttttatgaagacaccagtcatattcaattagggtccatcctaatgaccttgttttaacttgattacctatgtaaaggctctaccttcaaataaggtcatatccttaggtactggggcttagggcttcaacataagaatcagggtgaaaacaataacccataacactttaccaacccttctccccaagacacacaccaccacaggctcaaaaattcttgctgtgtgaatgaataaacaaacttaattttctctctttgacttaatcaaatgcctttacttttgatttacctgcaggtgcttggttattataggcagatattttaatttttgacaatgcgataagtgtaaaatgatgtatcaggaatccaatttgcattacctaataactgctaataagtttgagcacctttcatatatttatttcccatggagtttccttttcagaaaaaaaaaaatgcctgctcataaattttgctcatttttctgttgtctttttcttactgatttttaggggttttatatgttttagatatcccttctttgccagttacatgaattagtaatgttttctcgtaatttgtaacttattctttcttttttctttctttcttttctgtcccacctttttgtggtgtagtctgatgaatagaaatttgaattgcagtataaccaaatataccaatcttcaatttttttgccgttatggttagtgatttttgtgacttgtctatttctacccaagcccttaaagatattctatattttccccaacaagatttaaagattttcctttcacatttaagt

SEQ ID NO: 914579 - DNA, 4001 bp, Homo sapiens
attctcactaccgagaaaaaaaaaagactcagaatagaggtcaagttttgtctggcagaagacctgacctctagtcttatgctttcacattttatttctctagaatattatgatgctgtgtaccaagataccaaagagatgaaatatattacatgaaaatcatgggaataaactcaattctgggagaattgcaggttggaaaataagatctaagaattatacatacctttattatctcgtccagcttccctttaacaacgtaaactattcgtgaaccatgaaaggaacgtaaaccattagtgactttctattctagaaacctagaccaattctttttttttttttttttttttttttttgagacggagtctggctctgttgcccaggctggagtgcagtggcgcgatctcggctcactgaaagctccgcctcccgggttcacgccattctcctgcctcagcctcccgaatagctgggactacaggtgcccgccaccacgcccggctaattttttgtattcttttagtagagatggggtttcaccgtgttagccacgacggtctcgatctcctgatttcgtgatccgcccgcctcggcctcctaaagtgctgggattataggcgtgagccaccgcgcccgggcacctagaccaatccttgtaaaaattggtttaagtaaggatttaaggtcaaacctgaaataccacagttgccaaacatccctgtacttttccttcaaaacactgaccacagcctgtggccgataatgagattagttttctctctcccactcatctgccaactccttaaaaggctgtatctgccttcttcaccgctagcgtcaggcctgtagttgcatataaataagtgtaattcaaaacaaaacaggtgagctctgtcccaggacccgtggaaactcctgccccctccggacgtcgggacacccacacacaagcggtggtcgccttttccgctgccagtcacagggcatttccgtgctgctttcccctccgcagaatgaggaggagcgaagtaccgacctcaccggctggttatgagttttaaatgagtcaccaagttggcagtgacagtggcacacagaaggcgccttttaagtatctgctaaggtgccgttcccagccagtcagaacggcattaccatctgcgctgtaggacccccgcagcggattttagtcatcaattcattcacgcgttcacaatcgtttcccagggcccgcttctcagtcaggggcgttcccctgcattctccattctcacagcaaacgcctacaccagtcgttcgtcgactgcagacaccgaagaacctgctattaaccatctagaactcagaacgccttgattttccgacaagccgcgtgcagcttccacagagctgcgaggccgactcgcaagacgcccgcacctgagggcatgcgtccaccctggacctgaagtggcggcgcggctggcgagccaaacggcgcaggcgcaggagcaagagctcgagcggtagcgggaaaatcaggactggatcgcctcggagcctcggcccggagtgggtcaccggcaggggcggggctccccctgcaagggggcacggcgtcgaggacttctcccttccagacccgggaagcgggtgtccctcaaagggcagccggcacacggagaggtcccgactagtcggcccaggggcggccataagtccaaccaggaaggccctggccagcccgggccagcctggcggccctccctgcccggggcccgtcggggctgtacctctccgtacacctggctctgctttctcatgtagacatggggaagctcggatgaggctgccagggaatagatgttgccgataaatggcagccccggcggccccggggggaagcccatcggccgcctctgcttcagcagctggcggacccctagcgcgaagagcagcaggaagagcgcgccgccgagcgccgccgcgccctcttcagctctccaaagcttccacatcggcccgagctggaggtgcgaactccacagcagccctgagacccaggcactccctccagccctgccatactcccattggcaggataccctcaggtcccgccctagctccgtggccattggctgactgagtgagcgctcaggccccttcgggacaactaccttctagttttgcgcggctgagagtggactttgcggagcgggtggccggtgctaccctttggaggtggcgcggctctaggcggagcaatgagccaggagtccgttttctagaatgttgacacaagggcattgacgaggtgtcaggacggcctcactcactgggctaggcggatcctgcctctctggggccagacctttcttaaagtgtctttttaagtaccaggtctgcttatttcatttcacactaggaaaactggagagatgatcaacactgcagtctttagctgaacctgatacttttcagaatttccagtagaaaattgacccatcagtagtaaaagaaagtaattttactgttttgtcctgttttactatttttctcctgttaatgtatttttgtgtgtgatcttttaataattgtgatgattgagcagtttatgtgattaactcagtttacctatatttgacccctctctggtctttccaaactgattacttattggcaatcacgggactcttgtctgcacttgttcacggagagtatttactattcaagatttctgcctccactgcctggaattaagcaactgatttcatattattcttgctaattgtttttattcctgttttctattgggcagttccttgcaatacaggacttactgggtttgggactcttctaacagctgccctctaattgtgatttagcagtggcatgagttttatggtcctcattagcttacgactcattcacacaacaaatatttattgaatgtctactatgttcccatgtcctaagcaatggagatacataggtgaataagagcaacaaagtcctttctataacttacattcttatgagagggaagagcaatgacatggaaatacaataattttcaataatcagaagcaaacaaaaagtgcgttatagaaaacgcctggtggttggggagatactttagcaggcaagggctgtcaaggaaagtcttattaggaagatgacattggagctgagatcaactgctaaagaagtgtatttgtttcctactactgttgtaataaattaccaccaatctgatggcttaaaaccacacaaatttattttcttacaattcttgaggtgagaagtccaaaatgagtcttccagggctgacagagaggtgttagtggggcttcattctttctagagactgtaggagagattctatttccttgtctttttcagcttctagaggctgcccacattccttggctttcgtccccattccttcctcttcaaggccattaatgtcagtttgaatccttccaacatcgctgtctctctgattatctctcttctacttccttcttccacttataaggatcgttgtgattatattgggcccacctggataatcccaactcaaagatcagctgattagccctttaattccatctgcaaccttaattcttcttgccatgaaacctaacatattcacagttctagggattagtatgtggacctattgggggaggggagcattattctgcctactatagaagagaaatttgaggcagatatgggggaaaatattccaaacagaggaaatatcaagggcaaaggcttcatatactaagcaaaccttgtcctctgagagtgtttccaatttctctccatctcccacgcaaggacactgcggaagtcagcaagttagtcaggtctttgagtttttctgtttaactggcttgtgactatccccaggggctgaagttacccccacaggtatgtgtcacagtatctgcagccacagaatatctacctactgcctattacaaatgcctattaagagataccttaaaatt

SEQ ID NO: 914580 - DNA, 4001 bp, Homo sapiens
ccccaccgggagcatgtgcgctcagggcctctaattccctatgacaggccctcaaccttccggctcccttcctcccaatcacatcccgtgccaccatttcctatggctcctgcctccagccctggtctctttacttgatgagactctctgacctttgtacagtctttcgctgtttgcaaagtgtttccacgtgcaccatttcctttcattctttactaccagaccaccatgtgacatgccttgattggtgaagtcacctgctgaaggtcacacagccaacactggaattaaagtgatatggctccaaaggcatcggacagtgctccggttatagggaactcatcagcatctccaagcacccaccttggcaatttggcgaccacctgccaccctaccctcaacatcatctttttggactcataagtgccttccccagcacaagctcaaccctgtgattcttctaccactgatcccactcccccaagagatccacaaagaactgaagatttcccctacactgtaagacttctctaggaggagctgcaaattgcttctctgtaaagtaaggcactaggtgatgctgagtgagaccttcacccaaagcttcccaaaggactggtgagagcaaacacaatctcagcgcagatggaggggttttaacataggagctaagcagagaggacagacagagcccttggaaaggaatttaagcctgggggtgggagtcccggtggccccagcagattcccagtggctgcagaatcatctttcaagcataccccaatcgatccaatcctctggacccaaaggctccccagcatcaaagaagagaggcaactcccagataccctggagtgaacccatcaacccagggagaaggcaggaccccgtgactacagatagatggtgcgccataccactccctcactcgctgacccgggttacctcttggtcctgcttgcttctcaggacatattctgggacaccgatcaccactgaaaatcatccacccctcccttcattcccaaagctagatgaaaagctagatgaatggttctctctaccttagcccaggacaacggtagtgcctggaaggtctctatctgggttaccatcagggcccttgtggtagaagcttctcctggcatctcttgtttatgcccattataaaggacaccaaccttctcccagccttctgccctcctcagtccagtgtacccaacaggcattaaaactggacccccatgacagaggcagtgtccccttcatcgcccgtgaggaaggatgggcatttacccttcccattcatcaggatgggagggccacggactccccccgcggcagtgccgggtagccccccgcaccacaccgtgccaaggccctttctcacagtcatgccaggaactctagccatgctgagaacaccaattcttcaagcccccagtgctatcaccccagatcatgtcaagcccaaggccagaaccatcccaacacccaagcaatggcagcacttcctcacacccatgctagcggcaccaccatgccggcacgagctggccacctatcccataaccagtccgaaggccgtgcccatcacctacctgtgcagacagctgcaccacctcacacctgcgtggccaccaccgcaccaaggtggaggcgagtcttctgagacccgttccaggaaaaccacgccgcctgtgccggacccacgttgcccacgcccgtgccacgcgtgtcaccatccccacgctggtgccaggggctccacagacctcacacctgccacgggcgcgcgtggcagctgcaactccgcccgccgacccgtcgggccggccaccgcgcgccctggacactgcccagcccgccgcgccgctcgcaccgcgcccgcgcccaggaccggcccgccgcgccggaggccccccttacctcccgcccgccgcagggctcggcccgccgccgcgaccgccacctccatcctgggctccccaaggccccgattcactaacgccgcttccgcagggcgccggcgccggcgcgaaggccgcctccgccccccgggggacgctgcgtcctttacgtaaacccctctccgccgccagcggtgaccatggcgacggtcgtggggaggcagcgccccctggcgccagggaggggagcggcgtcgaggccagggagagccgagtcttccgcgggcgccggccctgcgcgtgggggcggtgggcgcctggctcaggctcggctggggtcccgtgggcggccgggaggggctggactggccgcgatgcgtgcggggaagggagccgcctgggtgcctgcccctcctttaggtccctcgtgaccagttttagcgtgggagagggaaaaaaggaagtaggatcactggagaactggttcatttgtggggaggagagagacgggtcccacctcctcggggtgactgaactctgcttgagaagtcagagcatggctagagttcctggcgtgactgtgagaaagggccttggcacggtgtggtgcaggggtctacccggcactgccgtggggggagtccgtggccctcccatcctgatgaatgggaagggtaaatgcccatccttccccacgggcgacagagcccgtgggtaccctgggtaccccctcctccctaccacccccccaccccccacccctacccccgttcccagtgcccagcatcgtgcctggtctccaaaggggtttacttggtcaattttgaatttctggtaaatgaagaaaaccgcccctcctgttccccttcacgccctttcattcaccgtaagtcgcttacacctccctgggagcactgtgctgaactgggggagtggagcacagagaggagcagaaggcgggccctgacttcaaggagctcattctgctggggaggagacgcagatggagggggttttaacacagaagctaagccgagaggacagacagagcccttggaaaggaatttaagcctggggatgggagtccagtctgcaggtcgggatgactcagctgggtcccaaagatccagtaaagattcatcagagacaaaaaggggaagaacgttttctttcaggcaagagaagtgcctctaaaatgtttcctaggccctgttgccacccccaaaatcacagtgatcgcgcagttcagtagaagtgggagccataggtgaacaaggaggtgtgggtagtggggtgcccggcttgagcagaagcctcggtctgaaaattacgtggacatttgggttggaaatgagactgtgaggccaggactgccttttattgaagcagatggagccacttctggaaggagttctgtgttacctgtgattatttagaaagcaaactcacgtaggtaacaaggaaaatgaggagtgggcgcatatacccagtggggcacctcaggggattcaaggaggagttgaattcctcaaggctcaggaagggcagagatcaggggaggctttaagggacaactgtagcagtatcagtttagggatcttctttctagatcattgccattaatcagaatcaaaactgccagattggatgtctcttggttcaaagttcccgattcccagaaaaaaagaatcttattagtccagatcaggccacggtcaatcagctatggccagggcagaaagtgctttgtgatacaaacatgtcagtccacttttccccgttgagagacactcccagaggaggagaatcatgacctgaacagccagtccaaagactgtcggccaggggcggtggctcatgcctgtaatcccagcactttgggaggcagaggcaggtggatcacctgaggtcaggagttcgagaccagtctggccaacatggtgaaaccctatctctaccaaagtacaaaaattagcctggcatgatggcaggtgcctgtaatcccagctactcgggaggctgaggcggaagaatcacttgaacgtgggaggcagaggttgcagtgagccgagatcgtgccattgcactcta

SEQ ID NO: 914581 - DNA, 4001 bp, Homo sapiens
caaatcagtgggcctggagcaaagcccagggacatggccagcctcccacactgtagatcccagctccagaccggcccacataagccccaaggttaggaacggtcacatggtcattcttcacgattccttctgtgaccggtacaatgtctattacagagcaggtaactgttactgttttactctgaatgcaagacccagataaggggcagagtggctctgaagggactcaagaggctgcagccccaggcctggctgggaccagcagcctccaggaaacaaagaaaagcagggatcagaccctgggagagaggatgaccctctctcttcacccgtgagcctcaggaggcaatagcatctctcagtcaaagtgtaaggagctttagcttgcccaaggctgggatcctgctttgagaccatgctgccattcccgtcccggccctgtatgactcaccatggtgtggaggctctgaaacaggctgagttcacaccgttgcactgagctgctggaggatggacaatcctgtgctacctgggtctgagtacagtggaggcagcagcagcacctgcaggagtgggtaacgatacaagctgcggaaggaactcgcagtcgactggcacaatcacgccttcagcaccctagtaattagggagctgccccagacttcggtccaagtccaaactctagtacatgggctacggatggagaagagtgtggggctgaccaaggttcatgcctgcacttcactgccagaagacagatcaatccatgtcaagcacaggtctgcctttatgtccaggaacagcacccacttcatcactaaaggacagtgatcctcagaataactatcttttacacgggcatcacatgcagcgaaaaagttaacaaagctcgtcacacgcttgccctcactggccttggcaccaaaagggaagggaatggggggagctagccaggtttgtgacccattttacttctgggaaacagactcagagagctctagggacttgtccaaggtaatacaggtaacagccagaatctaaaccaatgtctagtttttctacagagtgtgtttttactactgataattcagtgcctccaaagtcaggcagagtctctgctatgggaaaggcaagatgtaaaccacgatgactttctagcttttcctcagttcagcctggttcagcagcgtgttggcctctgtgtgggtgcacaataggaagaatcaacatagctctgcctcagcctacttggggttgtggggagggtcttaggtaaaccaattcctccctaagcctcagcttcctcatctgtaaaatgggggttggctcctctctggcattctgcgagtgtgccaagccacgtggtattcctcttgttcccggggagcctgtttgatgtggggtaccctggaggctgcagggctgacggctctcctggctcattaaggttccctacggagaaatactggttttgtgtttgaggttcgaatttgtagagcaataggggcactaataacgttgggcaagcagaccggtgggccctttgaagtctgaagaatcaacgcgcaaaagggaggaggtgagcaggtggtcgttcaaacgtcaggcgagggcaccagctggatctggaggaactgagacagtgaaaggaaagcaggcaaggttctagtctgggatatgcacgaatcgcggtctcccttccctctctatgcctccgcagtccttcccgttcccaaaggaggaacagcccgagggctcctggagcaacggaaggaggactggatgcggggaagggcaaagggcgcggaacggggtggggagtctgcgggcgagctcggaggacactggcgcacctcccccgccggctcacggccgcatccgccacatccgaaggcgccgcgacttcccggagaccccgaagcgtgcgctctcatccgggtcctgcgggcgctggcggaaagaggcgaggcggtgcctccgggggcggggcctccttcggttggcggcctcgggcttcgggagtcctccaagaggccaggtgaggccgtcccgtgatgccccgcgccccggccgctctggcctgcaacgtgtctctggggcggaggcagcggcagtggagttcgctgcgcgctgttgggggccacctgtcttttcgcttgtgtccctctttctagtgtcgcgctcgagtcccgacgggccgctccaagcctcgacatgtcgtacaactacgtggtaacggcccagaagcccaccgccgtgaacggctgcgtgaccggtgaggctgccggggccggagaccccggcgagtgagggagttggggggagccgcggcctagggaggcccgccgccccgggggcggccgggcaggagtgggcccggcgaatggaaggcgctggcggccgaggaacctcccccagcaccgcgacctcgaaagagtcgtccctgtacgcgctttttgggggttggaagccgctctcgagggtcccctttcgtcctggggaggtcattcggcctcgagaacagggcgggcccagtgagacagaggagtgtgagttggttgtgcggtgtcgtttgggcccggagattggctttctgtggccaggaaaaggggaggtggtaatgacgactttggggtcaagattttcctgtggggaagtctggggggcccaggaggtggagggatgtgaggaatgcccgcattatcccacagagggagaggagccctcttcaggctaacccctttgcctggggctgttgtttacatgagggccctgctggagaagagggtttggtttgcctggcccagtgctgggtttgccttgttgacgatgcgcttggattgttaaggacaccgatgttcagaacccgggaagagtcatcttaacccacattctcagctgaatatgcagaccccaagcttgcatgtttatatacaccctaatcatgattccaaaacaaaactgttgttcagagttggaggtagctgagtgtggatggaggtattggtagactgccaggagggcagggggtgtggacaaaacagtgttttcatataaagctctgggacttcttcatttgacttggtctgtcagataaaagttttgtgagactttagatgaagactggaagaagtgaacactttctccggcattctcaattagagcctgccactgtaactgtaatagagtaaaattggaggggcaagaggcatgagaagggattacgcagtcattgtcatttggaggacacacggctcttaggtccagtccagttttcttagtctgattagggaagtagctttgttgaatgcatgaactgagactctttgaggtgccggatttggcaagaaggggagtagctggagggagttggagaagtatgtgaagtaaatgagaattctggaggtatttagacataagtgataggattattttgaagggatgggaggcccttcccctgagttcaaaagttagagggtctgttctttcaggacactttacttcggccgaagacttaaacctgttgattgccaaaaacacgagattagagatctatgtggtcaccgccgaggggcttcggcccgtcaaagaggtgggcatgtatgggaagattgcggtcatggagcttttcaggcccaaggtaagtgttgcagttgggacaagcagtggagggggaactgttggtcgtaggttgttttatgttatttttgtttgtttatttattttctttgagacgggggtctcacagtgttgcccaggatgtcttgaactcctgagctcaagcaatccctccactttagcctctggagtagagtagctggggtattgtaggcatgccaccgtgcttgggctgtgttaggttgttttgcgaattcttgggatgggtggaatatgctttaggagaaaaactcttctcttttttctctctttggatagcaaatttcagtatgtactcttgaccaagctttctagaagtaaaaggagagattcattagggaaac

SEQ ID NO: 914582 - DNA, 4001 bp, Homo sapiens
tcgtgattttacccatcccccgcaggccatacccagtttttcttctctgtatagggactctcctgcctcctttttagttttgaccagtggcagagtttttgagccatagtttgaatcatcagtgaggttacaggaagaaaacctggtggaagctgcctaaggtgttgctgttttaggctgggacacaattatgggctttcttctaactgcttcttattttgcaagatcaacggtattttataatacagggtgggaaaggagtatgagaaggggtttggaaatcaggctggaaataggttgggattgggggaggatctaatccccctccccctgggcgaccctaggcatcccacacaagagggcaccccatgtggtcttgtgaaaagcccgaagccctgaatgagtcttaaagagaaattagccccggctggtaggtgtctctcggcggcgtggagggactagggccggtctgtgtgtggctgcccggaggagctgaccaattggtcatggtgctgaaacctttgtggggaatcgtggccaagtgcactgactctgtgggaaaacggcggcgtgaagggatgccaacagctcctcgccgggaagggaaccgcctcaaattgggaccatgacaattcctgctaatttgtagagcagggaattggtgcaaagtgtcaagcagtcactgcttgtgctcaatagggcatcaaattggcgcgacggattcatgaatgttatacgcctcgcaacctctgaaccagagcataaccccgaggggtggacggagaaatacggcttcggagcagggagcgatgggccggggctggggcgccgccctgcctcgcgcaaagaagggggacgagacctacctgggaaataagaagatctgatgaaaggctgaaaagacccttcgaagtagggaaaggcgaaggtcttgggagggacgctctggagcaaggctggggatgtttctggtgggcgatggaggggggacagaaggagagagggagacagaaagaatctgattacgtacttgcctattgtatagcacactgaacacacgatataattagcccttcatctggtttcaaagacatctttcttatacgttgacagggtaaaataaatcttcccaacattgtcttatctgtaaaactcttttctttctccccaacgtaattctctgcgccgtcccactctaccccaatctccatcctaggcactaacgagataggactgagtggggaggaaagaaattgcagatttataatatttgctaatccaataaatatatcatattgagtttaaaaaaaaaaactgtctcctagaagctcgaaggcagaaacgcagacgtccaggagcgtgcgctcagcgttactgcaccagatgactgcgcacagtctccgactgcgtgtgctcaagttcactccgaggatggggcgagcctggaggcttttcttccccggaattgactggactattctcacattgcctgacgtagggtctcagagttcgtgcgtattgtgtgtgcaccgatgtgtgtgtgggggcccgctcgctagaggaaactgaggccaggatgactccgcgcatgcctagtacctgaatgggcccttagggttctgacctcgcttacctgttctgggccccgaggagaggatggcgttcactccaaacttcagaaacgtcgtctcgctggcaggggagaaggcagtcggcggagagccgccccgtcggctgccgggacccggggagcccaggtccgaggcccccgtgtcggtgagggccgtgggggccccctgcctgggcggcgacatgctggcggtgggcacgctgcggggcaggtaggcggggggtcggctgatgcggatcagatcctccaccaggaagctggagtggccggaaaatgccgactgcaaggactggggcagcgtcaaggtgggcgtgggccgcaggaggctagggtacccggcggggggcgcgaggaggccggggaacatcatggtaggcgcgggcgggcgaaataacccttctttcagtggccggagggtaaacgcctcgcttcccgcccctcccgcccccacagtgtcctctctcttgggcttagcaaacgtctccaagtaacaatcccacttgggcgtctgcgagtcctccgtggtcctctcgtcgaggtgatggttttatagtggcccgcccgctaaagcactttgaaaagtgacagctctgacaatgaagttcaacaaagttctccactcgagcttcattcgccggaggctctggactctctgattggcgcaggggtgcaatttatgattggattagtcttcataagcatggcccgcacaatgggccggcaacaaaggcccgcgcgcatcaattttgcatatcgaccgcctctttgcaatacagtgcgcccccaaagctctcgccaaaggtttttgttccgaagcaacacccgggctaattaaatgcctatttagaagtttcagatgacatcttgcctcatagaaaaggaattatttaaagaacccactaaatttatttgcagctcccctgctaagcctggaaaataaatcaataaatattcatagaaatacatcttcaggctatcagcaaagttgccctccctcttgtgggggtagggcaatgaaaagtttcaagtcagtggacatgaaaatatactccctttccggtctctagccctatccgttactccagctgaagcataaagcaaatgtaggggtgagtgaaatcagtgttagaagtcccattctgacgactcagggaaacttggaaacggatgctttggggccactggatgtgtgtccgtaagagtggggagaggtctggagttatttcatttcgggagactggttgagtttgagcgttggtggatacctgaaaagtaaaacgagtctccttcaaattcccagcaacttggaaaacgattttctctaggagtttctgcaaggggctgtccgcacctcaccttgcgggaggagcggaggagagcggcgctgggctgccgagcggcaggattccgcttgcaaagagcttaggctgaccggaaactgcctcgggcaagggtatccaaaggctgtgagtgctatgctggccgttctccaaacacagggagctctcggcagtttaagttgaaactcacagccctgacattttaagccatagcagcgaaggtccagacgtcgtctggagagaaccctaccacttgcggggcccttaacttggcccaaggtttggcagcttcttaattaactacaacgcacaaacgcgtgaaaaccagagggaagggatgcggttcccaagaatgttggtccactccgggaaagcctcccctgaatgtggggcttcaaaggagaatcttcctggagacagtcccttcgctttcctctggttggggctgaggtggtactaagactcgattccccccatttctctgttcggcgagataacagatgtgttaaatgtcccattcatctctttagtgtggctgaacctccccaaagagaagtgtgcagccccgccaggccgccctgatcctattaaccatgaactaactgtcaccttcagctggttttcctttttgctttttaacacaaagctttctcaaaaatcttattaaccagctttatttctctcgatggttttgttcggggtgttttgtgttgatgatctccatgtcgctgctttaaccattcaataaaagtgcatctgcgatttatatcacattaaaccagaaacggagccggctaaaactctcccttgattcaaattaaaaagttatttagggcccagctccagaggcgaattaatgctagaagatgacgtaagtgcggagtttctgagcccaagaccgctcatgctcatgggcagcgggagaaaaccaatcaggaaagaaacaacttttaaataaggggctatttaaatatgggaagcgccttgctggagttaattggagtcccctggaaacggaagaaggagatctg

SEQ ID NO: 914583 - DNA, 4001 bp, Homo sapiens
aaatgaaggaagcttaatgatcagaaatttatgtaaaaattgttttaagaagtttattttggtataagcagagtgtaagacaactgttctcattcagtaagccaatggcaagtaaagaaaaaaacaaggttctagtgaagaaatgggactgctataatttaaaagatatttaagagacagaacagctaaatggaaagtgtacattttgtctgattctgagtcaagcaaaccaaccagaaaaagacattttcaattaaccgtggaaatgtaagtaaggtctagatattatgtgacagtccaataatgacattatggagataaaagaaaaagttggtacattttagggatgcaaactaaagtatgtagagatgaaatgacaaaatatttggtattgctggggaaaaaaactatttcttactttccaaaccccaataaataaataaggtaacacaataacctaataaatagtaaatcaaaataaaatgcttttgctgtaaaaaacaaaaaacctggagtaccggagcatatctacctacacaaggaagaaccaagctgtggacagaagggagtttgagggctagagatgttcaaggtggcatcattctgacagtactgtttagaaaagcattcaccacactacttaattccattgctttaggtattttcatgaggccacacaagaaagtatgatgcagccaggactaaaaccagatgctctttgtatctgcctttaaacatgacaaaaccctgtggagaacctaatctatgctttcatctttagatttttaaacttgcttgtttcattcagttattctttatagttcataacatcattaaataactgatcatattagattattttatttattctgcttaagtttatcttgactgcttctcaaactcagattggtagaagtttaaaaaagaaggaaagcaaaatcaaagcagtaacaacaaaaccattttaacatctccaagtgaaatttatgtcatgctggccaaaaataagatgtagttttcatctccaggtacaatgctaggaagaggtgttaatgtaaagtaagcagcacaaagaagtaataaaaggaaacacaggaatcaagaaagggagaagaaagaaaggtgagaaaaacaccaccaccaccaccaccaccaccaccagcaacaataacaaaccccaacagtgcccatatgcagtgccccctaactgcttcgaagaagaacagttcattctgcttttttctgtaagcttgaaagatagcatagctgccctgggaatgtgtagacttgctgagtccttgttctgcccctacccaactagctgtttggccttgatccttgatttctttcctcatctataaagtgggaataatggcacctgccttacttgtctcactgggttgaaatgaaagcgaagtgaaatagcaaatgtgaaagaattttggaacgtttttatgttgtaagttggttgctaaggtctaaaagaaatattaataattacgtcgaatatcttctgcagaaaaaattaaaccgaccccatcccccgcacatctagccctacctggcataggttttagttcttttaattttcgaattagaacattgtaaaggaactgtagggacgagagtggcatcaggtctcctcatccttctcacatccttgcccccgcacccctctctcaccccagagttcaagcaccaaccgaaaagattgagagtagctcagggtacggtaaacggaggaagctttgaaaaaggcggggaaagcctgggatggcgagggggtgctcgctgaggaggaggagagaagcgacagtcgcggggcccggaaaagagagacttagagcgaagccaaaggcgcctttcttcacagtttgggaacttactggtagtaaacgccactccatagaagcggtgaccggttaccatagagaccgcgtcggggtgggcggagcgtcgcttctgagctgtgccacggccacatcagctcggccagaaacgcgaacacgtcggaacagtgacttccggcggaagaagaagccggtccggagttctggccgacagcaggcgaggagtgggtagcagcgcctatgtgaagttaggtaggtctgatgtcgtataaagcgcggagagggtgcccgccaatggctgggtgggtaaagccgactgtgaatggagaagattcccaagtcccgagcttgaggaggccccggctgtttcgttaagtgtatatagctgtgggaagaggttgcctgatttctggggctcctggtagggtctctcttctggagcgtggaagactggggcatcctcgcgtagagagtttcactctgtctttgcgaggtctcagcgcctctccaataacaggggactcttgttctctaccagctggtgctgacgttatttcccatatcatgctctccagacaatctggaggaaaagcaaacgagaaactttcagaaggaatgcccccaaatttattttaattctttgatgttctgttttgctttttttttattcgttcattttgtaaatattcattaagctcctccagcgtgtttagtgggtgcttacttgtgtgccagttttatcataagactagcagaaataccttcttagaggttcatacaccacctggttcattataaaattcttttttttaatgctgttcattaattaaagtataaatatatatcgtgaaatacctaacacgttttccatacttgtcggtacacttatacctggaattcttggggcattttaaatgaaaatctgtgcttcctcaggtttgcattataatcatgatttactcgactaaatactaaagaatttacaagggcagtacttaattttttcttagatacatggcaaactgtgatgaattgtcattaatatttctattcagctaatctgagaaggcccacttctggttccatggatgatggcggttgagcagatgccaaaaaaggattggtacagcatcctgggagcagacccatctgcaaatatatcagacctaaaacaaaaatatcaaaaactcatattaatggtaagtcttttctttcagattttaaatcatgaggggaaaaaaatcaatttttatatgaaaccacaaatttaggtttccagaaaataggataccagtggcaggaatccaggtattaatttgatttaattgaacatttcagtaatattgcagaaaaacttgatttgaggtggaaaagcatggttaggagcaggagatctgagtcaggctgcttgagttagaatcttgagtccatctttatctgtgagaatttggacaagttactttttcttatatgtgccaagggaggattaaatgaaataatccatgtaaaatatttagaagtgttgttacataataaacaacagtagctactagccacatgtggctgttgattacttgaagtgtggctagcctgacttgagatggactgtaagggtaaaatatacactggattttaaagacagtatttaaaaggaattaaaataatttaacaatttttatgttgattatgttgattaaagttcactggttttatttttcctctactgtgtccatctgctgataaacttcttaaaagaattcttgatctcttacctaattttcatatctagcatttctactggctccttttttaaagtttctatctctttctcatctttttatacatactgtccactgtttctactatatcctttaataaacttatcacagttaaactccctgtctgataattctttgtagttaataatcaaacagtttttatgtggattatatattgaaatgatgatattttggattactggctattttgtgttttatatacataatatgcatgcatgtatttgcacatatcaaagtttgtttctcttgcattttacttttttaacattgcatatgtagccggcatttatacttacattatatttctattgggtaatgctgatttagaccatttatacactaattatcagtt

SEQ ID NO: 914584 - DNA, 4001 bp, Homo sapiens
actaataacaaagcacgtgtgttttataatacaattctatgtttgtttttttctgattaactgtactaggctatttacacagtggaattgtagttaaagttatttagtaaagacgtgacatgaatagacagtttcactgacgctaatcacgcaagtgcagtgaagcacatttatgttccagtaagtaacatgggtgagaacttcccattcttgtgacattttccaggccagtagccttgaaattatgcaattccaaaataattttggggtgggaagcttcctggtatcatacagtcacatttaagtgagagttacgaggaaaagctgatgtgagaaagctgtaatattgctggcataaaaataggtgctgccagagagtgaggcaactgacaaacgggtttgccaagggagggctaagggacatccctggtaaccatgaggaggctggcttgaaacagcaggtgttcagctgtaatgagaacccaagacctcaagagcagacaggagagaaggctatgagagcctgccttaaggaggagagaggcagcatagctgggagtgagtgtgactccagaaatagactgtaatactaggtatacatttatcaaaacatcagagtgtacaccttaaccatataccataataataaataaaaagacagagacaaaggggtcccatgcaaggtcaccaggcttagttgggtattcccaatcagcaaaatgccatgattctaattgcctaattctaaaaactgaattgtattggtgctgaaaattagtaaggctcttaagtaacataaaagaaaactcagtggcaactggatcggacagctcaaattgggaaactttaaactagatgtttatttagggcatgccatgcaccaccgacgtcactaggttctgtggttactctaaacgtaactacaccaggtgtacaagcctgcacatttgatctctgctgtctcttccctaatttctcttgtcttctccagcttgaaaaaatatatatacttctggaattattcagtaggcataacaccaaaataagtttatttatgaaagattttaccaataaacatacaagtaaatttttttaagtaacatgggtagcaaattgcattccttcagataaacactgggaacatataagacaaagagaaaacagctttcataatatttttgggaaaagaatttaaatgtactgaaaatgaaggatcaaagtaaaacaaggagaaagaatatcatatacttcacccacatatgtaatattcattcaacaagcagtgcttgaggcctagtatgtgccatgcacttctgtgttgttgagaaaccaaaaatgaaaatggtacgctccctgtctttctaagagcaaatgttacacaaataaagtacaatgtaaaatgcactgtcttaaggtaccttaagaaaaacataaataaaatcatacttcttcccataaggtctcatttgagtgtatgttaactataaattgctaacaagtcattttaaaagaaatgctgtatttttctcttaacagaaatgtatcaacatgttaaactacaggtctgaatcctactttccaaataacaagatcctgaaatggtgaccatgtagctgagggttaaccccttgcagtgaacaaataatgactgacaaaccaagacaggctacttaacagggtaagctccctgcggctgaatgaaagatctgacttccaaggagttatttaaacccagacccagtgaggcagtcctgccaaagatagataccaacctgacttttcatattcaagctttccaggccaggactccaagctaggctgcagcaagttctcagaaagaaattgccttccaagtattaccccgttatagctggtgcccccacaacctggctttctcccatcaccatggtgatttgctgagtcatatcctcagcaggtctcagaaggtatactgtaaagatacatggagaggccatgatggtactgagagacacaaagctaaaggaatagttaaattttcaaccactatgtaaactgaagaaacaaagtccaaagtctagacatctggtataagctatttgtaagacaatgtgtagtatttcaggaaaagttactacttcctgactgtcaatattagtcttgatattaaaaaatctaaaataaaagtagaggaaatttgtttttgtgtgttatattctatgaagaaggtgggtactgaagtcgatccaacaagtatattgtacagcttgtggtaaactcaatgcactttgcatatttcataagagatttgagaccaaccaagttaattttgattttcaatcataaattaggcttaactttcctaaattttaatatttacttaatttaaaaaagtaaaatggcactccacatgaaaaaaaattatataaaaattacttttctagcatatagcaaatgttgaaaacttatgttaaatcctacttcttcaaaatactatgtgtaatttacttctaaataacccctggatcaaagaggaagtgtcaaaatttttaaatattctgaaataaaatacttttaatttaagttaatgtagctttttataagctaactaaatgaaagtgaaaatacaacatcaaaattcagagattgcccgtgttatagcactactttgaaggaaattaacagcattaaattttatattactaaagaataaagatgtaaaatctgtaatctaagcttctgccttaagaaactagagaaagagaagcaaattaagcatcaagcaagcaaaaagaaagaaataataaaggttagagcataggtcaatgaaattgaaaaccaatgaacaacagagaaaatcaatgaatgaaaaactatttctaaaattgataaacctctagctagactgacatagagaaaaacaagacaataataactgatatcagaaatgaaaaacaagacatcactagatcaatcgcatacacagtgaaagtataataagtgaatactaccaacaactctatgcccatatatatgacaaattaaaatataacaactatttgaaagacaagaactacaaatctctttccaagaagaaatatgtagttttaataggtgtattcaagacgttacatttgtagtcaaaatttttccagaacagaaaagtacaggctcaaagaagtgtattgtcaagttctaccaaacagttaataaagaataataccaatgctatatagtttataccagaacatagaagaggagagaaaacttcccaactcattttacgagccagcattatcccaatattaaacccagctaaagctctatcaagaatagaaaactacagatcaatattcctcatggacatagatacaaaaagcttcagcaaaatattaccaaattagatccagcaatataaaaaaggaatgaaacatcatacgaccaagtgagattcattataacaatgcaagattgttcaatatttgaaaatcaattaatgtaacataccatacttaccatagactaaataggaaaatcatgtaatgatctcaatagatgcagaaaaattatccaacaaaattctaaatgcattcgtaataaaaatttacagcaaaccaggaatagaatgaaacttttttacccatttttttctttccggagactcactcagtaacccagtgcagtggcacaatctccactcactgcaacctctgcctcccaggttcaagtatttctcatgcctcagcctcccaagtagttgaaactacaggtacccacgaccatgccaggctaacttttgtatttttagcagagatggagtttcaccatgttgcccaggctggtcttgatctcctgacctcaagttatatatatatatatgtatatgtatatatgccctttgtaagggtaaaaacgtctaggtggggtggctcacacctgtaatttatctatatatataaattatttatatatttattataatatataacatattattatataatatataatatataacatat

SEQ ID NO: 914585 - DNA, 4001 bp, Homo sapiens
gtcattatgaggtcaaagagtgtaatgggagcgagaacatctgaaagctggaaggatataggaggttgtgggtagagagaggaatgcaagagtttagaattttaaaggtggaatagttctacagagtggtcctgggagggaggaaggtaacaggagctaaggaggtcaagaatctgtgaagctgtggtgttgaaggacactgagaaaccatggcaggatacactatccagatctcgaagttttcagggaacaagagggtatacctgggagatctacgtatgagaaggggtgaaggtgtgagcttgataagttaagcagagtttattcagaagttgggacaggtcttcctgtggtgtgcatgccatccatgactgtctcctgggggttgtacaagtggctgtgtggtaagggcaactgtggcacagcctcctgttagtgacaggcttctaggacacccactatgtatgggcagctccaaggaagtaaacctaataagatgtgctgtgacagttgtgacagtgcttctgatggatgtggattgcagtgacaatgtctcctgagaggtgctggtctacttgtttgttgctggtgacagtgtttctggagagtgttagcagtaacaatgtcttccatggtatgtgttggccttgacaatgaaccggtgggagtatgttggttgcagcatttctcctgtgggtgtgtgttgtcatgagagcattttccgtaggtgtgtgttggcttgatagagtctgctgtaggtgtgtgttggttctgactgggggtgcttcctgggggtgggcttcctggaagtgtatgatggctgtgagggtatctcttgaggatgtgtgttccctgggactgtgtcctcttgtgggttgagtagggctatgactgtgtccctatgggtatttgagaagttgacataagcgacaatatttttctggcctatgaccttgtggctgtgggcccagcccgccacactgagttcattgtgcttctagacctccctctccccaccccctccacgtgggacccacgcctgcggtgaccttgctctgtcccctgcacgggattctgagctgggtatcccagacacaaactcccagttgctccaatctcccactcagaacacgtctgggtgacccccccctccatccacttcaggctgtgcctgcctctcctctgcttctctgtacttctccccactcagtttctttgtctctgtctcagttggtctctgtcacacacccatcctccacattctgacacatgggctcccacagagcgggcaacacaccctcacagggactcgctcaccatgacacacggtcattctgaccctcacaccctcagagtgacacgcacatgcacacacagccagagagacgcccagggacacacaacctcccagtgacacgcactgacacactccgacgatgcactggaacacaacgctgtcgcaccccacacccccggcgcacgctcccgccgccaccctccccgactcgatgacacacgcacacaaagacccccaggccctgcccccacgctcacgttcacgcccgcccgggtcccgcaggcccaggccccccctcccccattgtctccggctcagaacaaagcccccggctccgccgccgctgccgcagcccaggggaggccggcgggcagggcgggcgcggccagacgggccgggcgggcgcgggcactgacctccgcgcgacgcgggctccctcgcccggtgctggggcgccgtccggccgcggtcagccccccgggcagcgcccgctcgcgcggggcctgaggccgcgcatcgtccgcagtcgctgtctccgaggcccgcgatcccctccgggcagccgccgtcggtccgcgcgcccttggccgtcgatcggtccgtccgctgacgcccgggcgccgcctcctgcacagccgccccgccgaggatgcgagctccgctgccgcggccccgcgccccctcccctcccctccccccgccctccgcgcggtaacccgagcccccgcccctccgcccgcggagcccccgcccccgcccccacccgcgctccgcgccgccgcccccccttccccccggcgcccgcccggcctccctccgcccctccacttcccggccccaggccccggctccggatccggccccagcgccgcgccgcgcccccgtcccggttcccttcccttctccccgtcacttctcccgtcctctcctcccattcggttctctacgccctctcgtctcttccccttctcgccgctccctgctgctcacctcctcctcttccatcttctttccatcccctattcccctcttctccctcagtgccctggtctccctctcgccccttctttttcccaaccgtcatctccattcccctctgcctttctcccatcctcttcttctcgccccatctccatcattttctccccagctcttctcccctttctcttctccttaccccttctgcttgatctctctccagcctctttacatcagattctccttccccacctctccttttatccttttcttcctatccctttctccccgtctcttctccccacctttctccccatccccttctccctgtgtctttcgcctcacctcatcatccccttttcctcacgccttctcctcattcccttttctcacccctgcccttttcactacccgctgtctcttccccttcttccatcgtaacctcggccttctcccctgttagtcacttttcattatcccatgatttctgtctcttttctctccttcacccccaggctccctttcccccactttctctttatcccaaatttgagggtagagatcgggagatattggaaagaagagctttggggatggtggtcccactcacgatatactccctagaaaaattaagtgaggaggaaaccgggcagggaagtgggaaggggctcaaaaaaccaacttgggagagaatatggggagaggggaaatcagacagagacaaagagcaagcaatcttaaaggaactgggaagagttctgactcctgtccttcttccttaggactgcgagtagactgtgagaaaaacaggttttctggacttgagatgtgtacaaatggcacaaagaaatcaggaacttctgtggagaaggaacacagtttcagctgaagaagaagggagtgtgattttggaagaggagtgagggagagactggggtccttgatcatatccacggcgcttgggcagctgggtggatggatggtggtgaggctggctgtgctccacaaaaggagcagcaggaggctgcagggggttcgtatgaggagatgatgactgtgacttggggctgctgactttgaagtgctggttgggtaggtaggtctgcaacttagaggagcggtctgggatggacataaatatttgggagtcatctgcaaatgccgtataagcttgaatatagggtgaagtttttgcttttttgtttttccaaaatcatccctcaggaaagagggagtaaccttatatttgagtccttacaaggtctctcatattacagggtttgctctcatttactttattttgaacaacaaaccactggatagggcagtatggtatggtgactaagcttgtggactctggagccagactccctggctcggggtccagactctcctatttacaagctgtgtggcactgggaaagttacttaacttgtctctgcctcagttttctcatctataaagtgggcctaaggattaaattatgtaatatatataaagcactatatacctggcactatatggtaagtgtccaataaatgctaactatttttactgtttggctaagacccattgacctgaaatgtcctcaacaatgctattttggatgtattgtagtcaaagaaatttaacacagctttggtaactattcctggtagtatgacctcataatcgcatgtgttggatgtctcaaaatatgctttttaaagattgctttaaaaagcaa

SEQ ID NO: 914586 - DNA, 4001 bp, Homo sapiens
caaacaaacaaacaaaaaacaacaaaaaacaaggcccagcgcagtcgctcatgcctataatcccagcactttgggaggcagaggtgggtggatcacctgaggtcaggagttcaagaccagcctggccaacatggtgaaaccctgtctctactaaaaatacgaaaattagctgggcatggtggcagatgcctgtaatcccagctacttgggaggctgaggcaggagaatcacttgaatccagaaagtggaggttgcagtgagccaagatagtgccattgcactccagcctggacaagaagagtgaaactccatctcaaaaaaaaaaaaaaaaaaaaaaaaggcgggtgcggtggctcacgcctgtaatcccagcactttgggaggcagaggcaggcggatcacctgaggtcaggagttcgagaccagcctggccaacatggtgaaacccccatctctactaaaaatacaaaaattagctgggcatggtggcgggggcctgtaatcccagctattgggcaggctgaggcaggtagaatagcttgaactcgggaggcagaggttgcagtgagccgagatcacatcactgcactctagcctgggtgacagagaggagagactccgtctcaaaaataaataaataaataaataaaaatttaaaaaccagatacacacagaggcatggaagcctaggccaaggttccctgatcctcccaaaggtgagagttcctgctagtagttctagggaacccccttatctgccctggctaggcctcctcactagtttctggggaacccccatatctgctctggctaggcctcctcactagttcctggaatggtctccatctctcctcagcccctgccagattgctgagcacgttggtattggagcaagctgtgtgtatctgtctcgccagaaatattccgtagtcctgaagatcagggatggtaactttcgtctccacatccccagtacctagtttagtgtctggcatgcatgaaagtgcgtgcgtagaactgaattaacaattataatatattgttctcctgttacggctgaagtcgcgtaaggcagagatcacatctcctacagtctcatgtcgtttccacggacagggatgagcgagacatctaacattgactgggttcctagtccctgtatacataaatggatgatgaatggcttggggaatgtaacatgtgatctttaatctgcaatgcactctcccagtagatatttctagtggagacattagaaaaattagagctagatgtgttcattgccttaatttcaaaggcaatcttgccgcctttcaccgcccctctatgcattctagtggcgcactcccgcctccccggagtgataatgattggtattttccagccgagatccgaaaaaaaaaaatctgcctccgaggcgatgattggttcactgcttcccgcatcccacctcagggttgcctcctggtaccttcccgtgtaggaaaatgattttgtcccgcgcagactccctcagcaccttctgcagtctgaagccggagaacggtaagcggacaggagcacaggtaccatttccaactcctgcctccttttcctctgtgctggcggcgtgggcctcctccacgtccaattcgcgcttcctcttgcctagttgaggagctgcgtccgccatgctgccgcggaggcggtgtgcgcctgcgccccctgcgctggccccgcccctagcccgagtccagcggcctggctgggctgctaactcccggcctaccctgctctggcacccgctcctgcgggatgcgtgccgcgcatggcggagcccgctgacctgtcccagggcgcgcctttcaaccgagttactgcctttggccccgttgtggtgccggccggccctcagggaagggaaaagaaggctgagagtcccgaaagcggcgggctagaggtggctgcgcagtgaagagggacccccaggcccacgccccggggtgggagccgaagacgcccttgggccacggtagtgttggagcccttgtttgaatactgacattttaatcatagttacaccgacgttgaccaattatcggggaagcaacgtttctgacgcaaatccgtgagcccatttgattccttggtcgattttttataccgagtatttaagccatttccatttttctcccattttaattactttgcagaaattttcatcgtggtcagttttttactttgtagactcagtacttttctgctgacaaaaaaggtaaacgaatatggccagaagaaccatctccaccacccacttatttccgggctagaggcatccccctcctctctattttgtttacctgtatttctgccctgctacccagggatatgatttgcagtatgattcgtctcccagggtttcgtttctctttttttttttttttttttttttttttgccatataaaattattacttgtaacttctgctgttgagggtttctttggtgaccattgtttctggttagcccgtttttcactggtgttatttaacagatctaaattttgtgaagagttggtacttacggacaggcgcggtggctcacgcctgtaattccagcacttcgagaggtcgaggtggacggatcacgaggttaagataccgagaccatcctggccaacatggtgaaaccccgtctctactaaaaatacaaaaattacccgggcgtggtggcccgcgcctgtagtcccagctactcgggaggctgaggcaggaaaatcgcttgaacgcgggcggagtattgtagtgagccgagatcgcaccactgcactccaccctggcgacagagcgagactacgtctcaaagaaaaaaaaaaagagttggtacttacatcgcttcagtcagccacacatttattttgccagtgatttgagtttaggttttcagacagatctcatgggtgtgggacagtttttgccattctcaacgttagcaacaagatgcaatttacagtcagtttttggtcaataacaaagtgtaccatgtgttagtttgatttttggattacttctaccagaaatatagattaggagttggataaaagactactttaggccaggcgcggtggctcatgcctgtaatcccagcactttgggaggccgaggtgggcggatcacgaggtcaggagatcgagaccatcctggctaacgtggtgaaactccgtctctactaaagatacaaaaaaattagccaggcgtggtggcgggcgcctgtagtcccagctacttgggaggctgaggcaggagaatggcgtgaacccgggaggcggagcttgcagttagctgagatcgcgccactgcactccagcctgggtgacagagcgagactccatctcaaaaaaaaaaaaaaaaaaaaaggactactttgtgtgtgtgtgtgtgtgtgtgtgtgatgcagaaagcattattaggagagacttaggatctgtcccccaggctggagtgcaatggcgcgatctcggctcactgcaacctctgcctccaggttcaagcgattctcctgcctcaacttcctgagtagctggtattacaggcggctgctaccactcccggctaattttttgtatttttagtagagtcagggtttcaccatgttggccaggctggtctcgaactcctgacctcgtgatccgcccgcctgggcctcccaaagagctggcattacaggcgtgagccaccgcaccctgccaaagtagctatgttttaacaaaaagagcccataattgagagccatgaagtcgggccccaacactgactagctgtgcaactttggaaaagtctcttaacctttccaggtctccattttccatgtgccagcggctattagttctaagcaagacaacgaggcctcttctttcataaaatgtatattcaaatggggtacatgaggtaaacaagataatgattaagaactgttttttgttttttgttttttgtttttttttgagacggagtctccctctgt

SEQ ID NO: 914587 - DNA, 4001 bp, Homo sapiens
aatacattatatacttaagatggccatgatatagtacaaaaatgaataataatttgcctgtatcttataaaaatgtgagctactaaagtaaccatgtcaaattctaatgttgacaaacaagaggtgtatgtatcatcgttcacattaatagcctaatactccatagactcctttaccaaaacacagtaatgagggaaaaaagtcgaccaattacaaaaaagaagatgcagactatgtaagtcatctacctcacagtttaagcagatctctctttaaggagagctctatcattatttccttcttataatcctggctacagtctcctttcaatagtagcatctgaagttgtcatatcaagtgccaaccattgatgaaaaggcagctaatatggttattttttaaaaaagcatttctcagtcgggcgaggtggctcactcctgtaatcccagcactttgggaggccgaggcgggcggatcgcgaggtcaggagttcaagaccagcctagtcaacatagtgaaaccccgtctctactaaaaatacaaaaaattagcagggcgtggtggcgggcgcctataatcccagctactcaggaggctgaggcaggagaatcgcttgaacccgggaggcggaggttgcagtaagcggagatcgcgccactgcactccagcctggacaacagtggaagactccgtctcagaaaaacaaaacaaaacaaaaaaacaaaaaaaccatttctcaaaccaaaattgcagtttttttgtagcataaattttgctgtgatgcctccatgatatgctacaaggggatcaaagagctactactatatagttctgccttgtcttctttcttaccagtaggacagagtacaagagctcacaaattatttaatttatgctgagagctaacagcgtcctgaatgctagaagacaaaaagcatgcagggcctttccaactctgcacacagggacttggcataggtgaggcactatacttccagaaaatggggctcctgcaatttaaaaggcctcctgctgggaccttccgggttaggccactccaaatactaaatatggaggccaattatagcatacaagttttcctttctaccattcccaagacagttgtcaagattccttatgttctgctttcttcacactctacaaagaaattctagaagtgacccttctgcggatatgtactcacttctaagtctagaaaaaggcagaggagcgatacgggagtaggggatcgagggtcggttgtggggtgggggtgggggtggggggaagcgcaatttacatatgcatctgttccccaccctgcagggcacgtagactcttaacgtgggcggctcttctagtctctccataaacgccagcgtgcacacactcgaacacgaggtcgggtcgggcgcggagactcgcggtgttcggcacctacagcctagctcgatcaaaggggcctcacctgtctccagccccagcccggcaggccgggcccgactccttttcctccagttgtccagcaaaggagggaggagggaagcttgaagggtggggggagatggtacctggagattttacactttttgaggcctccgtcttccgctactgctgctgccaccccaggggattttctcttcttcttcaccggcatcttccgccctccccggcagggtgggcaggggagccggggaagggggtccctgtccgctggaagcccctcagcgctggcacccagttcccagagacagcagcaagcggaggagcagagtcgccagcccgcaccggcgcggcccagcccggccgccgcccgctcccaggtatcctcgtcgtctttctctgaccgggacagggctggctcctcgccggtggacactgcggttcgttctcaccgggaggagataacgcggacagcgcggcagctccaccagtcacagcaagcaagaggctcagcctaacccggaggcgaatcgctgaggcccggaagtgacgcaatcgcggagccggtcccgggaaggggcgtggttccggttagcctctgccactcgtaggtaggccaggcagagcgaagctgtctgacccgtcgactgcggcagtccgcggaattcttgtatcctgtccagggtatcctgacctttctcatgaagcttctaccgcgctctgatgctggcagtcaccgccaaaaagtgaaactactaatactttgcagttgacgttaaaaacaacctggtaaagtagaccaagttccacttctgagctcttccacacgataacctcacctgaagtgttcccaccccgtaaatgcattgtcaccctgtgtcttgcgtgttttttttatgggcctgtgatcagccacccactcccccttctccctacctttgcatatcactttgtcctgtattgaaacttagctctgccattatttccacagagctcacctctccgataagagacagtaggtgactgcgactcagtagagagaaatttgggggacagttctaaggaacctccccctagacccaaaacacactgtaatctattcatctccacttaggtggaaatactgtttttaaataatggttattgtatgtaaagacatagtagaaagtcgttagtaattctgttggtaaaataatctctgcaaaccaactgtgatgggagaagactaaaagtctttgagtaatagttgaagtggttcctgtgaaactaccctcacaatggcaccctaatctggtcaatccgaatatcatatttccttagtgttattaattggttcaggatggacacatactcaggccaggccaatgagtgccaatgacacaaaattgaaccaccagaaagcaattttatttcctatggatttgaaccagagaaggtatggagaatgaagccaaaactcagaagagactagtatcaagcagaaaaatagaaaaaccaggatgtgattatatgatatgagcccaaaatccatgatatgccctggaattttcacttatgtgaagcaacaaatttcactattttgcatatttagttcaattctctgttacttaaaaccaaaagaatgtcaaagtatatgatccttcaacccatttaaaaatgcctgaggccaaaatcaaaacagaatcagataaagtctctaaatagaactaccatctacaaaaagtacaggacagaggaacatgttaaatacccaatgcaatcagcaatatctagacgtcagaaaagtctacaggacaatgacccaaattctgcaacaaattattaggacgagaggagagagaaggaaattaaaagacttaaaggatatgtcaatcattttcagtatgcagttcttatttgaatttgactcacacaaacagtttaaacaatatgataacatctctgtggcaattggagatgttaatgctggctggatatttgatgaaattctagaacatgtaaaacttacttatagcaatggcatatcagtgacacttggggacagggatggagtaagccggggaagactgactgcaaagaaacacaagggaactttttgggtaatgaacatattctatgtcttgattgaagtaatagtatatatacttgtcaaaattcattgaattgtacacttaaaaattgatatttttatgcatattcttcctaaataaaatttatataaaatgtgcaaaacaaaacacaaaataaatgataatgacaaaactattagagatagccaaacttatttcttcaactggtgagctgcaaaagctaaacagccccttttcccaaggaggaccaaagaaatggaataaaacctaaaggatagaaagaaagatctcagaggatgatgttaaaggggtgtccttccacagagtagaatcagggcctgatcaaagagtagggaatttcataatgcctgtcttgcaggctaccagcattgctatagaccaaagaccactgcacatctcatcttctgttcttttttaaataggaatttttttattgtgataattgtg

SEQ ID NO: 914588 - DNA, 4001 bp, Homo sapiens
agaaagcttggtcaagagtacatactgaaatttgctatccaaagagagaaaaaagagaagagtttttctcctaaagcatattccacccatcccaagaattcgcaaaacaacctaacacagcccaagcacggtggcatgcctacaataccccagctactctactccagaggctaaagtggagggattgcttgagctcaggagttcaagacatcctgggcaacactgtgagacccccgtctcaaagaaaataaataaacaaacaaaaataacataaaacaacctacgaccaacagttccccctccactgcttgtcccaactgcaacacttaccttgggcctgaaaagctccatgaccgcaatcttcccatacatgcccacctctttgacgggccgaagcccctcggcggtgaccacatagatctctaatctcgtgtttttggcaatcaacaggtttaagtcttcggccgaagtaaagtgtcctgaaagaacagaccctctaacttttgaactcaggggaagggcctcccatcccttcaaaataatcctatcacttatgtctaaatacctccagaattctcatttacttcacatacttctccaactccctccagctactccccttcttgccaaatccggcacctcaaagagtctcagttcatgcattcaacaaagctacttccctaatcagactaagaaaactggactggacctaagagccgtgtgtcctccaaatgacaatgactgcgtaatcccttctcatgcctcttgcccctccaattttactctattacagttacagtggcaggctctaattgagaatgccggagaaagtgttcacttcttccagtcttcatctaaagtctcacaaaacttttatctgacagaccaagtcaaatgaagaagtcccagagctttatatgaaaacactgttttgtccacaccccctgccctcctggcagtctaccaatacctccatccacactcagctacctccaactctgaacaacagttttgttttggaatcatgattagggtgtatataaacatgcaagcttggggtctgcatattcagctgagaatgtgggttaagatgactcttcccgggttctgaacatcggtgtccttaacaatccaagcgcatcgtcaacaaggcaaacccagcactgggccaggcaaaccaaaccctcttctccagcagggccctcatgtaaacaacagccccaggcaaaggggttagcctgaagagggctcctctccctctgtgggataatgcgggcattcctcacatccctccacctcctgggccccccagacttccccacaggaaaatcttgaccccaaagtcgtcattaccacctccccttttcctggccacagaaagccaatctccgggcccaaacgacaccgcacaaccaactcacactcctctgtctcactgggcccgccctgttctcgaggccgaatgacctccccaggacgaaaggggaccctcgagagcggcttccaacccccaaaaagcgcgtacagggacgactctttcgaggtcgcggtgctgggggaggttcctcggccgccagcgccttccattcgccgggcccactcctgcccggccgcccccggggcggcgggcctccctaggccgcggctccccccaactccctcactcgccggggtctccggccccggcagcctcaccggtcacgcagccgttcacggcggtgggcttctgggccgttaccacgtagttgtacgacatgtcgaggcttggagcggcccgtcgggactcgagcgcgacactagaaagagggacacaagcgaaaagacaggtggcccccaacagcgcgcagcgaactccactgccgctgcctccgccccagagacacgttgcaggccagagcggccggggcgcggggcatcacgggacggcctcacctggcctcttggaggactcccgaagcccgaggccgccaaccgaaggaggccccgcccccggaggcaccgcctcgcctctttccgccagcgcccgcaggacccggatgagagcgcacgcttcggggtctccgggaagtcgcggcgccttcggatgtggcggatgcggccgtgagccggcgggggaggtgcgccagtgtcctccgagctcgcccgcagactccccaccccgttccgcgccctttgcccttccccgcatccagtcctccttccgttgctccaggagccctcgggctgttcctcctttgggaacgggaaggactgcggaggcatagagagggaagggagaccgcgattcgtgcatatcccagactagaaccttgcctgctttcctttcactgtctcagttcctccagatccagctggtgccctcgcctgacgtttgaacgaccacctgctcacctcctcccttttgcgcgttgattcttcagacttcaaagggcccaccggtctgcttgcccaacgttattagtgcccctattgctctacaaattcgaacctcaaacacaaaaccagtatttctccgtagggaaccttaatgagccaggagagccgtcagccctgcagcctccagggtaccccacatcaaacaggctccccgggaacaagaggaataccacgtggcttggcacactcgcagaatgccagagaggagccaacccccattttacagatgaggaagctgaggcttagggaggaattggtttacctaagaccctccccacaaccccaagtaggctgaggcagagctatgttgattcttcctattgtgcacccacacagaggccaacacgctgctgaaccaggctgaactgaggaaaagctagaaagtcatcgtggtttacatcttgcctttcccatagcagagactctgcctgactttggaggcactgaattatcagtagtaaaaacacactctgtagaaaaactagacattggtttagattctggctgttacctgtattaccttggacaagtccctagagctctctgagtctgtttcccagaagtaaaatgggtcacaaacctggctagctccccccattcccttcccttttggtgccaaggccagtgagggcaagcgtgtgacgagctttgttaactttttcgctgcatgtgatgcccgtgtaaaagatagttattctgaggatcactgtcctttagtgatgaagtgggtgctgttcctggacataaaggcagacctgtgcttgacatggattgatctgtcttctggcagtgaagtgcaggcatgaaccttggtcagccccacactcttctccatccgtagcccatgtactagagtttggacttggaccgaagtctggggcagctccctaattactagggtgctgaaggcgtgattgtgccagtcgactgcgagttccttccgcagcttgtatcgttacccactcctgcaggtgctgctgctgcctccactgtactcagacccaggtagcacaggattgtccatcctccagcagctcagtgcaacggtgtgaactcagcctgtttcagagcctccacaccatggtgagtcatacagggccgggacgggaatggcagcatggtctcaaagcaggatcccagccttgggcaagctaaagctccttacactttgactgagagatgctattgcctcctgaggctcacgggtgaagagagagggtcatcctctctcccagggtctgatccctgcttttctttgtttcctggaggctgctggtcccagccaggcctggggctgcagcctcttgagtcccttcagagccactctgccccttatctgggtcttgcattcagagtaaaacagtaacagttacctgctctgtaatagacattgtaccggtcacagaaggaatcgtgaagaatgaccatgtgaccgttcctaaccttggggcttatgtgggccggtctggagctgggatctacagtgtgggaggctggccatgtccctgggctttgctccaggcccactgatttgaaccaaaacaagccttgaacatatctggatt

SEQ ID NO: 914589 - DNA, 4001 bp, Homo sapiens
aggatgtagccctcctgtcaaagggggcagccttttgtaatatccggtaagaatccagagtgtgcaaaaaggactgctggagcccctgccacagagagaaatgaattaggttgaattaaaacccaagttctgggtaaactgccaatctctgcctccttcatggatgagccctagatccaagtcctcccaccaaaggaaagctaactgcctgccctgtgcatgaaaatatttgcaatgtacacgaacgaataatcttggaaagcaaaaggggcagagtgcattccagctgggacctttacaacataagacattttttacctggctgagtgcccagtaggccagtcaccacagtctgggtgatcggaccactctgacaagctggtgaaccaagccatcatctaatttgggagcatgcaatagtaaaaatgcacgtgtaaacccttgaggacttgaggcaaaaaatgccttacctgctggacagatggccaggaagctctgcccagcttatgctggtggagggtcctgacgatgctgcggcatggtggcaggatctgtgggccagccagccccacccagaggcagtctgagtcacatcttctgctaggacctgccaagcagaacagacatattttcctctccaatctcacgaaaggtttttctgctgaattccccgaaaggaagccttgtttcattcggcacggttaatctctgtctcatcacctcctgcggcctttccatgtctgtgtggtctcaacgagcaccagaaataaaaaaatgagtgaggatttggccccttccccaaaacactcccacaaacagtaagtctgaagtgaaagtaaatacagtcgtgcagggttcctgagaccccagccaaagaaacacacaaggataaagtacaatgcagaactcttcccagtttgggctgcaaaactcgagatgggactgggtcacaattttataaatcacatataatgcacaataaaaagattttagggcagcatggcagaagtcaccgtttaggaaaagaaggaataggaaggcctggaaatgctcttaactaggttacttctggggaggtaagtgaaattagaatagcaataaagcaacaactcctgatcaccaaactgtatttgaggacccaatcactataggtccgacgtcttgacaaccaattctttcttctcatggacaaaaaccacttgattaacaagccccagctcgtttttgagtgtctcgaaactccttatagccccaggttcaagccccagtaaacctcagagaatgagctttctaaggaggaaggaattgggggctctcacaactgaccaccgaggacgtgcagctaacaagcgtgactatgaaatccagcacacacagcgccaggaaaggtaggattctctgaagccgtcctaactgtgcaagaaccctgatacgaacaaggaatctgacaagtccgtgtgtctgttgttacggagctcatctgcttcctgttacctagcgggagaggtgttgaaacctaaacactctggtgtcaaaggacctgcaggtagaatgcacagccggaggcacccgtgacctgcgcgggcctcgggagcctcggagcacccatcccccgctgcagcctcctgcgcgagcaccctaaaaggcggaaatattcaagcagcaggcacaggcagtaccggagcccttcgcacagagcttcttggcctcgggctccagctccaggggactcctgctcctcttgttcctggggcgtaatacaatctcggaggtcttctgggtttctgggcgtttcttgggagccatcgcgtcctccgtgtgaaggggtactgtgctctatgcgaagatcatggagggaggattgagaggcctctggggagaaacaaggcggggactacaaaactgcggggccacaggtagccgagctaagccaacttcccgccaaacatgcccagggcttgttcaaaccagcttggagctccggccccacccgtctcggagaccccgccccttcctggaaggcgggggcgcggggagggggtggtgccaaggggcggtgccagcgctcccgggaggggcgggaactgcgccagggccagtgccagcccgggtcagctgacctccctggagcaaagatggtccccggctttatggattttttttttttttttagcaacagggtctggctctgtcgctcactctggagggcagtggggcgatcatagctcagtgcagcctccacctcctgggctcaagcgatcctcccacctcagcctcctaagtagatgggactacaagcgtacgccaccacgcccggctaatttctctctctctctctctttttttctttttctggagagacggggtctcgctttgttgtccgggccggtctttaactcctgggcttaagcgatcatccagccttgacttcctgacacgaaccctcctcaaacgcggcgctgccaggcctctgcgggtccggggaggaggcccggtgccagccaaggctctgtctcccgccttgcaattggtgatgacgcccgctcgggctttgggattggctggtccctacagggtgtagttggggagtggcggctttgtagagagctagtgcctttcctaagttagaagctgggctctaccagcggtcagctttgcagtcggattccagaaactacagtcccatcgaatccaagctgcttctctgtgaagggagaatgattggaactccttgcctttttttttttttttttttttttttcctagaggcagtgtctctcttccgttacccaggctggagtgcagtgatgtaatcacagctcactgcagccttgacctcaagtttcactgatcctcccacctcagcctcccaagtaggcttgcagacctgtatccccaagcctaatttttttatttttatttttgtagagacaaggtcttgctatgtttcccacgttggtctggacctcctgggctcaagtgatcctcctgcctctgcctcccaaagtgctgggattacaggcatgagccaccgtgtctggttctcactgctcttttatttgtttggtcgttggctgtttttattttttctttctttctttctctctttcttttttttttttttttttttgagacagggcctctctctgtcacccaggctggagtgcagtggcaggatgtgggctcaatgcaggctggacttcctggacatcgatcctcccacctcagcctcccgagtagctgggactacaggtgcgcgccgcaacactcagctaatttttgcattttttgtagagacagagtctccctaagttgcctaggctggtctagaactcctggcatccatccacctcggtctgccaaagtgctgagattacaggtgtgagccactgtgcccagcctcctcactgctttttttttttttttttttttgagacggagtctcactctgttgcccaggccggagtgcagtggcacaatctcggctcactgcaatctccgcctcccgggttcaagcgattcccctgcctcagtctccggagcagctgggactagaggcacacaccaccacgcctgactaattttttgtattttagtagagacagggtttcaccatgttggccaggatggtctcgatcttctgaccttgtgatctgcctgcctcggcctcccaaaatgctgggattataggcgtgagccaccatgcccagcctcttggcctctcactgcttttaactaagacttgcctaacctgttgggtgtccacctaggagcagcctgggacgtgatgggccagagggcgtgcagccagcggtacttagaactcctacgccctcgcttcagccaaagtccaagtcttgaaggttcacaggtgaggccgcgctgtcctgcctagcctgagaagagacagtttggatgcaccctagtttctgcgaagaggcaggcaggagttgggcttactcaggcattgctgggcctttcctccacccactaagccccgt

SEQ ID NO: 914590 - DNA, 4001 bp, Homo sapiens
aatatgaggaaattggtctttatgctgccccaaacagacatgtataagtattagttaacatcatagtgtaactgacctaccatttctaatacccttcccaaagaaaacaaaacctgtgaaaatgggcatatttctctcagtagaaagaattattagtgctgatgtgaaatagttttatgtggatgccttgtaaggtctgcagccatagcatttttccagggaattctgcaaaatagcaatgatttggataagccacctgtaatctgataggatagtgtctctaaaggaagaagctggttttctttttcatggattatctggaaatcagctggagcctccagagccttcccaggatgcctttcagtgatctctggacaagggaaatggaagagggaccaagaccaaggaatcaggattgacgttagttacccatctgagaacgtagtcccaaggccaggtttagttgttactgatgttttttaatgattacattgccagtaagctcttaacttataattgccggggacctgaggctccctcaaggtggtaacatatttataacgtgctttaatgctcttttcgtcctgaatccatgactgaatgtgtaatttccttgtccgaagactcatcttgcccacttaccatcctagagcataagggcaactctccctcaggaagaaaataagtctgcgtgccagtggtgccgatgaccagcacatttttcttcaaatcgatggaacattgatgtctccggagcatatctaggcctagaagcatatccatgggttgatcctcaagtatggagaaagagcactgtaagaaatcaccttcaatttgaatctgagctagatgaacacggccaataattctctgtgtgcccactcctttagcaaccccagcccaccgtcggtccaccagcctcatgatgttacatcgctcggcacaagcctggctcataatggtcatctgggcgcccgagtcaacaaaagccttcaaaggatgcccattcactttgcagttaatgtagagcatcgtcacttgtccaaaactctcgggggcctcttctatcgctatattcatgttttcttcaatgttttgctgccggatttcctcttctattttggcctgagcttcccgatccagtgggtcggctgtgtagagacgaagcctctcttgctctctcaaggccttttccctttgctgctccatcagcacctgagaaaaggtctcaaggcttccgctgagcagggcttccgccaagggagggttgcgttccttgagcagggacagatcgtgggggttggagagcagcatgctgcggatcagggcggggctgcccagaccttgcaggccggccaccttctctcctgacgccaagccctgtgaccgctgggcagcgggtgtgcgctgctgctgctgtccagggtgctgtggacgggagctggacgtcccaggcaccgcaatgccactgaagtctacacgaggctggttcggggcacgccctggagcccgaggtcccacattgtccttctgcagtaaaaccacgatatcgccatctttgaggccgtaggagcccagggaacagtggtcctcgatgaggagtcgctccatgtggatgatctggatctcttcgacggggactctggactccgcttcgcagaggaccttgaagtttcggagctcaaagtcggggctgacctggagagagaaggtgacctcggagaggtccctccgcacgcagtacacggtgatcagcatggcgggggcccgggcgggccgggctagcagagggcatgggcggctcactggcgggctggggcgggcctgcgtcgttggtgccgctgctcctcaggacttggtaggtagggaccgtccgggctcattcacctctcagagaggcgcggacactcatctgtctgggggctgtctcccagcctcagtgcctgctgtgtggccaggtggagccttgaggtagcacgttgtgttccaaagtccatttctaagtgtgctgtttggaacctagaatgcctactcccatggatacacgatggctcaaagctgtcaggtttcaaggccagcccttcaaagcctatttaacacatgatatgaaagaaatgatttcaacacatttttttttgagacaggatcttatcctgtcacccaggctggagtacagtggcataatcacagctcactgtagcctcgacctcgtaggctcaagcagtcctcctctctcagcctcctgaaaagctggaactacaggcacagtctaccatgcccggctaattgttgtatttttttttaatagatttggggtctcactgtgttgtccgggctggcctccaactcctgggctcaagcaatcccccacacttcggcctcccaaagtgctggaattacaggtgtgagccaccatgcctagtttttcaacactttctaaacagcatattatcatttgttttgttcattttagagttgtattctttgtacttttgttttttccccaaacagtaaggatttgtttcttacatggcaagtaccattctatgtgcatagtaggaaagtcagatttggagcctgcccttgaggagctcacatttctggaaagggatagacaggtgaatgggtaatcacaatactaaaggcaaaatcttttacaaagacatgttcagggtactgcctttagtatcaccaacagaacagaggatattttcctaaggaggagacaagctggatgttgaaggatgagcatcttccaggtgcaaagtggtctcactccaaaggaaagcagtttcatgttacaaaagcaggaatttatggcaagggctgttatttctagagaaagatgagacattttgtgcaataaaaaaattgtacatgactttgaataccaggatatgaagctggaaaaaaattagttgagccaattgatgaagtcatatgtgaatctacggagtttaaatattaaatattatcaattagcaagaattcctcctccaaaaaaaaaaaaaaaaaaaaagaaaaagaagtaaggaaggaaaggaaagggaaaagatttgaagcaggtgtttgtgatttttttttttaaattgacttaaggaagaggcttcttgcaacacatggaggacataatgtggcaggagggccagtcaggaggcttttccagtggttcaaagagggagctgttgctagagtgtggaaagtcaggaggcccaaagccaaagcagtagagaataaacatgtttcttgagtaaaatggacagagtgtgcataccccttggaggtggggagtgtaaaaaagtggaatgtgtggataacacagagggtctctaaaatgggatatagggtagatgggccattgccttgaaggggaatgaatgaatgagtgagatgaacctttgaggtgacccatttgacatcagttctgtaggaaaattcattaaggatgccaccctagaggccaatatgcctctctctgacatttgggcacagccaccttctccctactctcccccacccccacttacacacacacacatacaaggctgtcatggtgaaaagtccttcaaggcaaatgatgattgggtagaaatccttgcatgccagttatttttctctatgtttaataaagtgttttgctgcctggcgcggtggctcatgcctgtaatcccagcagtttgggaggccagggtgggcggatcaagaggtcaggagatcgagaccatcctggctaacatggtgaaaccctgtctctactaaaaatacaaaaaattagccaggcgttgtggtgggcgcctgtagtcccagctactcgggaggctgaggcaggagaatggcatgaaccttggaggtggagcttgcagtaagccgagattgcgccagtgcactccagcctgggtgacagagcgagactccatctcaaaaaaaaaaaaaaagtgttttgcactgtgcagagctcatgtttccctggcttggtactcccaggtgtacctacttatgaa

SEQ ID NO: 914591 - DNA, 4001 bp, Homo sapiens
ttaatttttctaaaggcagtcataataagtccctaaaaaataatttagtaacattgacacgaaaattctagaaaagtaagagaggcaggcaggagagtgaaaattaagtaagcaaaaaaacaaagagacaaaatcttcagtgaaaggagaaatactgatgaaaaatgctttaaaaacatgaaccaggaaaatcttagtacgatacagtttttccattgatatcatttatgagacatttattacagggatggagaaggtcacatctcagtaaatggtactactcactaaccagtaactcaaaccagatacctaggagtcatttgtcattcctccctttccttcatatcccacatcacactcatcagaaggtacttgaatctacttccatacttagaaaccatcattcacttttccctcatatattctgccatcatcttaatccaaatcaccattatctcctgtttatggtgctggattaacctcctaaccatgatccggtctctgcccatctttccagactcatctcatacaactgtcctttctaaatatattccagctatactggtctttccttagattcttgaacattaacatgtcaagctctttcctgcctcaggacgtttgcacaacctgttcactctgtttagaatgtttttctttccctcttttgcatggttggatcacgctcatcttttaggcatcagtatcaactccttggaaaggtcttcttagaccagtctaattcacatagtttccttgtaaattctccttaattccatccataaaaggtaagttccattagaacaggaatctaccttgttcatcattggatctcagtacctagcaattcttggcacagacgaaagaagcatttaactatctgcagaataaacaaataattacttggtgctctgtgatccagtcctgtggggtcaggaaagggtttctgatttaaaaggctttgcaaactgactaagaattagccaggtcagggacagggtcagaagacggtttggggtgagaaggaggatagtgcacttcaggaacacaaaagacattctatatggctggagcggtggaaaaccactagggctgaagagccaggcaaaagtcagataggaaagagtctgtaagtcatgttaaagagtttgggcttaaacctgagggcaaataggagcgactgaaaggttttcaatggggagtgcctcggtcaaatatgaactttatcagcccagcaatgtggagactggactggaaggtagcaagattgaaagcaggagaaccagctggggcggcgggggaggggggggttactgtcacagctatgtagcagtcatagggtcgaaccaaaataatgtcagtaaaaaacggagagaagtgaacagatctgagatattcaagaggctggtagggactggctggatgtgaaaaggaagaaaactttcaagctctggtttaagcacatggctcagttaaaatatgttccttctaagccatcatagcattttggaagatcccctttcagcacgtactactctgcacagtggcccactgaatacgtatttgcacattacagaagcaagagtcgcgccttttcctctctatttccgattctaaaagctcactccgagtctagctcgatggcactgtaagtgttcaataaacgttcgttaggtgattgcaaaagcactgagtctaaaataaaataactgacgtttatattctgttaccctcatggctgcccgtttacagagaaccacttgtgaaaaaacaagcgccgggctctgggtgggtctcattcataatgaagttaagagcctccttaggagtctccggctcttcggcttcccgagaacccctttacccagctcacctgggggagaagaccaggaacgggcccaggcgacgcacagtgactcggaccggccgaactcagtagcacgccggcagccttccaatcgaatctcccgcgtccttttccgccggaagtaacgctttggctctgattactcagagccaatcagaagaaggcgccgcagagggtggagcttagcgaggaaatcctacaagcatctggaaacgaccattttcgtcaaactgcgggtagagtctttctccccgacaggtggatcagtagtacagtccgtaaaattggttttggagcttcgctgagcctcctgggcgtagggttcccgggaaagtgtggagtgagccgcagcgccctggggtctggcggggtgactgaaagagggaatggaagctggatgaagagggttgagggagctttggaagccagacccggcgctgtcctaggggctagcactacccacgggcggagggaggaagggggcggtggcaggaggcaggaggggggtggagcgcggagtgggttttcgggtgccggagaagaaagggggcgttatttgaaagaagggaccgggacctggcgggatttaggggcgatgtggacccggggcgacctgtgtaatggatgggttgtgcgagcaacacagttttggggtgacccaagaacggagtatcatagggagtggttaggctccagatggaggtgggtgcaaggagcacagtctttggacctggacccagcggtctgcgacgacgtgctccgctcactgctgagtgatctagtgcaagttcccgcacctctctgagcctcagtttccacatctgtagatgggaataacaatcatatacgacgcacaagattgctgtgacgatttagttagaggagatgatgcgtgtgcctccctgcctcgtgatacactggcctgtagtgaaccttcaataaattgtcatggtagctgttattgccgttacgtaggatttgcggaaggcaggaggtgtcgcaatggaattgcggtggccagggcagggtttggtggtgatgataatggtagggatattgggtgacctgaaggacaggtgggcttcgggggcgctatagataaagcatgggctacagcgatgagttaggaagaggccctagcatgataagggcagacttggggtgtgaccgcaatgaaggtgagtgctaaggagcagatggcacgagaggaaagtggagtggaggcggtgtcctcggggatgggggcggagtggctgtggtgacctggcttgggcggcgtctctgaggagctggctggctttgggtttcccctgggaggagctgttttgcggcgggcggagctgcaggctgggcagggcttagcctgtgcgcttctgctggcctccttttcgccctcccacccgcactgcagtctccagcctgagccatgggccgccgagccctcctgctcctgcttctgtcttttctggcgccctgggccaccatagccctccggccggccttaagggccctcggcagcctacacttgccaaccaaccccacatccctcccggctgtagccaagaactattcggttctctacttccaacagaaggtaagggggagcgggggcttcgccgtcccaggcccaaccgccgggaaccctgaccctcagagcccgggcaacggagcctacctcgaaattcacaccccttgatgcctaggatctgttcggtttttggctaacatcttccagaaggtggtcccaaatcccagttctgtttaaattttctcctcccattaccaataatttggtagtagttttggctgcatactcttgattcaggcttttctgtaattggacacgacagtcacttcaactccctctgctcccagagggtgccccaatccgaactcccttgaccttccctcaaattcaaattattaaatgccagctctggtacctagtctgcggtgatagtcatcctttgccccaaggcagccctaaatacaaattttaatatctttacctattagaaaatattggatagttatccatcctaaaagccagcctctcagaaggggtcagctcagagctgattttgtagccctattattaagaattgttgacagtccctattccccataagactga

SEQ ID NO: 914592 - DNA, 4001 bp, Homo sapiens
gtaagcagaacagatcagcagtgtgaccgactggatataagagtaggtaagagagaagtagctaagactgctcctaggtttctagctctacggtctgctgagatggtggagctaggatgtggtgctgaaaatgatcccaactcatgtccatgtattaacttctggaagggatgaatgttaccttacatggcaaaagtgacttttcagatgtgattaaattaaagatcttgggatggggtgattatcctggattatctgtgtaggccctaaacgcaatcgtaagcgcccttataacagaggaacagagatagactgacacaggagaaggcagagactggagttatgcagccacaggccaaggaatgccagcagccaccagaagctacaagaggcaggaaacagattctcccctagaacctctggagggagcaagtccctgctgacaccttgattttggcccagtgaaactgatttcagacgtatggcctccagaactgtgacaaggtaaatctctgttgttgctgggcttttttgtttgtttgtttaagacagagtctcactcatgtcacccagtctggagtgcaatggtgcgatctgggctcactgcaacctctgcctcccgggttcaagcgattctcttgcctcagcctcccgagtagctgggattacaggcacccaccactaggcccagctaatttttttgtatttttagtagaggcggggtttcaccatgttggtcaggctggtctcgaactcctgacctcaagatctctgttgttttaagccgccaagtttgtggtaatttgttacaatggcaaccttagttacaagaatgttccatctgttaaatccctgattgtactgcactagaagggggctgagaagctgaaagatgtgggtgaagaccaacaaacatgggatttagggaaagggaaaagaggaattgacagacctgtggagtctggaggttgggggaagaagtcaggaggtcaaagtgatcattacaggtatactcatctgggaacaccagctacaatgtggggatgataggtgacagaaacagaccagcggtccagcttttctaggccaattcttggatggggacatgaagcctgtggagaaaatgaggtggccacaggaaggagcatagatgatgttgagggatgcagtctggcttcatggttaaaagcaaaggctttgggattagaaagacatggatctagcttccaattccacaccacctactaagcgtgaaagattcggacaagtttcattcctcttagaacctcaattatctcatctgttaaataggattattaatatccatacctcagatcaagtcaaacaattactgtaagcacatggtgagtgcttaaaaatgtaggtgtcattattaccactattgtcatcagtattattaatatgaatatgactgtagctattacagcattagtctccctacccttaggtacggccgcatttctattatttttttaggaacagtgtggcaagcagaagagtggccagaacggtgcagaggtttgagctgtggcacccggcgtgacctctcattcccggccgggtcccggtgacagatccgccgcctccactctgcaactcctcgccgcagtgagacgctgccccgctgctggccggcccgagccccctccccagcgccggcctcaccttttcatagttctgcatgaggcggctgatactctcgcgctcgacctgccattcgggtttcttcagttgcttcctcaactgcttctttttgttctgcctatggctgtgttttttcttccagcgattgaagctccgcaccgggtcgggtcgggctcccgaacccggagagttggccgttttgcccattgcggcggcggcggcgacagctcggatcaaccccagacacgagacacctaaggccagactcacggaaccagcatgggacaaacgcacagaggcgcatgcgcgaactcagaagcccgcccccgagcttttgaaaccggggcacgcgccaatgacgtcaggaaaaggagggctgtgattggcgaattggctcctgctgggaggggcagcctggggaaacgggggcgcagcactccacggaagggggcgagctgagccgagccgggagcacgccggctctttaaaaaaaaacgcatgcgcactgttgttgttactatggtgacgtcatacactgaccctttaagggctattaacacatttgctccaggttcaactttgctaagcgttcgtgagtatgtgtgtaaacacatacaatctgtgaatgaaaattgtgaccctcgttttgcacttttcgggccaacgagccaaaagatttgcccagaagtaaacagctagttagtgacttctgatttccatccatggtggttgtacttcctcaggaataaaaatgaatattctatattcttcttatgcccctctgggttttccttttcctctgggcccctcagactctagctgcaacagcaaggaaactggaacggaatcaaattgaatttgccttaaaatgcttttatggagacaaaatgataactaaacgtaaggaggtaggtaatagaggccgggcacggtggctcacgcctgtaattccagcaatttgggaggtcgaggtgggtggatcacctgaggtcaggaggtcgagaccagcctggccaatatggtgatgccctgtctctgctaaaaatacaaaaattagccaggcgtggtggtgcacacctataatcctagctacttgggaggctgaggcaggagaatcgcttgaaccccgggggcggaggttatagtgagccaagatcgccccacttcaccacagcctgggtgaaagagtgaaactccgtcaaaaaaaaaaaaaaaaggaggtaatagaaaagttattgcaagttggacatttaagtgaactggctttcaatgaattgaattttttgacacatttacctacagcctccaggaaaacaccggatgtgggtgggagagcttagctgtagcaaaggagattggaaaattgagttcaaagttcacaggcagaattttgggctctcaaatttcctttccaaccccacatatccagatcactactctcaactctatgcccatcctccaaacaagacatggcttattggaagggagtgaggacaggaggtgaacaagagaatttccacactcaggaacactagatgtggtagacagtaaagctcaataaggagtgattacatgaaagtgtatatacatcctcaaaaaattaaaaatagaactccacgtgagccagcaatttcacttctgggtatgcatagccaaaataatcgaaagcagggtctcagatatttgcataccgtgttcaccacagcactatagctaaaatgtggaagcaacccaggtgtctatcaactgatgaatgagtaaacaaaacataatatgtacctaaaatggaatattattcagccttcataaagaaggaatttctgacacatgccacaacgtggataaactttaagaatattaagctaagtgaaataagccagtcacaaaaggacaaatactatatatggttctatttatatgagaaacttagagttgtcaaaataatagagaaagtagacttgtggttgccagggactcaggcaaccagggggttactgtttaatcagtgcagagttccagtttggtaagatgaaaagagttctgcagattggttgcacaacaatgagaatgtaattaatgcaactgaattgtatacttacaaatggctaaaatggtaaattttatgtgatgtgtattttactacatatgtataccacatatgcatacctacagaacgataaggccctcagctataactcacttttttcctaaaactgtaggagtcaggcatatatgcgccccaggcaagaaactggaaggttcaactctaggaaaactgaatgtccaagagaaagacctcaataacatctaggggccaggcacggtggctcatagct

SEQ ID NO: 914593 - DNA, 4001 bp, Homo sapiens
gcctgggggacagagtgagactctgtctcaaataacaaaaaaaaatattgaatatcagaaaacaaagaggagatcctgatggtttttactataagcagatgcgtttgttctgtggttttcagcatttttcccatattaaaagagtaaaaatactcacagccgcagctcttcaaatgtctttactgagtaaagtggagagctgggatccttctgtaaaacttccacacggtgactggattctactaaggattgatggattaacttgtttaagagtgaattagctgccaaatccactagaaaagcaaaaataaaaaagaggacatcaagcttcctgaatgacatcaaataagttgctctttctctttcagtggttgtataccaagcaattgcacctacgctcatttttcctctaaaagagggttccagaaagaatgatatagcactgaggattcgttctttatgaggattcagtttcttacgctctgttacttcaccatcctctaacttcaaagtagcctaagtccatctccatgagaccaaatccttgacagatggaagttctgaacccaatccctgcatattccatttcaacttcctttaaataaatacaccttactcctaatttagtgtgtctcctgatagtcactataagaaaacagaagcaaagacaggccttttccaattgagattatattattcactcacactattaaagttataaacggaaacagaatgctagtagatacatgcaaatgaattcatctcctacctacatcttcttcatcatcttcattgatgttattaatagaaccatctggaaaggatggaagagaaacaatacaagtaaagacaaatgctgagcacaaatgtaaagcatgctattcaattttttcttcctgactcttcagtgtctactggcaagaagagtcatttcatggaggaatggacgaaacgattgggaaggtaatggagagtgctgaatgtcacactaatgaatccgcggtgtttcacttggcagggacgtgatgaaagcaaaacaatactttttaatcattgaggtcgctctgctttgccctaacagcactcacctatgtttcggactgcagtactcttaataccccaaaggttcttccggggttggctgaggtttgaaaactattgagagacacaaatttcaaccaatattaggatgcaagccctcaagcagcccagtgcttccctaccacaggggctgggagggattcagggaaggacacccgggtattgcttcctttgcaatattaggtagcagcagattcctttcaaggttgggtttcctgtatgagttaccctaaaattggagattttctgtattccctgtacatgcagtttctctttcctaggcctctagtttagagttgggcagtacttggggctcacggcaccaacaaggggagggtggctaggaaagtgcgctggcaaatggatggaagcgaggtgaggcttaatgggcaaatgggcagagtagaaaactcggggtctagctgggactaccagctgcgttcccaccctggatttccaggggtcgtcatttttgccctttctaaccaaaggtcttgcctctcgtgggggtggggacggggtctccctctgtggccctcttccaaacccttcccgcatctcccctccagcatctgacgccccacttcgaacgctcgcgggctctccctcccctcccagccgatctccctctgcgagtgggagctccacccccgcggctgtggccccccggctcggtggcggttacgtggctgttcagccgctcgctctccgccgcccctgcgtcgcctccccacagtaacgacgccatggctgcgattgctgctcccgcccccagcacgtgcttccaccaccggcgcgaggcggtgctggccccatccgctggccaatgggcttccttagggggcaggcgtccgcgtccgcgcccgcgaccaccgcggtgcggcgcgcaggcgctggaaggctgggtggcgcgcggaaggggcggagggcagagagcggggcggggggcagagagcggggcggagggcagagagcggggcggagggcagagagcggggcgaaagggcgcggaccggagggcagagggggcagcttccgcagagtggagagcgccccccgcgccgccccgcggcccgccgctcacacagccctccaggcgggagccccccggactccccgccgcgctttacgccccgtgtcggtttccctggaaatttccgcctccacatcacaagatgtcagaaaggttagcgaattggttagcaaagtggagacaaaatctgatgaatttgatatgacgaatgacctcgaatgccacagttgcggaaaggaagcagaactgttcaagctctaactgctgttcctgccctagatacctgtgatgttccacataggctttttaaagcttttattctgaaatgtggtctcttgttaaaaacattacctttcggtataacctctacgtcctacatgcgtttgcataatccggtatagatccctggatccctggtactaatgatttaatgaccgctcaatttggacgaaagaaccaaattccacctcccccccgccccccagttttctaattgtaattttgagattttgatcagcatttctggaattgggggcaaaaatacaaaaacccacacgaaactgcagtcatgatctctccgtggtgctgaagcaacgctccccgctctgttcggtcactctcagggcacctagtcgtttgttttgagattatcatattcatttcagcttttaatttgaattctaatagtaaatgtttttgtctctcaatggtaactttcttctcatttaactaggtataaaatcgagccaagatcttcaatcttttagttttcgtataaggatagcagaatttgaaaaattaccttttttctattattttagcgtagcactacaattcctccttttattgctgtcccgccacaggcccagattctgccctgtgggcggagaaacggtagctggactagaaaacctcaggtagattctagcaccaagctcggttctcagaactacatttcccacaaacttggactacacctcccatgagggctcgggcgcctgcgcagaagacgcacagtgacagcttcctttctcggaaacgcggcgcggccggctgccggaaagtaagtgtgggatttttggagtgggttactttctgggttccacaggggaagggacaaatggacacactgctgaacggttgtctgttgtcttctttttgccctctttcacatactttggtcttttcaggaaagcattgccgtatggaaatgagacctcgcttaagaccatgtatttttcttttgtgcctggtactttctggagctctcggtggaaactcgccgcagtagggtcgtctttaattccgttgtgacgggagcttcagtggtacttgtactgtggagtacaaaagtgctctgctgccccacttagaattgggtgctcataaaacagtagaagttgagaacccaggagtatgtgggaggctgtggcagcaattttcaaattattttggggattgccttacatacagaccacgattgctttctagtgatcatagtgcgtgtctgctaatcctttggacagtactccctcttcttccctttggattaatataaagtttatcaagaggaatgctatttatgtgttaacccactggttcctgagattaggacttttttttttttttttttaagactgtcgcccaggctgagtgaagtggcgtgatcactgctcactgcagcctctacctcctgggctcaagcgatccttccacctcagcctccaactagctgggactgcaggcgtgcgccatcttggcagcctagtttttaattttttaattaacacacggtctcgctgtgttgcccaggttggtctcgaactcctgacttcgagcgaccccccctcccccccgccaccacccc

SEQ ID NO: 914594 - DNA, 4001 bp, Homo sapiens
aggattacaggcgagagccaccgtgcccggctgaaatcttacttttaattggagttaataaaaacatacaaagacacgaaaacaaagccctactctgttggcttttgatttaaccccgttacactttttttttttttttttttttgaggcggagtctcgctctgccgcccaggttggagtgcagtggcacaatcttggctcactgcaaccgccgcctcctgggttcaagcgattcccctgtctcagcctcccgagtagctgggattacaggcgcctgccaccacgcgcagctaaattttttctatttttagtagagacggggttttgccatgttggccaggctagtatcgaactcctgacctcagctgatccgcctgtcttggcctcccaaagtgctgggattacaggtgtgagccaccgctcccagcaaccccgttacatttcttatataaaatacactagcttacgagtgctgattctttctgccatacaccaaggcatgtgaaactcaaaattttaaagtcaacagatctcaacatttatgaagaaaatgctccttgattatgccttccttaaaaaaaaaatgaacaagttgctcacaagcaaatcctgattatcacatacacaaagctgtttacttcagactctgacctcttaagcagatatggttaacagctactttcctgtattgacggttttatattatgatcagcgatatcacgcagttcacagagacttagctgtttgcagagcactaagaggatgaaaagggcaacctctaaagaccgaacgatatcatcattactgtccatcatgcacagtaagacctcctatatccttaaatccaaaatgagactatgtgataactgctcccttcttaaactgaaacctgcactgcagctttttctcagagaaggaaatattcctcctaccccttcccaatttagatttgcaagttttctacattttcaaaaacaaaaaacaaaaaaacaaaaaacaaacaacaagaaacgtagactagttgggaggagcccctagcggagttaattacagcacttcacagatcgtagttagcaattgacagtttcacacccaaaacagtatcgtcatcgccaacaagagcttttgtttgcaaatgcagcgcagtttttctagctttgcctgcaagttggagtgactgggttttattctgaagggaaatgggggctgaggaagagaaaggagagagatacgggaaagagtcattgactaatgactggaaccccgtaactgaaaggaaatttcttgtccccccgcaccccgccccacgccccaaacacacacacttctgaccataaacacaaaaggttggggctctgcaatcttatctgcgcaatatgagccagcaaccgctccattagtagcaaacaatagggactcccccaaggaggccccaaatggaccccctaaaccagaaatccccctcctttcctccaagagtcgggggctccataaataccctcttgttattgacccgcaaggcctactgcaatcaagcagcggccggtttgcttctaaaccgagccctccaatacagcatgtccctgccgccccctatagggccgcctcgtaccctataacctccaccatcatccccctaagtccttgccgcccccttcggcctcatattccctcatcttcgataaagctactccgagtacttagcctgttcctcctgccgaccctgctgcgcaccacattcctatattcgcctcctctcaggcgctcccaccccacacagctgccgaccgccttcctccccaggcccggccaggccttaggcctccgcccgagagtcccccagagccggcccggggggctccccacagcccccaaagcaccgctgacctcgaccccaccacctcaccccaagcctcgcgactcgggcccgtgtcctaccaacgaggccactcccgctcggcaccctcggtcctttattgttgactcgaagctcccaaaatggcggacgctccttcctcctcggaaacctccgcccgcccccacccagccctctcgctacggcctcctctcgcccccgcccccgccccgctccgaggggcgcgcaggccagccgcccgagccgccggctcccccggctgtccagccctacctcctccgctgcccgctctcgtggcgccgccgaagtcgccgcctggctgagctaactcggctcctctgccccctccctcgctcgcccgttcgcccgcccgccgcctcctccctctttccctgcctctccgcatggcggcgaccgcggctcctcctccactcaagatggcgaaacctcggccgccgcggctatattcgccgcggcgtcactgccttcctggcctggtggtgagaggaagtcgggccgcgaaagcttcctgaggagaaaatggagggcccttctctcacaccgacgagaaaagttcgagggggaaatacgagttcctttctgaagggacaggacggctgcttttccacagccgcgacgtgattgagaaatggtggctggcaagggtaggcctgccttcgcccctccaaagtaaaaatcgggagttgagaccagaggaacatctctttattacatgactaaggatatgttttgaaaactggcccccgggcagctgctcggggacaggaagctgacctgacttctccagctggccggggaggctgatgccgggcctaaggggccgcgtccgagcctctcggggcgcgcctccatgcaggaaggcgcggaactagcgacccggagacgccgggcgcgcgtctgagtgtgggggcaggaaggggggccgaccgggcccggaggccgcaccaggcaggagggaggactccagagagtgcgcggggggcgctgcgcggtgggacggggcgagcctgtagggcgcgcctggcggcgggtaggctccgggcttgagggtgcgcctgggggcgctggttgtgggggaaggcaccgggcttgagggtgcacctgggcgggggaagtcttcgggcatgagggcgcgcctgcgggtggtatgggggggtacaccgagcttgagggtgcgcccggggggctctcatgtgaagggtaccaggcttgagggcgcccctgcggggggcgcagaggcaccgagcttgagggtgcgcctcgggggtctgcggggggaaggcaccggacttgagcgtgcgccgggagaggacggcgggggaccggactgtgagggcgtatcttgggggacctgtctaggaggaaccgggaggtgaaggcacaactgggggtgaggcgggggcaggggccgggctgtgagagtgcgactgaggggggattactccggagagcacggagctgggggcgttgcgcaggtggagtggggaggcctggtggagagggtagcaaaccgagagagcgcaccggggtggtggggggagaagctggactgtaaggtgaagagttagtagggcgcaaccgtcttctcctgccctcgaagggcaagactgaagaaagtaggggcggaggaggccgggccctccactaaagggagggaagctagtgaagcgtcagttataatagaaataggaattcagtaaggaaatggagaagcttaaggcaaagggtgactctccggcctgaccctcactatgaagatatttatgtatgttcccataatacttttcagatcccaatgtctgtgtttatccttgacagaaataatagaactgctgtcttcttccaagttaaacaaaactttggagctaaaagctagctaggtcaagagaaacaaaatctaatcctcacccaattgagagactgaatatacaaagaatggccaaacctaaccatgacctcctacccataacctcttcagtaatcggccagaagggtcaggacttaatctttaaccggcagcttccctatttcttgcccctgcttccagctctgggccaatcagagaaagccaaatgtgctcctcacaccaatcgcgtaagaagcc

SEQ ID NO: 914595 - DNA, 4001 bp, Homo sapiens
gacggggttttgccatgttggccaggctagtatcgaactcctgacctcagctgatccgcctgtcttggcctcccaaagtgctgggattacaggtgtgagccaccgctcccagcaaccccgttacatttcttatataaaatacactagcttacgagtgctgattctttctgccatacaccaaggcatgtgaaactcaaaattttaaagtcaacagatctcaacatttatgaagaaaatgctccttgattatgccttccttaaaaaaaaaatgaacaagttgctcacaagcaaatcctgattatcacatacacaaagctgtttacttcagactctgacctcttaagcagatatggttaacagctactttcctgtattgacggttttatattatgatcagcgatatcacgcagttcacagagacttagctgtttgcagagcactaagaggatgaaaagggcaacctctaaagaccgaacgatatcatcattactgtccatcatgcacagtaagacctcctatatccttaaatccaaaatgagactatgtgataactgctcccttcttaaactgaaacctgcactgcagctttttctcagagaaggaaatattcctcctaccccttcccaatttagatttgcaagttttctacattttcaaaaacaaaaaacaaaaaaacaaaaaacaaacaacaagaaacgtagactagttgggaggagcccctagcggagttaattacagcacttcacagatcgtagttagcaattgacagtttcacacccaaaacagtatcgtcatcgccaacaagagcttttgtttgcaaatgcagcgcagtttttctagctttgcctgcaagttggagtgactgggttttattctgaagggaaatgggggctgaggaagagaaaggagagagatacgggaaagagtcattgactaatgactggaaccccgtaactgaaaggaaatttcttgtccccccgcaccccgccccacgccccaaacacacacacttctgaccataaacacaaaaggttggggctctgcaatcttatctgcgcaatatgagccagcaaccgctccattagtagcaaacaatagggactcccccaaggaggccccaaatggaccccctaaaccagaaatccccctcctttcctccaagagtcgggggctccataaataccctcttgttattgacccgcaaggcctactgcaatcaagcagcggccggtttgcttctaaaccgagccctccaatacagcatgtccctgccgccccctatagggccgcctcgtaccctataacctccaccatcatccccctaagtccttgccgcccccttcggcctcatattccctcatcttcgataaagctactccgagtacttagcctgttcctcctgccgaccctgctgcgcaccacattcctatattcgcctcctctcaggcgctcccaccccacacagctgccgaccgccttcctccccaggcccggccaggccttaggcctccgcccgagagtcccccagagccggcccggggggctccccacagcccccaaagcaccgctgacctcgaccccaccacctcaccccaagcctcgcgactcgggcccgtgtcctaccaacgaggccactcccgctcggcaccctcggtcctttattgttgactcgaagctcccaaaatggcggacgctccttcctcctcggaaacctccgcccgcccccacccagccctctcgctacggcctcctctcgcccccgcccccgccccgctccgaggggcgcgcaggccagccgcccgagccgccggctcccccggctgtccagccctacctcctccgctgcccgctctcgtggcgccgccgaagtcgccgcctggctgagctaactcggctcctctgccccctccctcgctcgcccgttcgcccgcccgccgcctcctccctctttccctgcctctccgcatggcggcgaccgcggctcctcctccactcaagatggcgaaacctcggccgccgcggctatattcgccgcggcgtcactgccttcctggcctggtggtgagaggaagtcgggccgcgaaagcttcctgaggagaaaatggagggcccttctctcacaccgacgagaaaagttcgagggggaaatacgagttcctttctgaagggacaggacggctgcttttccacagccgcgacgtgattgagaaatggtggctggcaagggtaggcctgccttcgcccctccaaagtaaaaatcgggagttgagaccagaggaacatctctttattacatgactaaggatatgttttgaaaactggcccccgggcagctgctcggggacaggaagctgacctgacttctccagctggccggggaggctgatgccgggcctaaggggccgcgtccgagcctctcggggcgcgcctccatgcaggaaggcgcggaactagcgacccggagacgccgggcgcgcgtctgagtgtgggggcaggaaggggggccgaccgggcccggaggccgcaccaggcaggagggaggactccagagagtgcgcggggggcgctgcgcggtgggacggggcgagcctgtagggcgcgcctggcggcgggtaggctccgggcttgagggtgcgcctgggggcgctggttgtgggggaaggcaccgggcttgagggtgcacctgggcgggggaagtcttcgggcatgagggcgcgcctgcgggtggtatgggggggtacaccgagcttgagggtgcgcccggggggctctcatgtgaagggtaccaggcttgagggcgcccctgcggggggcgcagaggcaccgagcttgagggtgcgcctcgggggtctgcggggggaaggcaccggacttgagcgtgcgccgggagaggacggcgggggaccggactgtgagggcgtatcttgggggacctgtctaggaggaaccgggaggtgaaggcacaactgggggtgaggcgggggcaggggccgggctgtgagagtgcgactgaggggggattactccggagagcacggagctgggggcgttgcgcaggtggagtggggaggcctggtggagagggtagcaaaccgagagagcgcaccggggtggtggggggagaagctggactgtaaggtgaagagttagtagggcgcaaccgtcttctcctgccctcgaagggcaagactgaagaaagtaggggcggaggaggccgggccctccactaaagggagggaagctagtgaagcgtcagttataatagaaataggaattcagtaaggaaatggagaagcttaaggcaaagggtgactctccggcctgaccctcactatgaagatatttatgtatgttcccataatacttttcagatcccaatgtctgtgtttatccttgacagaaataatagaactgctgtcttcttccaagttaaacaaaactttggagctaaaagctagctaggtcaagagaaacaaaatctaatcctcacccaattgagagactgaatatacaaagaatggccaaacctaaccatgacctcctacccataacctcttcagtaatcggccagaagggtcaggacttaatctttaaccggcagcttccctatttcttgcccctgcttccagctctgggccaatcagagaaagccaaatgtgctcctcacaccaatcgcgtaagaagccctgcttctagtatagccctcctccaacttcccgatgccaacatcctccaatcagagccaacctgaagtttctcccttttttcagtatatgtaaagcttttccactcccctgcctgcctatgagtctgttaaatcaagtgatgggtcgcggctgactcttgccagctctgagtaaatagcctattctcatttggtggtcgttatttctacacagccggtgggaaggtggtggagaatagtgaagactattcttaaggttaaaaagaaggttcggcttacattttttttttattttaaatttacagcatggcgtctc

SEQ ID NO: 914596 - DNA, 4001 bp, Homo sapiens
gggctcccagtgttttggagcctgagaaggagactgacctgtgtggcaagaaactataagcagcttatataaaaatgtggactggaaagccacagcagcctccccaaaggaagcccgacaggaagcggggcaggaggagcaggtccttagggaaaaaggcaagaggaagagggaggactgggaggggagcctgcacaggtggctccgcagcccccctgggccaccacacagccacgctgacctctggcatcatggcctccagcaggctgcccacccctggctccccagcgctcaggtcatgcctgaactggccctcaggaagtggggggttcctggtgaccacaggtgcccacccaccccagggcttctccaggacaggtggggggagccaggatggacgaaggcagggcaggggcagagctgcacaggggggaccagtaggaggcggggctgccacaaagaaaaggggggcagggggcaggtgtgtgcagggcagggccaggtcaggtgaggctaggcaggtcaccaggggcaggtgtgcggggcaggtgtttggggtaggtggggcaggctggtcacctggggcaggtatgtggggcaggtgtgcggggcaggtagggcaggccgatcacgtggggcaggtggggaaggctggaaacgtcgagcaggtgtgcgaggcaggtatttgtggcaggtggggcaggctggtcacctggagcaggtacgtggggaaagtgtgaggggcgggtggggcaggtgtgagaggcagatgtgaggggtgagctagtcacgtggggcaggtgtgcagggcgggtggggcgggcgggtcacgtggagcaggtgtgaggggcaggtgtgcagggcgggtggagcgggctggtcacgtggagcaggtgtgagggacaggtgtggcgggctggtcacctgggacagttgtgcggggcaggcgcgcggggtaggcgcgcgggaaccggacgaggcgagaggccggcgggcgcacttgcctgcgaaggctgcggcagcggcggcctcgtcggggccgggcagggcctcggcgcccatgtccatgtgcccgggctccgccgccatcaccgccactgccgtgacccgcggcgtctcccgctccgcctccgagtctgcgtcctcctccgagtcctcgtccctgctcagcaccggctcctccgcctcgcctcctgccgcggccgcggccgccgccgccacagcggccgcggccgccaccgccgccgcctcagccaggcccagctgctttgccgccgagtccgagtcctccatccggactccgccgagccttcccgaaggcgccgtccgggaccgcccgaagcgccggtcgcggagcccgaagcggggcccgaagaggacgcccgagctgggccgaggccgcccgaagccgccgcccgaatagggaccgaaaaggcagccagccgccgagcagagccgagccgagtccgcccgcggagcggagccgaggcgaacagaggctgcccgagtaggagccgaacctgcacgaagccgccgagccgagaccgagtcctgaaccgaggagggtcgaagttccccgaagtgggaagccgaatcagtccgaataggtccgagtcctcacgagggcttccgagagactcggcccctgctctcctcactgtcctgacaggctgaggcggctgtcgtccccggccgacagggctggacggctctaggcagattctcgccggcggccggcgcaattctgcctctcagagagagcttagtgccgcgggtttcgcccgttcccgccgccggcggaagccgagtcagcccgaggccgagccgagacgagccgaatgtccccgaggccgaatgctcccgaacgtcggttctccacctcttcccttccgaaagtgcccgagcggtgccggacggactaatcgggcctcggccgtggctcggacgtccgctcccgaaacgcggcgcggtcgggccccttcgtcaggagacgcgaaaatggccgaaggagcgcgagcgcgcgggccgagaggctgccgggatcgcgacggaccggcgggcggggcgggtaagatggcggccccgcggcgaggtgagctcgggcggggtgggggcttccgggcttgcagcggcgggcgcggcgtttccctgtggtgacaatccggtttccgctttcggtgcgctcacggggccgtgccaccgtctctacgtgagcgagacagctccgtcaccccatcgagaagcgcggcctggcctggcctgggtggcgggcgtcctgcaccccgaagagctcccccgcgcgcgggcgcctggccccgggcagggtgggtgcggagcggctctgggggccccagtccccggcagctcttgtcccgcgcgtggtttttgtgaagacacgtgggcgggatgggcgcagggtttcggtagccttggaactctcgccaaagaaaatcgcgggcgccggtgcctcagccgtcctgcctgagagactcgcctccgagaggaggaagggacagaccaaagcagtaaatcggccatcctgcagaggagccgccttctgctgtctgtgggtacagccagaactcccatacgcgggcgctgaagtgccaaaccttcgtgcgtgttctctagtaattaggtgcattgttttgaaggaataaagaatggctactccataggcaggacagcctctagtaaccaggtttgttttgtgtattttcatttggttaaaaattaagtttaggttgggcgcagtggctcaggcctgtaagcctgacagtttgggaagccgaggctgcaggatcatttgaggccagcctgggcaacatagcaagaccccctctataaaaaaaaaactgtaaacatcagccaggcggtggcgcacccctgtgggccaagctattctggaggctgaggctggcggatcacttgagcccaggaggtcgaggttgcagtgagccgtgatggcgccactgcactccagcctgggcgacagagcgagacccccttctacaaaaaaaaaattaaaaattaccccggggaaggccaggcgcagtagctcacgcctgtaatcccagcactttgggaggccaaagcgggcggatcacctgaggtcgagggttcaagaccagcctgaccaacatggagaaaccccgtctctactaaaaatacaaaattagcctggcgtgatggtgcatgcctgtaatcccagctacttgagagtctgaggcaggagaattgctcgaacccggtggtggtggtggggggggtggggtgcggaggttgcagttggccaagatcgcaccattgcactgcagcctgggcaacaagagcgaaattctgtctcaaaaaaaaaaaaaattacctcagggagcctgtggtcccagctacgtgggaggctgaggctggcggatcactggagcccaggaggttgagactgcagtgagctgtgatcaggccactgcactccagcctgggcaacagagcaaaaccctgtctctaaaaaaactaagtgtataccaaaacaagatttcttaacacatcttgtccattacatcagggaaaacacttgttctctttcacttccatgtttaacttctgcctgacacagctattcgtagccacattgtgattatagtaagtcactgacaaaaaatgttgtcctgaaagccaaggctacgttcggtcagaatgagctcctgcaggtctggaattgttagaacagcgtatctggttatagccgcccttcatattaattattaaaatgttacatcacttaaggcttttatacagtttttcccccaagccccataacttcaatctataacagtgagcaactagcagacacattggaagtgtttaagaagccagcctttaagaaaaggaacagaagggacaaaaaccccaattaatgcgaaatcatcacagataatgacaggtatttaggtggcctggtttagctaaggcctggaaaagaacagatcgggtttaaagagtggcct

SEQ ID NO: 914597 - DNA, 4001 bp, Homo sapiens
ctacctgcgtgacagagttattcataccccaaacctcaatatcacacaatatacccatgtaacaaatctgcacatgcactccctgaatctaaaataaaggttgaaattattttaaaaaattgaaattacaaagggctttttaaaattatgatgtaccattgttcatttacaagaattcaagtaacattagggattttaaaaatcttttgttttcatttgttctttgcttgtaaaccttgtgtattgcatattgtggacactatgtcttttccagctatttgctttaggaacaaaagctagagttacaatgaacatcataggctgtcttgtctagtcgcttaccttaaagatgaggaaataagctgacggaaagaaagaaacttgctcaagatcacccagtgatggagtgagacagatgatagggatggcactaaggcttggtattctgagcctcattctattttccactcttgccctctctctgtgtcctcctctcttctctagccttctacaaaaagtttgcagttctgcttcaatgtctacctaaggacatccagaggaggtgccacctttcattaggctgcattctttagcaccatcctgtgttttcttctccagtcttgttgcatcccatttttgactgtgagtaatgcttctgcctgtgctgttctatccaattagttgcttctattttgattgagtgacaatgaaaacaacaaaaaaaatttgtttatccaaatttggaatttttaaaccttgattaaaagcattgattttctggggttatatatgtaagacacatattttaaaatatttttaactggttaaaaaaatcaaacccatgtatttagccagggtgactatttaacaagtactaggaattcagtaatgccacaaggataataatcttataagtcagtccccgatgttgtgtgctaccgagttaatataattggatatggtatcaccttttttcaggctttaggaagtcacacaaaggaacggcacaacagaactccagggtgggatgtattagggaaagccaggatattaaaacaaagtgttgactctgacatttaccccactgttgagaaaagcacttcagtttccagggccttaatttttttctctataaaacagcaaaaatagaggcaataagttgcttattcatccttgaatacacatgttcaggagttccagaaaatttttggatctattttgggtgtctggtaaccaccatgggcaaatccaagaagtcctagacacacttctccaaagcatgtctgtgcaaggggccttatacctgtgattaatgtttgcatgctgaatgcagtaggctatgccctggtgtggggtcatccctggttcctgtgtttaaattctacattacaagactagatgctgagaaggaagagggaaagccagggatggagatggagccttaaggggaaaagtcaagccccagtgaccaacagtattggggagcaataggttaaagatttcttagattataataatattttcaaagagacttcttccaccaatcccttctgtctgagcctaccacagctttggcatagctcttatgccagttcttaggaaaactaactgttgctgaaggaaactagaggagctttggagaccaagatttagtagaataatgcctgatttttaatttttgatgtctagtaactgctagtaaacttgcctaatttggagatggaataagagggtttcaaagacttgaaacaccattgacttcatttaactgagttgctatggagaattaatgaattagatggctgcaggcctctcagccaatgagtcttccagatttcctatgagacccccttttctggttataggtgatggtgatttctctttgagtattgaatccctgtaaggtgttaggcactctactcttaccaagtttattttgttacctggtagaacttggctcataaagaagaaaatggcgaagaggaggacagcaatcctcatggctgaagaaagaaaaaagtttgtcttcatttccaggaggcagagaaaacttccatctgtggctgtctagcaccagtggaatgtctctgtttggataataagagtctttgtgtacctcattaggcatattcatagatagacgtgttctatgcatgcaaaattgcttttatgggaagactgagagtcctttttttattggacagccagttcattagtatgatgtgggtgcacagttttggccataaaaccttgttaaatggggacataagctacaaacattttggcaaaagatgaaagtttatgaacaaacaaccatttatattgttacaataaattagactgtgttgagaaaccagttggtttcattaatgaccagacattttgttagtgaacacttcccagactttacttgccctgctaagaattaatcaccccactttctcctggtctgaaagtccaaagtgctttgtttatgttacagtacttactgccttgtatgttagattagtgaatgtatatttgcctcatccactactgtatgagcttcttgcttgctaggacaagactatattactcagaactgaggagggagttgaatcatgtggctatttattctcaaatcctcttcaccaagtggaacaaaacaacagtgaaagaccaccgcacatggaggcaggaggtctggatttggattctagatctctagatctattactaactggaggtatggatatagtcaggaaaattgtcttccttaggtgcttccttgatagcgtctataaaggtcgagatctgttggatctagatcaggggattctcaatcattactatgcagaaaatcaactgggagagttactttgcaatacagatgcttagttccatctcatgatatttttattttttttaaaattggtctagtattttttgttgtttgttgttgttgtttttattgatcattcttgggtgtttcttgcagagggggatttggcagggtcataggacagtagtggaaggaaggtcagcagataaacaagtgaacaaaggtctctggttttcctaggcagaggaccctgcggccttccgcagtgtttgtgtccctggttacttgagattagggagtggtgatgactcttaacgagcatgctgccttcaagcatctgtttaacaaagcacatcttgcaccgcccttaatccatttaaccctgagtggacacaaaacatgtttcagagagcaccgggttgggggtaaggtcatagatcaacagcatcccaatgcagaagaatttttcttagtacagaacaaaatggagtctcctaaatctacttctttctacacagacacagcaacaatctgatttctctatcttttccccacatttcccccttttctattcgacaaaaccgccatcgtcatcatggcccattctcaatgagctgttgggtacacctcccagacggggtggcggccgggcagaggggctcctcacttcccagaaggggcggccgggcagaggcgccccccacctcccagacggggcggcggccgggcggaggcggccccccacctccctcccggacggggcggctggccgggcgggggctgcccccggggctgccccccgcctccctcccggacggggaggctggatgggtgggggctgccccccacctcccggacgggccggctgccgggcggagacgctcctcacttcccggatggggcggctgccgggcagaggtgctcctcacatgccagacggggtggcggggcagaggtgctccccacatctcagacatgggcggctgggcagagacgctcctcacttcctagacgggatggcggccggggagaggcactcctcacttcccagactgggcagccgggcagaggggttcctcacatcccagatgatgggcggccagacagagacactcctcacttcccagacggggtggtggctgggcagaggctgcaatcttggcactttgggaggccaagg

SEQ ID NO: 914598 - DNA, 4001 bp, Homo sapiens
cctcctacctcagcctcctgagtagctgggattacaggcacgcgccacgacgcccggctaatttttgtatttttagtagagacgggggtttcaccatgttggccaaattggtctcgaactcctgacctcaggtgacccgcccgcctcggcctcccaaagtgctgggattacccctgagccgccgggtggtgggccaccgcgccccgcctaatttttttttcataagaaacactgggccgggcgcggtggctcacgcctgtaatcccagcactttgggaggccgaggcgggtggatcatgaggtcaggagatcgagaccatcctggctaacaaggtgaaaccccgtctctactaaaaatacaaaaaattagccgggcgcggtggcgggcgcctgtagtcccagctactcgggaggctgaggcaggagaatggcgtgaacccgggaagcggagcttgcagtgagccgagattgcgccactgcagtccgcagtccggcctgggcgacagagcgagactccgtctcaaaaaaaaaaaaaaaaaaaaaaagaaacactggactttttctggtgcccaaaaacaaaactgtcttgtcatcgttgaagccgagtaagattagtcaacaggataatcactttcgaaagagaaactttacagtgacagaaaagtgaaaaggagtccccctcatcaggatgacacaaccttaaagtacaacccgacaaacctccacccacttgaaacccactaactggaaactccagacaaaaacttattttcaaaactgttacaattcaaagactccaatgacagtgcagtggaaaattcacggggactgtataattttcacggccttctgcagtgagtgccaaatctggtcagggccccatctttgactcccctcatcactttccctttcaaatatgacttgaaacgcatcagaacacaccaagcctctccaactacaatgctgctacccttttattcacaaacgcctctgtcctcataaaggacataaattacttttcaaaaaaggcatggccccgggatacaagccctttccaaggctaagggagttcctactcttcttggtgccgcccaagttcactttattacttcatatcccatccagacgcgcagagctgcaatctgactcagggggcccagcccagggctggggtataacggttttgaggaactagtatcacaagcttcttgggaagtggccagataaactcaccaagtttttgttttccttttttttaagtctgggtggaacttactttcactaggacgtgggacgccttccctccctaatgggtgccagaggacaagctttcctttattttaaacgaagtcactcaacctacaccaaactgagaacacacaaccctccctctttctggtcgccgaagacgtggccactgcgcagcgggccgtaggtttggacccctcatggctcagagcccctcatccgtttcccccctccagtccaaagcccccttcgcccgcgcccgccctggtcctcccggccgacactcgcccggctcccgggacaaagcggggctgaaggaaggtttcttctggggtccccgacgacagcgggcgcgggaaagcgccccgggctcggcgcgcactcacccgacagctcgtccggctccagcccggtctccgtgtccagtccgcagatgacaaagtagtcggcgaagcgactgggcgccgagccccctccgccgccgccgccactcatggcgccggggccgagaccggccgggcagtgcggagcggcaccgagcccccgcaacccgggcgcccgcccgtccgccctcaggccgcccctcccgccgccgccgctaccgcggctcgggccgccgcccccggccctggcccggtcccctcggccgccgcggctgccgtgacggggcgggggggcaccgggccgccccgcaccgcatcctggatgccttcccctccgcgccgccgccgctgcagctagccgagagcgccgcggcccgagcgagcctggagaagggcggagagcgcgtggacagcccccaccgtgaccctcctcctaccgcgcctgcgcaggcgccgtctgggagggggcgggctcctgggggaaaggatgacgtgatgctcttcggaccccgccggccgcagcttcccgggaggtcgccgcagcgcagccggtgactgcttggtcgcccgcaactgccactcccccgggattgagactcctttagggagggctgaggaggtgcgagaagagtgggcgcagcctgcagagccgggcatttggcccatgctctgcccccaaccacccacccagcaagcagaggtccagagatcttagcgcggccttgccatgaggatggggtctcacgactgagctcggaagctcacctaatcctagctgcagcgtgtcagcctagaccccagacagggccttctccctgtcctctcttttggcaggggcggatgagccggttttatatttacccttattttacagacggggaaactgagtctcagaaagaagcaaggacttatccaaggttacgctgagtctaagagacataagcctggtctggaatcctgggcttgtggtcagctccccgttcctcgccgctcccacctcccagcctgcccttttcccacgctctctccttttttctctggaagcctccagaggcgcctgccatttgggagctcctcttcctcttcactctgtgaaaactctcagatccacccctaaacctgttttcctgtaagaggatagggaggaggcgaagggaaacttacctattggtccttgtcctaggaccctccgatttcctttcccatagaagctaggcagatgtgtctttgttggaaactggagatcagaggccagaaaggcaacacaggtatagtggtcactagcatgggctctagaaaaaaatgctcggatttcaatcctgacgatcatttacttttgaccttgagcaagttaatctctaagtgcctggcgtcatggtttttgagacaattacataaggtaaatgcaagtacaggtaaaacaatgagaatactgcctggaacatggaaatcactcagtaaatattacagattttttttttcaagacggagttctgtcttgttgcccaggctggagtgcaatggcgtaatctcggctcactgcacctctgcctcccaggttcaagtgattctcctgcctcagccacccaagtagctaggattacaggcgcgcaccaccacactcggctaattttttgtattcagtagagacagggattcaccgtgttggtcaggctggtctcgaactcctgacctcaggtgatccgccctcctctgcctcctaaagtgctgggattacaggcatgagccaatgagcccccagcctggattattattattgttccagaaggaagtactcttacggtttgttctgggaggctgccactaagagctgtagaaggcagctggcttccccaaaggctgagcctaggctctctcctaggttctcctgggtacttctctcaaatattgtttcccttggggaggtttacctagaggttatagccattgtctctcggagccatagcacctgttcctccctgtatctaacctgcctgaactagggggagaaaagtggggaggagaaggttgcttcaaaacgcccattcatggtgatgctccacccgtatcctgcatgctggggacacagagacagtagagggggattagtgagttaaacagtcacagaggctgggcgtggtggctcacacctgtaatcccagaacttggggaggccaaggctggcggatcgcttaaggtcagaagttcaagaccagcctgaccaatatggtgaaatcccatctctaccaaaaatataaaattagcagggtgtggtggcaggcaactttagtcccagctcctcaggaggctgaggcaggagaatcgcttcaactcaagaggcagaggttgcagtaagccgagatcgtgcca

SEQ ID NO: 914599 - DNA, 4001 bp, Homo sapiens
agacaagtgtttttgacatactggctgaagactggcatatagatctcatttcttgtacataaatcaggtccctggtcattacagcccctttaaggtaagtgagagttactaatcggtggagaaacaaaagtacaaagctgcctgccagagcacacagaaagagaatggcaaagaaccaataaccgtgtgctcccactaccttgctcactggaactatgacaaggcaactaaagggtgaaagaaaggctaacaaatgttaccaggtcgggattccagcggtagcaagcaaaacgagtgagaacaacagcgggcccctctccgtccactgcagctagtgtgccgaggacagtgttcctttgattcctgataaccagcacttcaactcttcccttagagagttatctacttaatttctgaatacatacttccttacaccatctaagaacctgttcacaaatgcccaaagctccagaattggtatttcagctattagagaaaacagggtaccatgtttttattttaagcaggtgacatttgggaatttccttcactgagtaagtgggcccaaaagatttctcaagactgttttcaatgtcatttggttttaaattcccaaatgtcttagcatttgtcttctcttcacaacataaatcaaggagacattctcaatgtggccactatgtgcttacctgaatcctttacatggaagcagactaaggtcaatattatgatttttcttagaaaaggacaagtgaaaaatggttctctaccataatctgtcgttagcattttgaagattaaaatgagcattagtgagtaagtcaaacacaagagtggggccactgagaagcacccatttgacccagaggaaggaatcacagtttcactggttggtgtttttacaaatgaaaggcttttgtcagaaagggaactaattcctacgacatcccagactggagctccagaaaggggaaaaagttgtaacttaaccaaaagaaaaaagccaagggttatctgagtatcttaacagttatctgagtcacccctattaactgggttgtagatctgctataaccagcattttagaagtgatatccgattctcttcatgtgtttgaacatttaaagaaaccagaatcctaaatcaactgcccccaaaagacacgattaggcccgtggcagaatttgccaacttccctcctaatttcatgtaactgtttttttagccaaaaacttctattcactaaaatactgcttatacataaagtgttaataaataccttttatgccaaattcctgccagtagaactcacataaacctctcatccctcccaggaagagtctggggagacaagctgactcttgactcctagcagtctggagaacaaagtgggcaagggaggagctcggcccctggccatactgtgtcgtcaaggtttgtggttgagacagggggcaaagaactacacaaattccagataccacacttgtcaccggtagcaccgcggagcatatcccggagctccccggcgcgtgcctggcacgttagcgggcgcacagaccaacgcgcggtcaagttgagagtctgggtagaaagaaaaaagctgggctgtgcgggcgggctctgccgcttgcagcccaccagccagagaggaactcgatccgcccgctcggcgggggcgttggccaagtggtcgcagctgtgctgtgctcgcccagccggccgttgacaggcgcaggcggccgaacgccccacgccgcccgccccgcgccgggacccagcccgcgcaccccagcccgccccgcgccatcccaggcggcagtcctcggcacctacccggaggcctgtgcgcggggctgtggagagccgagaggttcagcgcagcagccttctcctgcacggtggccatggcccttgctccccggacgccaactcctccagcagcttcacagctccctagctccctgagcgcccgtctgttaactgtgcggggcgtggctccctgcaggccccgcccccgctgccggtcacgtgtctctctggcaaccactgaacgtagcccgcggcgccagcgatccaagtttcctcgggcgcgatgccacgcgagcggtggtcggggacaaagcggttccctgggccggcactacgcggcccgcggctcacaccagcgggattcgaaccgcggcctgccgtagattaactcgggaccaggccgggcgcggtggctcacgcctgtaatcccagcactttgggaggccagggcaggtagagcacctgaggtcaggagttcgagagcagcctggcctacatggcgaaaccccttctctactaaaaatacaaaaattagctgggcttggtgacaggcgcctgtaatcccagctactcgggaggccgaggcacaagaatcgcttgaactcaggaggcggaggttgcagtgagccgagatccaccactgcactccagcctgggcgacacagcgagactccgtctcaaaaaaaaaaaaaaaaaaaaaagaaatagaaaaagtcgggaacctggcaagctgcctaactgctctgtgcgtcggtgtcctcacctgtgatgcgggggtaggtttagtacctgcttcactgagatgtttgtttgttttttaacgaggtttataggaaccaattcaggttcagcatttagtaactgcgtccggaacgtaagtgcttaaaattatgtcatagtagtagtagtaatagtgataataacaataataatcgagtttttcagacatccctacctgtgcagaacaaacaaatcctatgtggcccaggagagcaatgtctagaggtcacaggagggcagcaacgaaagaccctgggactggctgccaggaaatctgtgctgcctccaaaggaactgtgggtcgggtgggtagggacagtttgctgccggttggagtgaaggtgaggagagaaaaggaggaagggctattaatgggacacatcttagttacttggaagttgaagccaggccagggatccaatgctggatacctctgaaaggatgagtggtcttagagaccaataatccaattgccagacacttgcccttttttttttcttttttttcaagtttgggaattttgcaatgattttcaaaacgattatgacgtcttcttagaaggaggatgcttgtgtgatttaggtgtaaattagaatggtgtttaagtgggagttcattatttagcttattggaaagagcttctacatgggattgtttcagagaatacatactaagaagctgcccctggggacttgggtttgtgggtgggaggtgggggccagttgctgctgcttagtgttagaaaaagctggccaggcacggtggctcacgcctgtagtcccagcactttggggggcccgaggcagggggatcttcgaggtcaggagttcgagaacagcctggccaagatggcgaaacccctactaaaaatacaaaaactgtccgagtgtggtggcaggcacctgtaatcccagctacttgggaagctgaggcaggagaatcgcttgaatccaggaggcggaagttgcaatgagcgaagattgtgccactgcactccagcctggatgacagagtgagactccatctcaaaaaagaaaaaaaaaggttgccaaccagttggcaacctttttttaatgtgacctcttcccctgatggtagtaaaaccctgctttacttctgtttaaggattttctttgtaatctctcaattggctgctacacacagaaagaggatgcattcagggctggtttcaggcacccagtataccaatgaactttatcccgtgctgtataactgaatgaacacacaagtcctccctcactgcatgggaggggggaaaagctcatctgtctcagaagacaaatcttgaaaaacactaatatttgaaaaagcttggtgacctcagtgaccattttgatactttatataacatttcagagagtttttcaccaggttatgcaataattgtt

SEQ ID NO: 914600 - DNA, 4001 bp, Homo sapiens
attggttctggtagtccaaagtttattttcctgctagttggcattagaggcgtcatgctgaagactgcgattgcctctgaaaagaaggctgcaggtaggtaaaagaagtctaccaacaagaaaaatttacaatatctacgagaattatcagcaaaagcagacattggtctctgctttaattcacatacattaatgagacagcatatgggaagtactttgagctccctggaaaagtgataccaggcaaactcaaagaattaggttacagtataaagggataacaggataacagactactttcttgtttgtcgtattaaaagacaagtgtttttgacatactggctgaagactggcatatagatctcatttcttgtacataaatcaggtccctggtcattacagcccctttaaggtaagtgagagttactaatcggtggagaaacaaaagtacaaagctgcctgccagagcacacagaaagagaatggcaaagaaccaataaccgtgtgctcccactaccttgctcactggaactatgacaaggcaactaaagggtgaaagaaaggctaacaaatgttaccaggtcgggattccagcggtagcaagcaaaacgagtgagaacaacagcgggcccctctccgtccactgcagctagtgtgccgaggacagtgttcctttgattcctgataaccagcacttcaactcttcccttagagagttatctacttaatttctgaatacatacttccttacaccatctaagaacctgttcacaaatgcccaaagctccagaattggtatttcagctattagagaaaacagggtaccatgtttttattttaagcaggtgacatttgggaatttccttcactgagtaagtgggcccaaaagatttctcaagactgttttcaatgtcatttggttttaaattcccaaatgtcttagcatttgtcttctcttcacaacataaatcaaggagacattctcaatgtggccactatgtgcttacctgaatcctttacatggaagcagactaaggtcaatattatgatttttcttagaaaaggacaagtgaaaaatggttctctaccataatctgtcgttagcattttgaagattaaaatgagcattagtgagtaagtcaaacacaagagtggggccactgagaagcacccatttgacccagaggaaggaatcacagtttcactggttggtgtttttacaaatgaaaggcttttgtcagaaagggaactaattcctacgacatcccagactggagctccagaaaggggaaaaagttgtaacttaaccaaaagaaaaaagccaagggttatctgagtatcttaacagttatctgagtcacccctattaactgggttgtagatctgctataaccagcattttagaagtgatatccgattctcttcatgtgtttgaacatttaaagaaaccagaatcctaaatcaactgcccccaaaagacacgattaggcccgtggcagaatttgccaacttccctcctaatttcatgtaactgtttttttagccaaaaacttctattcactaaaatactgcttatacataaagtgttaataaataccttttatgccaaattcctgccagtagaactcacataaacctctcatccctcccaggaagagtctggggagacaagctgactcttgactcctagcagtctggagaacaaagtgggcaagggaggagctcggcccctggccatactgtgtcgtcaaggtttgtggttgagacagggggcaaagaactacacaaattccagataccacacttgtcaccggtagcaccgcggagcatatcccggagctccccggcgcgtgcctggcacgttagcgggcgcacagaccaacgcgcggtcaagttgagagtctgggtagaaagaaaaaagctgggctgtgcgggcgggctctgccgcttgcagcccaccagccagagaggaactcgatccgcccgctcggcgggggcgttggccaagtggtcgcagctgtgctgtgctcgcccagccggccgttgacaggcgcaggcggccgaacgccccacgccgcccgccccgcgccgggacccagcccgcgcaccccagcccgccccgcgccatcccaggcggcagtcctcggcacctacccggaggcctgtgcgcggggctgtggagagccgagaggttcagcgcagcagccttctcctgcacggtggccatggcccttgctccccggacgccaactcctccagcagcttcacagctccctagctccctgagcgcccgtctgttaactgtgcggggcgtggctccctgcaggccccgcccccgctgccggtcacgtgtctctctggcaaccactgaacgtagcccgcggcgccagcgatccaagtttcctcgggcgcgatgccacgcgagcggtggtcggggacaaagcggttccctgggccggcactacgcggcccgcggctcacaccagcgggattcgaaccgcggcctgccgtagattaactcgggaccaggccgggcgcggtggctcacgcctgtaatcccagcactttgggaggccagggcaggtagagcacctgaggtcaggagttcgagagcagcctggcctacatggcgaaaccccttctctactaaaaatacaaaaattagctgggcttggtgacaggcgcctgtaatcccagctactcgggaggccgaggcacaagaatcgcttgaactcaggaggcggaggttgcagtgagccgagatccaccactgcactccagcctgggcgacacagcgagactccgtctcaaaaaaaaaaaaaaaaaaaaaagaaatagaaaaagtcgggaacctggcaagctgcctaactgctctgtgcgtcggtgtcctcacctgtgatgcgggggtaggtttagtacctgcttcactgagatgtttgtttgttttttaacgaggtttataggaaccaattcaggttcagcatttagtaactgcgtccggaacgtaagtgcttaaaattatgtcatagtagtagtagtaatagtgataataacaataataatcgagtttttcagacatccctacctgtgcagaacaaacaaatcctatgtggcccaggagagcaatgtctagaggtcacaggagggcagcaacgaaagaccctgggactggctgccaggaaatctgtgctgcctccaaaggaactgtgggtcgggtgggtagggacagtttgctgccggttggagtgaaggtgaggagagaaaaggaggaagggctattaatgggacacatcttagttacttggaagttgaagccaggccagggatccaatgctggatacctctgaaaggatgagtggtcttagagaccaataatccaattgccagacacttgcccttttttttttcttttttttcaagtttgggaattttgcaatgattttcaaaacgattatgacgtcttcttagaaggaggatgcttgtgtgatttaggtgtaaattagaatggtgtttaagtgggagttcattatttagcttattggaaagagcttctacatgggattgtttcagagaatacatactaagaagctgcccctggggacttgggtttgtgggtgggaggtgggggccagttgctgctgcttagtgttagaaaaagctggccaggcacggtggctcacgcctgtagtcccagcactttggggggcccgaggcagggggatcttcgaggtcaggagttcgagaacagcctggccaagatggcgaaacccctactaaaaatacaaaaactgtccgagtgtggtggcaggcacctgtaatcccagctacttgggaagctgaggcaggagaatcgcttgaatccaggaggcggaagttgcaatgagcgaagattgtgccactgcactccagcctggatgacagagtgagactccatctcaaaaaagaaaaaaaaaggttgccaaccagttggcaacctttttttaatgtgacctcttcccctg

SEQ ID NO: 914601 - DNA, 4001 bp, Homo sapiens
ccattcgctagagtacaagttctcctaaggaacaaactctaagtcaaaaacatgacagccagggtcactgcctcctggaagacacagctcccagcctgtggatggcagagccgacggaatggggtctccaggaagcactaccacagagaacatccctatcccactgcccagtgcaaaaacatttttaacagcatgaacaagggcaagtccattcatccattgatgtccctaaggacatcaaaggacacagggaacagaaaaggactcaagtgagagaaggggctgtcagaggctactggctggatacatggggcagctcaagctgctcgcccccgagacagggcagcagctgggttcctcttcaagggctacgagcagcacccacaccaagaggggcagataaccacagcgataatcacacaagaagcaatgccaatgcctaggtcacagttaaagtgtggtacagctgcagggtgggttattgcaaccactaggacattgtaagtgattctgattaacagaagggaaacctcgatgttacattaagggggagaaaacaagattcataactatatctacagcatgtcctcaattgtatctatgcaatgtgtataaagaaaatgatcaagagatatactaaaatgctaataggaaggtatctttggatagtcgatttaccagaaatttttttcatttgtctatattttcaaaaattccataattagcaagctttatttttgtaacaaaggtgggcggtgtaggcgaccgttagttactaaagaaaaatccatgtcagagaggctcagcaaacagaatacagacttagaaagagggagaggggcttcatgcaagacacacacgcagaccaggacagctgtgatgacttcccagggtctaccggatttgtacttgaatccaggggtcaaggcatcagctaaggaaaacttaggcatgcttcctcccacttcagtttctccagctctaggtaagggaggtgggggttggaagagttgctattcctcgcttgggaaaagctgcggggggtgcggggcgggggttgatttcaactctgcgcgattcactgaggacctcagttctaccttggaggacatgcagggtcctctccgctgccttctaagcatgccaggctcaagagttgctgctatgtgggctccagagcctgggcgagaggatggatgtgggacagaggacagggcagacacacctgttccagtcgggcatgttccccgtctggtggctgtctcaggagacggcaaaacccataccatcctgcccatccagtctatcactgccaaagctcgctctacctggtgaagggagaggggagggaagtgccaggggtcaccagccgcagtgggggctggggaggagttctcgaatatccctaataactaagaatggtgggtggtaccgctcccacctcacggatgagggaaacaagctggggggcgggtggaaagcgatgtaacagaggtcgtaaaaattgatgagtgccacagtggagaatgaacgtggactcatcagtacccaccagcctgccacagggccctttccagaaaatcttctcgcaggtccataacccctgcgccgtggcactcaccccatctcccagacccctcgcgcgacagcgcaggtcctccgtgagagcgctggctccggtcagcctcggcctgacgctcgccgcgcaggaccccggagtaggcggctatgagggtcttcatggctgaagcccgcccagtcacggccccgcgggaagccgcttcaccccgcgcccctggcccatgccccggcccccggggccagggcttcgcgcagagcacaggggtcccgggacggcgtcgaggctgggcggctaggacacctggagctgcggccggcggccagtggtggcgcgagagaaacagcctagaccccagcagaggcggcagccgcggcgctggcgtcccggagcgcaacactttatcacctcacaacggggcaggcgccgacgcggcgggcggggcgggccgttctaagccgccgcccgcgccacttgcttgtgggggaaccgcacctgaggctctgcttggcgcgggcccggggctggccagcagcctgctccgcgcggatccggggaatgcgtgagaggagagcagctctgagccctgcttccaaggggcgcgcccggttattcccctcgctccctcagtccgaccccgggcgctcccccgcggagattggtacggcccggcggccagtacccgggcggggaaaaccaagcacgtgcggtgcaggcagagggcgtgcagggggtcgggcctttactctttaggaggggctgtcttttggcagcaaagatgcgaaggtcccgcttttggtcactggtatcaggattagttaggttagggctgggtatctcaaccacccaaactgcttctggctttccatctctttattaagaaacctcacagagcacctataccctgctgggtgctggggacccagccagatcagcccaggttctgcccttgggatgctcacgctggggggcagcagagacagccgcacacagtcactggtgacaacggccgggacaagcgagaaaccagggggctatggaaccacagagtagagaagactctgccctgggctgggggagtgggggcgctggtgcacttcccagagaggttggtgcacagcaggtttggaatcagatagactaggagtccagttcttgccctgcctctcttgagcctcagtttccatatctgtaaaatgggaataataattattatttttgtgaggtactttgagaagtaaatgagataaggtataaaaagagcctaggtagtgtctggcacatagaaagcattccagaatggtttgcccattaatgaataggaattttgcagatggaaggtgtgagggcaaagcagaaagataggcataaagtgttagaaaagccagcatgtttggggcagggctgggggccctggagtggctggagcccaggcaactgtggaaaatgaggctgaagtgagaggcgcgggtgcttgaactgagagaggtttgggagtgccactcttgagatattgggggggagccgggtcttgggagagctttagtagggaaatggctggtcaggtgggttttaagtgtccttagccatggtatgggaaatggacaggagaggctgtaggtcaggagggcagtggggaggctgtaggggcgggggatccatgtgagagaggatgagcctcaaggcacggcagtggtagagggaatggagggaaggcctgatctagggaagagcataggaagcgagatccaccagcatgtggtggagcgacttgttggatggaggctcagggaacgagtggggacaacaagcatgtcagtgataagacagatttcttaggcatagctggagcgagatagctgtggggtcacagcataagaggagaggaattccctgcctttgtggtctttatcatgttctcacagggggagaggagaatgacagaagttacaggcacagggcagcaggtaatagatgcctctggtgcaacctagagatgcttccatttgttcagccctctcaaggccacaggagtaaatctctcaaccgtgttactgggccccaaggcccgaattggccaagagtagaaagaaaagcattccaggcagagctcccagcatgtggtgaggccatgaggctggaaagatcttagtgccttttaggaaactgagggtaggctagtggcatgccacatgtgggggatggggggagacatggggactggtaagtgcaaaggctgggaggtagaaacaggtgtggtttgtttttgggcaaagaggagtgaagccaggaggatactgaaggtgccagtaaatcctggcatcctctcctcagagagggtgctcttggaggcaagactcctgctggcctggaagatcccaggtcagtctgtggctcgtgcctgctccagaagggtctcctg

SEQ ID NO: 914602 - DNA, 4001 bp, Homo sapiens
aacaggggccaggaccccctcgagagacaagggcggcttacaggagctcctgtggtgcccggctccacacactgccaggcagcccaggtccacatctgtccaggagtctcctcggcggccgatgatgccgcccctcccagcagagtggggtgggcaaggccggcagtgctgtgtgactgtgtgcaagttggcccctcacgggcctcagtttccctgtgtgtctggggaggctgtcagagtggctgagctgacaatttgtcacaggctctcctgctgggcacccatgcctccgtgctcccatgcccctccccgcaggcctgagtttcctgttcctctggtctccatagaaacctctgtccctggtcagcaagagcctgactcctcacttcctatctctgctggggcttctcctgggccttgttggagcccgccctgggcctaagcctctcccatagcgcagctctgcgtgacagtgtcttctcacctcgtgctcttggtcacctccacctcgccacacagtacgtgtaaaggtcaccctgagggcttcaacaccaagagcacagcaaaatggctgtccctcggtctccgggtggggagcctgttacaccaatggggacaggatgggaaaggactcaggggaccccatcaacccttggccggctctggggcctgacaaggacagggcctgggaaaggacagaggaagtcaggagacaagaccattggtgtctggccgtgcacccttgctggacagtggctgtggctgcaggtggccgagctgcagtggctgctatcggggcaggcaggccggagagcttcatcagctacagctggagcggacaggacacccaccctccagagcccaggccatctcacgccctgtgctagtttcaagggcgttggcatcctgaatctgccactgccaccctagactgatccactaacctttctgagcctcaattttctcatctgcaaaatggagctcacaccacctggttcagaagattggcctaaaggaggtctggatgcgatgacagagagagagtgcctggtgatacctggcagacagcagggcctggcagggcctacacccaccatagacaccagagcatgtgattgtgctacctcctggggtctgtctgcccacagtgaggccaggaacccagaaagggaagcaggagtgcccagggtggccaccacccaccgcatgaggaacagagccggccacaggtgtcacctgggtatctgctcgtgccatgaggaatgccctctgcacccggtaccaggcctggccccctgagttgctctcacaggataccccatgggactgacccagagcgcccactccacaccctgggcagggcctcgtccgccttctgctccgtgaaggctgggcatggtgcatggcgaccccacctccagcagccccagagcaagggcctgcagctgcctccccagaaccccctcggctctgctcccacagacctgggttggagggaaggaggtggggaagctggaagggaggccagtccctccccagtcagcctaggggctggggaggcagagtcctcctcccttccccaggctgagactcaccacagggatcctgtcaaaaacaacaaacaaaatgtacctcggggagcaggtgggccaggctggatggtaagaaggcgaccaggccagtgagtgtttagtcggcagggtctgccctggctcagcaggagctcggggggacccttttccatcagcttcaggaacctggcagggcaggctccttgcctagggatggtggggcccgggtccgcccggatccaaccctccccgcacccacccagccagatacagagggaggaagcagaaagcaaggaggggctgggggccccttttgacctgatctggaaggcagggcgcaggtgggagctggggtccccaaggccgggctctggatccagctccgggctggcggcctctgctgagcaagtcctagtttggagagctagcagccgtggctgctcctctgccccctcccccttgtcaccctcctccctgcagcctgagacagccgttatgaaaataacccgattggtaactgaacgcacttcctctcccagcagcggctccaggccctgcagcaggcgacgggtgggcggacgggcacacagcgcacgagcgtgcctcccagctccttttcccaaggttcccagagccaggctgggtgacaacccagtggcctcccttccacctggcacccagtacagcccagcccatgcctcagcttgggaacgaggtctaaggagggagaagtgggagccaggcccttttagggagggggccccccactaatgccccctatttagccacctaatgccttctcacgcccactggacaggttttctgaggtctggggaagctaatcacaccggctccagacaaaacaatcacaaaaataagtatctgtggagtgtttcacaacttacaaagtacttttcaccagcattacaaacgggaggctggtatttcccctgtgcagacagcactactgtcccactgaatagatggggcaactcgaggcttgtggaagcccgtgactgcccacaactccgatttggttgagctgggactccagcttctgggtcttctggctctgccaagctaaggaacgcccagaagacaccagtctgtgttatatgtatcctgactggaatgccacccccccaactcccagtcctgacatggtaccctagggtctggagtggcagctgtccaactgcctgatcccaagacctctttaaactctttttttttttctttgagatggagtcttgccctgtcacccaggctggagtgcaatggcgtgatctcagctcactgcaacctccgcctcccgggttcagatgattctcctggcccagcttcccgagtagctgggattacaggcacctgccaccatgcccagctaatttttgtatttttagtagagacggggtttcaccatgttggccaggctggtctcgaactcctgacctcgtgatccgcccacctcggcctcccaaagtgctaggattacaggcatgagccaccgcacccagcctttttttttttttttttgatgaggaaaggggcgaggagcttccacgccctccctgggcacaccatcctccaggaacctccatgtgttcagcaacttgaaagctcccagacccctttacactctcaaaattggtgaagatcccaaaagagttttgttttagggggtgacagctattaatatgtatcatatcagatgttaaaactgagaaatgtttaagatacttactagcttaaaacaataagcccattacgttaatataaacaacacttttataaataattttctaaaaaaaagttagcaaaaagagtggcatcattttacattttttgcaaatctctttaacatctggcctaatagaaggcagctggattctcctgtctatccctgcattcaatctgttgtgacatgttgttttggttgaagtatatgaagaaaattctgcctcacacagacatgtagttacaaaaagaaggaatatctttaacagcctttccaggtaattatagattttctttgctactacaccaaaatatgacaaatgacagtttctcaaaggttagttgcaatgtggaatctaaaaccgtatcaggccgggcacagtggttcacgcctgtaatcccagcattttgggaggccgaggtgggcggatcaactgaggtcaggagttcgagaccagtctggccaacatggcaaaaccccgtctctactaacaatacaaaaaaaaaaaaaaaaaaattagccgggcatgatggcaggtgcctgtaatcccagctactcgggaggctgaggcaggagaatcgcttgaacctgggaagcggaggctgcagtgagccgagatcacgccactgcactccagccttggccacagagcgagactccatctcaaaataaataaataaatataaataaat

SEQ ID NO: 914603 - DNA, 4001 bp, Homo sapiens
agaagaacccaacacttgataccctgtgggcagcaacaggaagcctctggtggcgcccctccctccccctgcggagcctgtgaatactggaggctacatcctgcagagctgggtgtaaactgctccatcttgcagggctgtgggtgacaaaacagagctactggaagtttcactccctgctctgttttatatgacattgaagcctgcgtggtaacacaggagcccacggagctccatctgccagtgtaagaattcagatctgtgcatgtgctcagagacagagtgcaggtgcaaagagtgggccctagcccgggtgagacgggtagagggcacaagtcagcatcacgggtatgctagcccacacgacaggagaaaaccgcccatgttattggtgggtaaagtctacccagggaaggggcagagcaaagctaaggggcggggtgggggtgaatgccaccaagtctaggcagctgcagaaaagtgagagggaggccttgggcagactccaagtggtcagagttcagtctgaggtggctctggggtccttggctgattggctacaagctccttggccaccagggaagggcaaggctcggtcaggaagaagcgcagggagccaggtcaggtactcctggggcctcacgtcccttaccttacaccacggctaccagggcaggcagcggctcacgaccaagagcagcacacttgccatgaactgcctgcactcagtctttccacactctccccccggttccccgctagagtcctggtcaaagctctgtcacaggcacaagatggtgacatttggagtgctgggggagggggcaagatgaagcttgaacagccagcagattccagactccagcccaccccatccctttcccagcatgggctggaagagggtagagggagacatgctgcctgcctagcagagggatgggctggggtctctctgctaattaagagcaaggtagggcagatgatcaggcacccccaaccccaaggagaagcttaacatgttaaacaattaaaccagtgaccagagcttggggacaagccatgtgtggtgacggtatcaacggggctacgttctgcagatgccacgcagtgatggtaggcaacctggtcccacgaaagtccaaagggcggtgtgatccccacctcagtggtgccaggaggctcagagaggccctgttctatcagtgccaagaaggcgtgggtgaccagtcctgggggcccaacctgcttgtgccgggggctggggtgattccatcttcctgctggagggttgggagccgatcctcccacggtactacacatgaggcgcactagactgccggtgccagggaatgacccccacccggtgacagtgccaagccgaccgatcccgcccgtgtcccggccctgggggatgactcccagtgggtgcccacgccaagacggctcgtgccgccggtgccagcctctccccgactcagtgtcagtaccgaagtggcccggacccccagtggccgaggaatgtcccccggtgagggagcggtaacctgccggtgcctcggtgcctgccccgccgccgccccgctcacctgtgcccgaagagccgcagccccgggaagcgccgcttgttgagtcgccgcggcgccttgtccggctcgggaccggcgtcgcgctcggagccgctggacgaggcggaagccgactcggagtcgctgctccgggcctcggggctaccgtcccgcggctccatccggccctagccccggccggcggagggcccgcgggagacgcccatgccgggccggcggccggggctcagcacgcccgctccgcgccgcccgccacctccatggcgcgcgctcgctccgcccgccccgcgccgcgcgcccccgctccccacgcccaggtgcccgggaagccgctgccgccgccgctccaggaagtgccgccagccgcggccgcaggaccccgcatagctggccgggccgctgcctgcccgccgccgagcacgccccctcggccgcacggtggcaccgggcccgcagcgccctctgccggacgcccgctgcgctgcagcccgctggggcggtccgaggggcggggcgacgaatgggcggggcagcagaaagccctgcccccagcccggcccggcccgcctggatgggactgaatctcccggcctggcacactcgcactgcgcgcatccagacgcgcatctttcctcccccgatccctccgctaccaaacaactgcacgctcacaagtgtacactcgcgagggctgctgtcaccacctcccctccgctctcgcacaccctactcatagccactcacaatctccacccatacctccttggctcccccaaatcgcacccaggggaacaaaagtcacacagtgctccccatgcacgcagaacaaacacatcccttacacaattatgcccactcattacttaaacgaacacttcccaccccagcctctcgcactcagtgaccaaagtcacttaatgactcgcacacacaccaacaaagaactcacaagtttctcctacaaagtcatccttccacagctattcacaatggtttccaaccttctcacccaggcccaacacatcgcattttcctgacatagtattcaacagaacctatagatctcatatgctacgggaatcacctgcacagcccttacacactcacaaatacacagaaggacaacaggtaccacactcccattcacaagcacacatgcccacacagaacacacacctttctcctacatacaaatactcccaggacaatggttaccggttgccacatccctcacacatatgtatgtgtgtgcatatgcacacactcccatccagaaatatacctcacatgcacacacaaagacaccccacaatgcagccgaggccgtccccctccagaaatgagagcaattggaacccaagcagtcacctgtaggggcacagccatcacacacaccggggctgtttctgatggcccccgcagggctgacgaagggaggccaggagctgggaagcatggtcttccacctccccaaaccctaccaccctgctgcccacaccagctgcccactacttctgtgtgcacgcctctctgccaagccacatcctgtgtcaccttcgctttcatcctcccctcttgggttctggcagcccgttttccagccttagtcagccgcaaatagccaatgcttagggctgtgacctgcggacaagcctgtgattttgaggaagaaccagcaccccgaggcccagaaccctctcccagtttcctgcaagttgggagaaggtctgatcagggaggtggggctccagccctccagccagcagctggtgccagggtggccaggaggagggcagatcaatccccaagtatgcctgacaactggcctctggggtgcatgggtccttttggggaagtttcccaatggctcttactccaagctctgagagaagagatcagaggcaactgaagaccccacggagtctccacaaggccttgcagctgggtcagaaatctccagcatccagtgccacactcctgggggggctcctcttcccagatccccccactgctagcttgctcaactcctggcctctctcgagctcagttcctccacacagtccaaacatcagagctccctgcaccctgccaataactcctttgccctactctgtgcctctgcagagtgctggatgacagatgggtgaccctacttctgtcacccccatctcagataaaaggctcatagagggacagaggtcccatgcccactcccaggccaccccttgtacctactgtgtctggggtgcctctgatgggatctgtggcacgtcccaggagcggtagcgccacatctgcctcagtgaccccggccgctccccttcttccgtccccagcgcctccactgggcccagagctgaggattcattgcagcttcccccggcactgtggccagcccccggtgcgctcatcctg

SEQ ID NO: 914604 - DNA, 4001 bp, Homo sapiens
agaattgagagtagaaaccaggtcttctgactcccaggctgacatttatcccaggagtctccattctttgctgcatcccctgtgagtccctctgcacttcctcctgccccagggggacattcatacctacagccagaggcatgggatggatgatgcactcccctgggcgtggtgttctggaagaacttggtaatggagcccggtgtacccacgatttctagtataccctagaaggtggaggtagggcccatgggaacctggcctgcttcccatttgctctgagcatcttgcttcttggaaaatcccctccccttctgtcccttcctcccccaagtgatggagccctgatggccccagagccattaagaatactgaggcctttcaagctcccagggctgggcaagttttatgaaacgtcttcccagaagccactgggagaaccagggcagcctcagacatatcccaaacaccccatggttgtaagtggacagggaacttgtcctctccaaccaggccgatggctgtaaggaccgcagctgccctagtggccctgctagactctccaggggaggtcactctgggccaagggcttgagagggacagcaagtccaagttgaggctgtggtttgggagaggaagaggaaggtaaggtgtgtactgggctgtcccagctccaacctctgtgtaactttcccacccttgttctgaagggctgtcctccctcattaacgtcctaccccaggtcaccaaaatgacctctggggcccactccagctggctcctccaggaccctctgggcagaggtggcaggccaagagactctgacactgacagaagacagttgaattaagaagatgttgggtgggggtggggaggttccctctgcccctggaggttgccagccagggcctgctggggcatgggggttcaggagggaattctgttccccatctctgggcagcagggtctccacagtggtggcagggagcctctcagtcatttccacaagcctgtgcctggcacagactcagcccacgggaaagctcagggtagacctgttgaatgaagagggggttcctctttcccccagaagggccagggggcatctcctggctctccccagcagatagaggtttgtaagaacaatgtcatggctctttcctctccttagcgcctggtacactgttccctcagccactgcatattggatgaatacggctttcacggttcaggcagagaaggagtctcagaagctgcctccttcccgctgtacacgaaaagacagagatccctcggcagtcatctctaaactcccagcgccaggcaggcggcgggcgcacaataaacgtttgtgcaatgacgcctgcaagaggggtggtcccaagcgccgcgctcccctctgcccacgtcctccttacctgtaagacacctgctttcgtaggtgcagctggcggaaacgctcctccaccgggggcccagcggccgtgccccgggaaccctcgggccagggctgcgcgacctgggcctcctccccgcgccggcatcgccgccgcaccacctcctcctcggctgcccggccgccgccagcccagtcccagcgctgccctccgccgccctgcccctcggccatcgtgcggccgccttccgcccgcggctcctgcggcctttcgggcacccgctcaagttcgagtctccagtccgcccgggccggggacgcgaggcggggagggaggggagcgccgggttccgcaggtccctagcgacgccgacgcttagacgacaggagcagcgagatgctgggcgctgcgcctgggagaggcgggccggggtcctcctgcgctccgggggggcgggggctcctggctggagtcggggtgctgcgctctgcgcgccgcggcgccccccggacggctggagcggagccggagcccgggcggagagcgagctcctgcaaccgccgctgctgccgcgcacccgagtgtcaccttagagacactctccagccggtggggtccggaggggagggcgccgctccgcccagcccgcccgctcagggcacgaagggagcgagcccggcccagcccaccacgggcacgaacctagctcagggcgcaaggcccggggtgtggggcgcctcctgcgaccacctctgcgcccccgcccgggtcctagtccaggcagctcggcagctgccaatcatcaccccgccgcctgtcactcagctactgcgatgtgtcccctccacccccacggctgcctggtccctcgctttcgggcttcggcattcgccgctgcagctggcaggtttggagcgggggcgtgcagaggcggtgacatgagccaacattaaccccgtcggcgccgctggaatttagagacccactgggtttggggaaggggcacaggagagggaacatacccagggataccttgaatttggggatggacccgatggcgggtaacactaccttcaggcctagagctcttctggatcgtgcctagagagggccccagatgggggtggtgtctcctcaaggcagggaggcctcctaggacctgaattactgaggcttcagggccagggtctcttagatttaatcggcctgctgggtcaggagaggctgatgagataggggagaagccaactccaaaaggaaagactggagttctccttgaggtccatcttggactcccccttcttctttccctccaaatcccatggttcctccttgggtcacctcctcttgtccttgcagtgttcctcaggtgaaccctccatctggattacagtggggccctggtgaacttctctgatggaacacctcctcttcacggccccagactcatctttctggccatagcatctactcttctcccgtggtatttcctagcttcctcatgcctatactttagcctgcactcaaggcctgccttgatcttcccccatcctgcagcccaggctcttccgttttctcccactcatttatgctccttattctgggaacttgcatcaggactgtacagtcccctccatctgatatctcctattgtcccctccatctgatatctcctattgatgtacttcaaattctgaggctttgcttaaaagcctcctcttccaggaagtctccttggatggctccagctgaacaacactctctttcctcccagaccccatggccctctgcctcagatgtctaatctagtctgtgtctttcttttcactgaagttgtgactatgagtgtgggaaggtgggagggaccagactcacagaggtagagaatgggctacaaagggagacagctgtgtcatagctgccctgccctgtgcctttgctcagactgttcccattgcctggagtatgtccccttccctgtcctgcctatggaagaggtgttaagtgcccttcaaggcccatgtcaagtgccacctcccccatgaacccctccccaatactccagtacagatacagtctccctccttcagccccataacgatttcctgggcctcccctttacccttgaacaataactaacatctcatttgatcctcgccacaaccctgggtggcagatattatcacttcctccgtcttatggaggaggacacggagatatcattcaagtgatttatttgctcaagatggctcaggcagtgagtggtggggccaggatttaaattcagggcttctggcctcagaactcacgcccttttccacttcatcatgctgccagccacagagtagcagcctcctgcagtttgccctcttcgctctaatctggaagcttcccaaagggcagggaatagcttgcttcagttccacctcccatctctgtctctgtctagtacttccctgtcggatgagtggaattgcattcaacttcttggtcacaggggagcttcctcccgagagccaagttctaaagaagtcttgctgctggagtgggtagggtggggcacttgtccccgaccccctacaagggggtcagctgcccttgggt

SEQ ID NO: 914605 - DNA, 4001 bp, Homo sapiens
ccggcccggcccgcctggatgggactgaatctcccggcctggcacactcgcactgcgcgcatccagacgcgcatctttcctcccccgatccctccgctaccaaacaactgcacgctcacaagtgtacactcgcgagggctgctgtcaccacctcccctccgctctcgcacaccctactcatagccactcacaatctccacccatacctccttggctcccccaaatcgcacccaggggaacaaaagtcacacagtgctccccatgcacgcagaacaaacacatcccttacacaattatgcccactcattacttaaacgaacacttcccaccccagcctctcgcactcagtgaccaaagtcacttaatgactcgcacacacaccaacaaagaactcacaagtttctcctacaaagtcatccttccacagctattcacaatggtttccaaccttctcacccaggcccaacacatcgcattttcctgacatagtattcaacagaacctatagatctcatatgctacgggaatcacctgcacagcccttacacactcacaaatacacagaaggacaacaggtaccacactcccattcacaagcacacatgcccacacagaacacacacctttctcctacatacaaatactcccaggacaatggttaccggttgccacatccctcacacatatgtatgtgtgtgcatatgcacacactcccatccagaaatatacctcacatgcacacacaaagacaccccacaatgcagccgaggccgtccccctccagaaatgagagcaattggaacccaagcagtcacctgtaggggcacagccatcacacacaccggggctgtttctgatggcccccgcagggctgacgaagggaggccaggagctgggaagcatggtcttccacctccccaaaccctaccaccctgctgcccacaccagctgcccactacttctgtgtgcacgcctctctgccaagccacatcctgtgtcaccttcgctttcatcctcccctcttgggttctggcagcccgttttccagccttagtcagccgcaaatagccaatgcttagggctgtgacctgcggacaagcctgtgattttgaggaagaaccagcaccccgaggcccagaaccctctcccagtttcctgcaagttgggagaaggtctgatcagggaggtggggctccagccctccagccagcagctggtgccagggtggccaggaggagggcagatcaatccccaagtatgcctgacaactggcctctggggtgcatgggtccttttggggaagtttcccaatggctcttactccaagctctgagagaagagatcagaggcaactgaagaccccacggagtctccacaaggccttgcagctgggtcagaaatctccagcatccagtgccacactcctgggggggctcctcttcccagatccccccactgctagcttgctcaactcctggcctctctcgagctcagttcctccacacagtccaaacatcagagctccctgcaccctgccaataactcctttgccctactctgtgcctctgcagagtgctggatgacagatgggtgaccctacttctgtcacccccatctcagataaaaggctcatagagggacagaggtcccatgcccactcccaggccaccccttgtacctactgtgtctggggtgcctctgatgggatctgtggcacgtcccaggagcggtagcgccacatctgcctcagtgaccccggccgctccccttcttccgtccccagcgcctccactgggcccagagctgaggattcattgcagcttcccccggcactgtggccagcccccggtgcgctcatcctgcccggcgactctcttcctctttcggcacttcctgacgggggtggggtcgaggggggggcctgctagaggccgctggccgcccaagctgaggaccacaggctcagggctcataggcgccttccgctggctggggccagctgccgtgaagagctgcacaagaaagcaaggggcaggtggggacaagcccagaccagcagccaggaggcagccatggggcttgcttgggctggaatctgcacctgggctcctgtctggttttcctctccatttaaactgtctgattttcaactcttggtcctgctgaggtctcccgctttatgacaaccaccaggtacaatggctgggtgtgcccagccctcaaagagcgctctcttcctagcacttctgtgtgcagcataccatcttacacagggctgggcatacaggaaggtggtgtagagaaatgagcaatgaggatggagcctggagacatgagcatgtgtcctgttctgcctcttaccagctctgtgtggcctggatcaggtcataaacctctcggagtcctctaaataacttttgggacaaggtagcctataaacaaataaactaatgaatacatgtgccagggagattttctgagcctcagttttctcatctgtaaagtggagtaataggccaggcatggtggctcacacctgtaatcccaacactttgggaggccgaggtgggcagatcacctgagctcaggagtttgagaccagtctggccaacatggtgaaaccccatttctactaaaaatacaaaaattagcccggcgtggtggcaggtgcctgtaatcacagctacttgggaggctgaggcaggagaatcgcttgaacctgggaggtggaggttgtgatgagccgagttcgcgccactgcactccagcctgggtgacaagagtgagacactgtctccaaaaaaaaaaaaaaaaaattgagctcatggtgttatctgaggaataaagaagagataggaaggttgacaaattaattcattcaataaatacttattgaatgccttctgtgcatcaggcaccgtatcggagaacatagctctaaaaacaaggaagcagggctctgtcctcacagagcttagattctagtggggaagacattcaggaaacaaacaatctatgtacaatataatgtcagcaaacaagatgtgccataaagattgggaggctgaggctggtgggttacttgaggtcaggagtttgagactagcctggccaacatggtgaaaccccctgtctactaaaagtacaaaaactagctgggtgtggtggtggacatccgtaatcccagctactctggaggctgaggcaggagaatcgtttgaattcgggaggcggagtttgcagtaagctgaaatcacaccactgcactctagcctgggcaacagaatgagactctgtctaaaaaaaaaaaaagatgtgctataaagaaaaatgaagccaaaggaagggagaagagtgatgagagtgacttaggcagggggaggggatcagggagggcctctctggggaggtgatatttgagagcagacctgaatgaatggggagcgtgagctatgtgacttacctgggagaatagcattctaggtggaagtagagtcagagcaaaggcatggaacaaagaatgtatttgtgtctggagaattgcaaaaaggccagcatggccagagaacagggagccagggggaatgcgttaggagctggaaagatctccagaggccaaactgtgctggagttcaaggccattgtgaggatttggtaaataaatactagggcatatattcactctttattcttaggactggttctaggaaggaaactgtaccttcctcaagcattctttaatcgccctgctctataactagttctttagttgtatatgtgtttgttactgtgaatttcttgaggacagaaacagcatcagttcagttcagtaaacatttatgctacagaacccttcaagatgctatcccgacccttaaaaacctccatctggtgctgtaatcacctttgtgtccctcatgatgggaacataatatttttcagtaaatatttgtttaataaatgcatgctatgcaattaataattaatactcagtaatcata

SEQ ID NO: 914606 - DNA, 4001 bp, Homo sapiens
ttgtatgcacagaagggaatttgcaaagttaggggtactaaaaggaaattacttagaaacaagtaggtacaaacaacaacacaaaagtagctgaaagaatgaaaagtgtttgctgctggcaagcaagactgtcggatgtgggatgtggtagagagtatttcttctgaagccttttaacactgatttttaaaaaaatgtgtgcatgaattactttaataaaaattcacacacatttaaaaaatttcaacgatgaaagacattttccttatgcagtgtgagaacttcagtacccgcacttcattcaatttacacaagttagtttatgcagttcctatgatgcacaaaacaagacgaagagttcttgataggaagagaccgtgtctctctccggccccaaatactgaatacagagcctggcgagtgccagtcactctccttatatctgtaaaatcaaagtggatgaaagaaaactacttctgagaaaagctgacacgctagtgagtctgatctcaagatcacagccacctggacaagctggcttgctttagacagttcctctcccccaggctctcatcaaggtaagatacaagcttagtttcttcccagccaaaacttaccagctcagtgcccccactccctccgatccctagttcccacactgactggtgttaatccagaccacccacatgcacacttgccttacaggaaggctaagtagaatggggtggcattcgtcttgccccaagccatggataagctacaaggggacaatgcctggtaccaacattatcaattatgtaaaacactgggaaattgcaaaagggtcaggggatgtgtaacctcagaactaaagtgtgaaaaagccactgggagaatgttgtcaaaagggattaaaacaagaccaaagaagtacttttagcttattacagagttcattcacccaggagtcagctctttagccacaagcattgagttgtgcaataaacatctaagtaacatccttcccaatagacggctgggaacagacaaaggggaggtgccctggtatgttgtattttactcataagaggcacagacagtcgttggcactcgagagctggtggaccagtctgtctgtactttcaacgctgtgaagccatagcctgcgcccacgatccagggcactgagatacacttacctccagcctcttgccaaatagtttcacagcagaagggaacttttccttcttgaaccggccccttaaaagtttctagacacctgtgctccaaatgcctgcttgatccttctcaaccggctaaagtcctgcaaggaacacaaaaatgaataagaccgcaggcagctgacatttcaggagagggcagaagctcaaggcccacagtaggagtcaagcaagaggcagaaggtccagtgctcagggcttcaacagccgcatgtcagggaggacggcggacaagccagtcccatcgcaaagctgctgtgcctggctcagcactgacaaagagggaggcgaacaacaggtggggcaggagaaagagccgccgcggagcgcggcatggggccaggagccgaccccggagccaggcagccttcgcccggggaagctccagacagcgcggggacagagcatccctcagacgccggctcgtgggggagggggactatccacgcctccgccccgcctccccggagccccagcggcccctcgcctgtgagctggaccctctccccacctgcgcgcacgccccctacccctgaccccaccctcgccctgtgagtgggcacctgctcacctgggcaagcgccccccactgcgcacaccttcccctggcctcacctgcgcacaccttggccactcacctgcgcacacctcggcccctcacctgcgcccaccttcccctggcctcgcttgcgcgcgctgctccacgccgcctaccctctagccaggggtcggagtcacccgcagggcaggggcgcccgcccccggatgatgtcagcgattgcctgccaatcggaggcggaccctgcacgcccggcggctccgcgccccgtgattggtcgaggagcctgagctgactccgggcccaccgcgcccgccattcggcagcggccggactcgagattgacggcccaggccccgccctgccgccccaccggcccgcccgggccctagtgggtgggcgcagcctctggcgcttcttcgggatcccagctgaccagctgggggtggggcgtggcggagtggccacgtgggccgcgcggagaacgcgccaggctcatcacctggatcatcgtgcctcagtttccccctcggcaaatggggcttcagcggctcgcgacgcacattgatggagcgtatgtccaggcgccggtgcaccgcaaggagcaaaacagacacagttcttggtcctagggctcacgtcccggggcgaagaggatcctccataaacgatcaggtaaacacatgggtgtcagggaaggctcgccgctgggagaccgccaaagtgacccgagatggagtctgggtggcctgcttattaggggggcacacctgtgcgaggacgggaggggagggagcagcaggactgggcaaagggagaagctgagccacagtgcgagccggacgcacgggccacgttgcgagggcatgacctggggcgaggcagccctggaggagggggcagctgaaggtgtctgctgaccccacacccaacagctcgggtaacaggccttactgtcagagcgatctggttgccacgtctctgtggccctcagagagacatcatgttttcttttttccctgcacctttttgttttgaaaaatgttcagcatacaaacaagttgaacgtaaagtgagcacgcagattcctaggttcagcaggggtgagcagctggccacgtttcatttctctccctctgtgtttatatatgtgtatttttcttttttcctccccactcagcccccaccattagctgcagataccgtgatacccccctcccaaatacttcggtatccaactccttaagaacaagaacctcctatattaccaaaatacaatgaccacatcagttcaatgctgttatctattttccatctccagtttcccgcggttgtcccaataatgccctttacagcccttttgttattgttgttttgttttgctttgttaagacgggggtctctgtcacacaggctggagtgtagtggcacgatcacagctcactgcagccttgaactgctgggctcaagcgattctcttccctcaccctcctgagtagctgggactacaagagcacaccaccacacgctattttttttttggtagagatgggtgggggggggggtctcactatgttccccaagctggtctcgaactcctgggctcaagcgatccacccactgtggcctcctacagtgctgggactacaggtgtgaagctctgccctacagcccttttttaaaccccaggatctaatcagggagccacactgtgcattcaggctatgcactttttttggcaggataatatactacatagagcatgttttatcttgttagaaggctgtcaacctgaaataaccaaacaggtcagaatttagcttaaagagagtttatttaagtgtataaagtttgaggacaggctgcctgggaagcacagattttaaagaatggaaatcagtattttgaactgtagatgtttgggatcatttatgtagacaaattttagggaagtttaacagaattttaacatctttttatgcataaagttataatctgaccagctgaggtggtcttttttaggtggaaggtatatttaacattttacactgaagatgtaggagtctggtctaagtacgggataataagagacaatctataataaagatcagtaattaaaaggggagcaggcctggtctgtggtctctcctagtcatttataaaacatgaatgataaagaaaaacagcctataatctaaaagacaaaattacaaacatgctat

SEQ ID NO: 914607 - DNA, 4001 bp, Homo sapiens
cagctctgtgctggtttcctcctcttaaacagacagtgggaccatcaagagctgagttttgttgttgttgttaagttggggcaggaggtataagacaactaaaagagcttctgccacagttggtgaatgagtcagacttacgcagctaaagaccaggggcagcccaaaggcagagagtgagaaaagaggaaccagaatattggaatcactcagaggtaggcttcccggctcttctgtgtttcaactcttagactacagctctttgttaacaatccccttacgtgtgttcagacaggaaggatgcaaagatgaggtgccctgcagtgcagacaggatgcaagctccgcccttcagtgaaggttgtgacaccccttggccaaaggaaaattccaactcggttaggttgggacagcatttctgcagttttcctctgtgttaggaacaacgctagggcacgggggccagaccaggggagggttctgtggcaggtcaggctgcagagcttcttaattagaaacaggaattaaggaaggagtctgtagtgcagctggagaaataaaatcttatacacgaattcatgagaatggttatttctggagaaaaggctggaatgggtggggggagccaaaggcacttcagtcttgcctatcaaatgctcatatttaagaagacaatgtattcatatgttgagtaaaaactgattttaaaaatcttaaatttcagagagtcacagagagaagaaagagagagatggaaggaaaaggagcgagagagaaatgaagaaagacacaactaacagcctaggtttccctggatgctgggctaagacaacccgcaagagtagggcttagctgcagtcgaagacgtatggagcaaatcttgagggggaagcatcccaaaccagaatttcctgggtcacaagaaaagcaaatgcaataaacagaattgtaagagaaacaagtggggaggaaatgaccccttgtcggccctagcccatcttgcctgtcagagtgaggccccagttcctctgctctcacatggaccggtgcacgcgctggctccctggacccaggacccaggtcccctctcgctcagtagctcctctcagacaaccatgtccttgattgcagagaaatctactgccccgcactcagaaagagattcagacatgaagagggcacttcacatggaccatctacagtcccctgccctctcaaactttctaccaatgcagtaccactccaccctcccttggctccgctggttagctcctgatatagatgagcacttttgccaaatatccagggattccctgaggatttccttggagagagaagctctagggaggatggagaccccctcttctggaaggaggtgatttctgaatttgtggtcctgtcctcttgggctcaggtaagctaccagggaaggtcatggcccagcttagctgtgggcaggcagcccttctgatttctcctggttcacccatctgcaccgtaagtaccaccttagcccctttggggttctgggggcgatttgctctggggtccccaaaggatggaggaggaggaggaccccttccggagactgggcgggagacgctgggggaggggagctgaggagtgggaggagcaggacagttacctcattgaagccctcctgcaggacgtccagtaagttccctcgggtcaggcaggctagcattgttcctgctgggggctccccgggcggggtctccagcccggcggccgccgccgcctcctcctcctccctctgcacacaaaggctctcggctcagctcattgggatccctccggagtcccgcatgccacttactggaaacctagactggagccaaactagcggcttgcactgggcatgctcgcacgggggcctccgctggaggggcccggcgcggtcgcggttcctatggaaacaactgggcgcgcactaggttgagcggcgctgccgggctgcccccagccccgctttcctgcgggaaagccgcacggccaggcgggctggcgagggcgcgcgctgcacgcccgcacgcacgcgcacaccccccccccgcccgggccgcagcacgggcgtgtgtgcgtgcgctacacacacacacactcacacggcttttaggcaaacgtgctgctgtatgtgcgcgctgtgtgcatacacacacacacacacatacacacatacacacatacacacacacacgttgacaaacaggcggcccggctggcgtatgcatgcgcttgcagccgcgcgcgcgcacacacacaccaggcttgcaggcgggtgtgcccgtggggagggtgcgcaacacacacacacacacacacacacacacacacacactgctaacttaaggccacaaacggcccaccagaaggtgggtgggaaagggagtgaatcataggattttcccccagactaaccgaaaacagcaacctttttccacatgggccctggacagtgaggtcaagctaaagaagaggaagcagaagggaaagaaataagaaagagaaagagcagaggaagaaagggggaaaagaggataaaaagaactttagttattgatggtatcagaacacattcaatagaacagtgctaaacatcacgcaggatcgcaacagaaacatcaaggatgaccaagccttttccaaaattttcctatttcattctttataaaataactgctaaaatatacaacccatattttaatgtgttttaaaataaatgggctttaattaaaataaagactgcaaaaatgtcctggtgcatttgaaagaggtaaaaagcttcctcaagtgaaacagaaagctattctaggctgtttctagctattcaagtcatagccttgattatttatttttaggaatactagtcatttgcaactcagtgcaaactcttgtttctataggaaaactcgaagctgaaaaaacattcattttacattccacctcgtgatcccagatggagaggaagggtttacagagcattagggctcagagaaggtcagggccttgtccaaggacgcagccaatcagtgacaggcagctcaaggatctaggagtctacacttatgattttctggaagacccagattcctcctcaaatcctgattagtaccttagccagaaaagtcagtaatggctcttattcaacctaatgacctcttcaggtccttagagaaaaagaaaatccaccaagagcagccaggctagcaatatcttgtctgaatgtctaaagctgctaaacacaaagatgtttctgaaaaagaacacatctccctgaccacaacaggcagggggcagagggccagcacaggtgttgagtggcagctgctggttgaatgtagtgggttcaattctggctaatgctggggaaaagctaagacaccaaatcattctaaacctgagcagcccacaagtccaaagaccactgtccttcataatctagctgaggaatttaactgccaagaactccctttgacactaccacacttcgtggtgtaacacccccggagagtcactaacccatgtcaattcaacaagttcctttataaagagaagcatgaaatttccaacagcacagacttgcatgcaatacatctacgtgcataatgatgcaaaaccaaagtacctacttggtggatccctgggtagaggatcctgattggttgagagcccctcatgctttgtacacagagcagaaaatattgagacatcagagggagatcctgctgacagttatctatgccagaggtcagcgtttctcaaacaagtctttgatcaaagtaggatctgtgagctcagtgtttctggaaaaagacttatgaaatcactgaattttaaagctccaaaacattttggcccaacttccttacttggcccaagtcccttatatcatagaaaaagcaaccaaggctaggagaggtgctcacagtcactcagcaagtcagtatggaaactaagatctgaaccagagggctctgaggt

SEQ ID NO: 914608 - DNA, 4001 bp, Homo sapiens
tgcggtggcacgagctcggctcacagcaacctctgcctcccaggttcaagcgattctcctgcctcagcctcccgagtagctggaactacaggcacgtgccaccatgcccagctaatttttggtacttttttagtagagatggggtttcaccatgttggccaggctggtctcaactcctgacctcgggtggcctcctaagtgctaggattacaggcgtgagccaccgcgcatggcccggcatgtataatccaaagacagaaatttgtatatagcactttaagcttacgaagtactatcatctacatcatcttatttgacctttgcagtaaataatctttgaaaacagagttaatgattctaccttttttttttcccacttttttgagacgcagtctcgctttgctgcccaggctggagtgcagtggcgcaatctcagctcaccgcagcctcgcctctcgggttcaagcgattctcctgcctcagcctccagagtagctgggattacaggccccggccaccacgcccggctaatttttttttatttttagtagagacggggtttcgccatgttgggcatgctggtctcgagctcctgacctcaggtgatccacccacctcggcctcccaaagtgctgtgattataggcatgagccaccgcgcctcgccagtattatcccggcctgaccctgcttagcttccaagatcaaacgagatcgggcgtgttcagggtggtatggccattaatttttgtatttttagtagagacagggtttcgcattgttggccagggtggtctcgaactcctgacctcaggtgatctgcccgactcagcctcccaaagtgctgggattacaggcgtgagccaccacgcccggccaccttcatttaatatatagaaaataggctacagagtttctccaccaattagtggtgggggtcagtcctccaacccaccttttctgaatctgcctgcattgagtctttgccagacaacgggccgggaaaaagtgataatggtaatgatataatagcagccaacatttgactacaaaatatgtacttgtcgcaagtgctttaaattctcacactttatggggctaatactatttttttttttttttttttttttgagatggagtcttgctgtgtcccccaggctggagtgctttggcgagatctcggctcactgcaacctccgcctcccgggttcaatcgattctcctgcctcagtctcctgagtagctgggattacaggcccgtgccaccatgcctggctaatttttgtatttttagtagagacggggtttcaccatgttcgccaggctggtctcgaactccagacctcagtgatccgcccgcctcagcctcccaaagtgctgggattacaggcgtgagccaccgcgcccggccaatactattattgccaacttttgtgtgtgcgtgtgctacaatttcattttcagtactctaccagtctttaatcatccctcttagggaccagcagagaggcagcggtatctggggagaacggagaacagatcgagaaaggggagtgcgttacccctcctctctaagctctgaaagtctgaagcagaaaactgcacactaagaatgtacaaggctgagggcggtttggtctttgaaattttagcctcctctaacccacttcatcctcgccacctccgcgtgtccccagtttcgatgtggatgatcaacttgggtaatatttttgttactcgccacctttcagcacctacctcttaaatgatgggtccgtctggttcagcatctctgtccccagccctcctgagctcggcctgccagtgctctggctttgccgcggtttcccgctgccatggtgatgcgggggccggccacaagccccgcccgactccagccagccagagccagcccctgccggccttggtcccgcctctggcccgccggatcccgcctcctgcaggcccagaccgcgccccctggacccagatcccccccaactgccgttccggatccgcctcaccaggagcatccgacaaacaaccaatcacggcatggacacaccgccccaggaactgcgccctctgccaatggtagcccgccccctttctcctaaaccccacccccctccagctccgcctccagccgcggcctgggggtggggccggaaggcctgtctactggctggactttcgaaccgcccttaaaactgggcgggatccgctgtcctcgcaaggagcttcggggccccgccccagaaaacgcgccaggcatgtttctcaggccgtttattgatcctagcggccccgcacctgcgagagccaacagtccctccgagggaagtttccaggcctcactgtgctgtcggttatcactgacttgaggtcctgaaagcgtttcctccacgcctcagcccccttcccccatttgtctgttaaggtctggaacctgactcagccactgaggaaatggcccaagccagccctagtgtctgaatgtaaaagctcagaatgcttttccggagcacctccccttcagctttggagtttaaggtgtgtgaaaaaggataccattaattaaagtccaacaagatcagcccacgtgcttatgggctaactttttacctgctctttctgcactttgcaagagcaggagcaacaatggtggggtcgaagacctacctccctgcacactccacctaacctcatgtggatagctaagtttagctatccacccatagctaaaccaactattaactccaacctaacagtggcaagtaagaggccaggggagaaaatgggacgcccacaattccaggggctttggagttctttaagcttaaaacgtggacaacatccctgggttgccacccaattccccaaagcagtaggttctcccccacaggtgtagtggttaacgatggactgggccttcctcccaagcgctcacaccagggtcccgttcttgctgtcatagcgaggtgtggcctgggggaagcgaagggtcgcatactctgtagcgttttctaaatgcacgtgtttcacttcccgggcatggggacggctgcacacttgaatgtcagcataatgtaagttgctgtcttccgacatgaggcctggactcctctcttgagacccttgctgctgtaacacccgttcatacgtatgtcctgttgtttcatggccctgcgaggaatggatagcattaagggagattcatggcttggttttgcccctcacctccaatgcaggggcaggtcaactgatgtcccttcgctttgctcctttgagcaaaggacagacagaggaggacagacagagccagcaaattctacaggtgactgaaatgtgtctgttgcagtgcaaaagagctgactactgggatcccatgtccgagcagccccagagaggggacagagacctgtcattacctttgggagattctgctgcagctgttgtggctgcggcttcagtgtccgtcttgtttggcttcctgaggggaagaaatccaacttaagtttattctctcttccctgtctctactgagattgccttcttcaaatcactattaaactattaacggcaggcttctgtctaatccccctgcctccattctcacttctttcatgtctactagtgctaaatccaaactccttagcagggtttacaatctggccctttcacaatctggccataatatcttccatcctcatttttcactagcccctaacaagttcaacaagagaacccattgtgtgccaggctctgtgccatgttctgggggtagaaggatgagtaagctgtttcctctacctcagggggcttacagcctgctaggggagacaaataaataaaaataagtaaacacacttacaatgcaaggtgggaagtgctcagctataccaatcagccactttgaatcaggtcagtctctttttttttttttcatgagctgatttatctgcctaaaacaccttctccctcctctgctgacttgtgaac

SEQ ID NO: 914609 - DNA, 4001 bp, Homo sapiens
ctagaatccagtaaaaaacaagagccaggcatggtggaggtagccaggcacgtcaaaagcagtgaggcagcctgaggactagtgtctcatcctcctcactgtccgtattttaggggctttgctgggaatgacctcaactagaaatacattctcttccttcttagaaccacagaaaacattttaaagcttttaaattgaaatatcaaattaaagaaagttgcttaaccatatctatagatctataaccaaacaggcaggaggggtagggagtggcaagaagtgatattccgaaatagcaattgctttctagaactttcttattcatctttcaccgcttaggcaatcttgacttccaggccaacatgaattagctgcttgaaaagctctcatccaagtgtactatgtcattcacaaggagaatagatttgtgcctgctcaggcctcagcatttaccttcttacagaaatgggaatccaagtgtagaaagcggcctgcaagagctgctcatctttgagaaacaagaaaacactttctcatctgacaaggtgctatggatgacatgttccatcctctgactttgctggaccacagttggtaagtgtgagacaaaatcggggaggagggtgcagtgtgaacctaggatgctagaaaactgctttcctaaaagcacagacgcatgctcagctccttctccttcctaagagttatctcccatataagggcagaaggaggcggatgtctggatatccatccccgctgggggagtggcagagcagccaaaggaaaacaacatttctctttcttgaattgaggctgccaatgtgaggccaccgagaggtgagaccatgaaactcgatggccaagtggagagataaaggacctcaggcaggaaactcccgaggcacatgtcagagcaggcaccctgctgcctccctaaagaagtacctcatggacaaggaatatgcattatatcctctgccccaggtcagaaaaaaatattttaatgctaattaattatgtatatgacaggctcctccctgattagcttaaaagtcctattttataaacaatcccctacttagcatcataatcctctctgaggtcagagaatgactgatcaggtctggctgatacatttcttaattcccacaggtctaatagctcttctatcttaatttatcagacaagcaatcctgcagcaaagatacttccaaatcccactcaaattaatttttttaaacgggtaataggcaataaggaagagttctatatcctcatgaagtgccctcccccaccaaagaccctggcaggcgcaagggctactcatcctccccccatgctggctccacttcctacgcccaccgtattttatagtgataacccctggtcagcagccggtcctcccaacataatgctcccaccaccccgcctgtctccggccaacagcatcctccagccctgcccctgttcccacccaggccccccacttccaaagccagagtggcttcagctcaccatttgacttgcgtccctcccatggtccccctcctgtctcgggcttcagcaagcctgcgtccccgggtgaagtgggaggctgagagtcacatcgctcccaaattcaggcatgtctccccgcgctggggctggaaaacgcctccacgggaaggccagctagcaaagctactggcccggctcgcgggagaaagcgggaacggcggcggcggcggcgtctcggccccagcgactgggatgctccaggctctgaagcgcgcagtcccggccgctcagactgtgcagcagcccggccccggcggaagctgcctcccctcgcaggctgccggcccctggccgctgcatcttggcctccgcggacgcacggtgccgggcatcccccctggcgggggcatctcaacccatctcccactgggagggaggctcccggcggcgcaggctgcgcctcgagtccccagcggcgatcccactccgtgccaccttccggatccctccccgccccaccctctgctccctccctgggctgtcacacgcggcgaggcagccgggctccgacccaagccagctccgctggccaaccgaccgctctggacggaggttgagggtgcgggccaggggcggggctgggcggggtggaggtgggggtggggacgtcgacgaggggttgggggatgcgaggagaggagattgggagcctcaggataggcaggggaagagccgcgtatcggcagaatcacgaggagggctctagtggtctgagtgctggggagccccgcaccaaaaaccttgccttctccactctgagccctcccttggtggacgaggggtcggtcggacaggtcaggcccgcatggggctctggccgctcctcggggtggagactctgacgctccccaggaaaattcgccgagcacctatcccctcccaccttcccctctggcgtttcgtgtgttctttttaaccaactaaggatcattttgcttggctacaatgtgaggctggtatgcggttttcggagcaacaggctggcagggcttccccagggcgtctccggaggagcagtggcagggaatgagacacccaggggctatccttccttctgagccactcccgtcctgagcaagccacatctgggggctcctgggctcttcatgggtcacagagccactaagtgggctccctgggggcgagggctcagaatgtgcgggaacctgctgggttccagatagccacaagaagccctctccttccccagggactcactgaggaaaaggcagctactaacccagcatgccaaagagctggatgaggggtcagcattagaagaaaatgtcaaaatccagtagtgaaaaacagggtaaagcaaacaattctcctctggcccctctcctagaaaactgtcaccattagctcactgcagcctgatagccggtgggcccctcattcacacattcacagtctcacagccctcccctcagtcctcctgccttggaggagaaagcaggtgccctcaggaagaaatccactcttcctcctaccaccaactctagcaggcactatcaggctcagaagagtgaaaggcctgcagaagtgcaggaagcaatacaacaaaacatcctgtaattccgctccaggtgataacctaagcagcaagcaaggaagaaatgatttagattctcattaaaagcacacctgctgcttaatgggcgcagggcttccttttggggtgatgaagatgtcttctgagtggatagaggtgatggtcgcaccacattatgaagatactaaatgccactgaattgtacactttataatgtttaatggttaattttatgttatgtgaattttataagtaagaaagagcacagctattaaatgtaaaaaaggtaaaaagttagcaagtttaccagtatattaaaatactagaaagagttccatatgacctcaataaattaggaaatgtgcattaaaataggatggagttttatgagaaaaaaataggaggaagaaaacaaggacacataacatacatacaagacaaggaacaattagccctaaatagagcagattacacagggttgggataggaaagaaaaggtcattagagcataaattatgattcagcaacaaaatgaagttagtaaaaacatgatctggggagtgtttatagaagcacaatttacatgagccagtaaagtaatcttttttctgccactgataaggtttttattagggcactgtatcctgttttggtctctgtacttggctctaaaggatacacacaacttttagctagagtcgcaaacatcattagtttgctcaaacacatactaatcagccacagttcctgtagaggaaagttggaaacattctaatgctctaagacaactctgctcaatttcttctcttctatgagctttacacagacttttccggccttaagagttacacttaggctcaaggacagcacaatggaactggctatcata

SEQ ID NO: 914610 - DNA, 4001 bp, Homo sapiens
ggcaaaatccagtctggataacgcccatggagaagaccccgtcactaggtcctgcagggccccacactgctctgctcaagaagagactgaagaggcccttgctgctctctctcctccctcagcagaagctaacgtcagaggaccacgctgcagactttctgaacagtggtgggcacaaaaacatagaggtgacttagtcagtcttaccgggaatctgtgtgcaggagggaaagtcctagaacctggataaggaaagcagatggcctgccctagaaccagaggcatcgcaaactccacttaatttgaagcttcagagttaagagacattggggcctatctgaatcccttcaccctttaattgctccatgtcatgattgttttgcaatcacaggaaacagaaagatcatgggtcttgggatctgggcctgtccagtggatattcaaggacagctgcccatttcactgcctcccaagccagtgtccccttcactgcaaactccacaggctaactgttgtggagtgggaggggaaatagccccaaactacaaagggctgcggggagaaagcaacttccccctggagacaagggccagcagttaaggctttgcccaagggggataccaagctggagacagcagggatgtgaagccagaccaggggccaaccagcctggacattggtttcctgctgcctccttcactaggacggctggctcctctctatagacacaggctacagacagattgggcccaacagcgccctcgtctacccaccccaggcaccagggacagctccccgcacctggacagagagggctgggccagtgacatctcctgcccaggtagccctgggcatgcgtgggtgaccatcacagaggacagaacaagatgccacccacagtgtttagacctggaggtgatggagggcagaagctaggcaaagctttgctaaggtacgtggtatctgataatagttgctaaatactgcgcacctattatttgccaggtgcccacacatatgacatttagttttcacaggaaactgaggtgcaggatattaagtgatttgcccaatgtcaccctgctactgagtggcagaggaggacctgagcccaggacaactgcgaagcaccgttgggtggagggggtattgcctctcacatcctcatccgccactcatacagtgctgagatttaggatttccatcttccctctctgcccccacattgcgtgagaagcaagacagcccagacagactgccagcaaagctcagggctctttgcctctttgtccctgcatggcatcctaacaagctcaaagcataacggacaagctagaacttggcgatgcctggagcttgtcccgggtttctgtgaaaccacagtgctggaataccaggggccctgcaaacctctgctgacaatagggaaggccaacggcatgcctgacgccaactgcaggcaggtggtggccccagctacctagggagggtccagtgcagagcctctcggtggacaggctcagatccagactttttggcaaggaggcaaaacgaggcgggagtagggatcaccgtgcgctgcctccaggtcactccgcatctgctgtcggcccttcccaggccctgcgcgggacccgaggtccctggccagcgctcttccatgccttcccagacttcgctgcccccagtctggcgcttctcagagccccgcgccgccagggcgcacccacctcttccaccgcgctgcgcaatttgtgctgcgtgtcctccatcagttcctcaacctcgcggaacatctcattgagggtggcctcctcctgcgggtagctgagagccgggccgggcttgactggagccgaggtcgccgtcggagcgggcgcgggggccgtggggaccgccgccgccagcagcaggcacagcagggtggccccaagccgctgcatctccgctctgcgcccgcagccgccgcctgtgtgtcccggaacgcgatcagaggcgcgcggaccacccccctcgctgggcccgccgccccgccccgttccgccccgccgcccgcccctggcgcccctctttcccgcacccgcccggagacgggaggaaaccgaggcccctgaaaacgcagctcccctacacccgaaaagacgcgaccccacccgctccagcccgagccccgatcgccccaggaccccgcacccccatcctcgagcacaagctgagctctgctcctcacctgtgatgctggagccctcgccagagcaaccgaacccggatcctctacgctaatagctcccaagccccagctcacctagactctgtccccggttcaaaccctagcccctcctcgaccaggtcagagtgcccgacccccacttccacctcaagcctctctcagcccctacctggggtggaccaagcacaggtcagccccctccccttggcgtcgggtcctactcgagcgccccgccccacatccaccaagagaggctgagctcagcagagtcgtcccctcccccgccgccgcccctcacccaccccgactggaccgagttgcgctgcgggccggactggatctgctcgctcccgccgggaggccgccgggctgcgggtgcagatgcgggagcggcgcggtgggcgggccgcgggtgcgggagcgcggcggggtgcggcagcgccggtacccgagggagcccgcaagacgcgccccgcccgcccaccaggctccctctccgcccccgccccgagccccgcccgcccaccaggcccaccccgccccgcggaggggccgcagcccggccattggccagccggggcgccggccacctcacgccccacgccccacgccctcctcttctgcctcagcgaccagctctaccgaaggcagccatctccttcactgcctgcccctgcgcccgcggcatcccaggcccgtcttctctggcctccaggcttgcaacagcccaccgaggttgggggtagggggaatgttcctcagtcccaccttggtctttccaagccaacctctgtcctgtgaaatcctcaggaaaaatcccagcccccagcctggcattcaagccatcaccgctggccttagtctgccgtgattgacaccgtgctccagccaggataacgcacttgcagctcctggaatgggagaacgtcatgagaaagtcagcaagctcctcaagggtggcatagaggagtggtcaggaccagacacctgcagccagctctgctccttcctaacttcccgccctggcgaagttaccagatttgtatgcgtcccagttagccctaatataaaactttgacaagtctcaaaaacgtaataaggagtgggtagtggagaatcagagaagttagacgatcaggccaaacagcaggtgaaggcagggatggccagaggtcctgagtgtagctgactgctctccagcttgaaaccccaagactgcctttctctgcagcactccccacattactgtttaccgccaaaacagccgctttcccttctacttctgggcctggggcagggccctcctgaactgcaaggaaagccccattccccggcatctcctgctctgtcccctgggcatctggaagccctggttgagcattcattagctttctgggggtggctgagcccgtccaggaacctggagctgagtctccacatgcccccgcttgtcacttcgggcagagtggacattaggaagaaactaatgccgaactggagggtgctgtgggggcatattgtggggccgagctaggaaatgcagtgctgcgggtttacagagcacatcatgctcttccagtccttcatgttgctggcttaaagaccaggaatttccccagctgagattgtcttctgccttacaccttctaccatgcggtctggaggtcttgactttcagagtcaacctaaaaatctctctatatcgaactgccccaagtgtcaggcaaagggacgcttgttttcttgtgtggagtctacattttgtattccc

SEQ ID NO: 914611 - DNA, 4001 bp, Homo sapiens
gctacagacagattgggcccaacagcgccctcgtctacccaccccaggcaccagggacagctccccgcacctggacagagagggctgggccagtgacatctcctgcccaggtagccctgggcatgcgtgggtgaccatcacagaggacagaacaagatgccacccacagtgtttagacctggaggtgatggagggcagaagctaggcaaagctttgctaaggtacgtggtatctgataatagttgctaaatactgcgcacctattatttgccaggtgcccacacatatgacatttagttttcacaggaaactgaggtgcaggatattaagtgatttgcccaatgtcaccctgctactgagtggcagaggaggacctgagcccaggacaactgcgaagcaccgttgggtggagggggtattgcctctcacatcctcatccgccactcatacagtgctgagatttaggatttccatcttccctctctgcccccacattgcgtgagaagcaagacagcccagacagactgccagcaaagctcagggctctttgcctctttgtccctgcatggcatcctaacaagctcaaagcataacggacaagctagaacttggcgatgcctggagcttgtcccgggtttctgtgaaaccacagtgctggaataccaggggccctgcaaacctctgctgacaatagggaaggccaacggcatgcctgacgccaactgcaggcaggtggtggccccagctacctagggagggtccagtgcagagcctctcggtggacaggctcagatccagactttttggcaaggaggcaaaacgaggcgggagtagggatcaccgtgcgctgcctccaggtcactccgcatctgctgtcggcccttcccaggccctgcgcgggacccgaggtccctggccagcgctcttccatgccttcccagacttcgctgcccccagtctggcgcttctcagagccccgcgccgccagggcgcacccacctcttccaccgcgctgcgcaatttgtgctgcgtgtcctccatcagttcctcaacctcgcggaacatctcattgagggtggcctcctcctgcgggtagctgagagccgggccgggcttgactggagccgaggtcgccgtcggagcgggcgcgggggccgtggggaccgccgccgccagcagcaggcacagcagggtggccccaagccgctgcatctccgctctgcgcccgcagccgccgcctgtgtgtcccggaacgcgatcagaggcgcgcggaccacccccctcgctgggcccgccgccccgccccgttccgccccgccgcccgcccctggcgcccctctttcccgcacccgcccggagacgggaggaaaccgaggcccctgaaaacgcagctcccctacacccgaaaagacgcgaccccacccgctccagcccgagccccgatcgccccaggaccccgcacccccatcctcgagcacaagctgagctctgctcctcacctgtgatgctggagccctcgccagagcaaccgaacccggatcctctacgctaatagctcccaagccccagctcacctagactctgtccccggttcaaaccctagcccctcctcgaccaggtcagagtgcccgacccccacttccacctcaagcctctctcagcccctacctggggtggaccaagcacaggtcagccccctccccttggcgtcgggtcctactcgagcgccccgccccacatccaccaagagaggctgagctcagcagagtcgtcccctcccccgccgccgcccctcacccaccccgactggaccgagttgcgctgcgggccggactggatctgctcgctcccgccgggaggccgccgggctgcgggtgcagatgcgggagcggcgcggtgggcgggccgcgggtgcgggagcgcggcggggtgcggcagcgccggtacccgagggagcccgcaagacgcgccccgcccgcccaccaggctccctctccgcccccgccccgagccccgcccgcccaccaggcccaccccgccccgcggaggggccgcagcccggccattggccagccggggcgccggccacctcacgccccacgccccacgccctcctcttctgcctcagcgaccagctctaccgaaggcagccatctccttcactgcctgcccctgcgcccgcggcatcccaggcccgtcttctctggcctccaggcttgcaacagcccaccgaggttgggggtagggggaatgttcctcagtcccaccttggtctttccaagccaacctctgtcctgtgaaatcctcaggaaaaatcccagcccccagcctggcattcaagccatcaccgctggccttagtctgccgtgattgacaccgtgctccagccaggataacgcacttgcagctcctggaatgggagaacgtcatgagaaagtcagcaagctcctcaagggtggcatagaggagtggtcaggaccagacacctgcagccagctctgctccttcctaacttcccgccctggcgaagttaccagatttgtatgcgtcccagttagccctaatataaaactttgacaagtctcaaaaacgtaataaggagtgggtagtggagaatcagagaagttagacgatcaggccaaacagcaggtgaaggcagggatggccagaggtcctgagtgtagctgactgctctccagcttgaaaccccaagactgcctttctctgcagcactccccacattactgtttaccgccaaaacagccgctttcccttctacttctgggcctggggcagggccctcctgaactgcaaggaaagccccattccccggcatctcctgctctgtcccctgggcatctggaagccctggttgagcattcattagctttctgggggtggctgagcccgtccaggaacctggagctgagtctccacatgcccccgcttgtcacttcgggcagagtggacattaggaagaaactaatgccgaactggagggtgctgtgggggcatattgtggggccgagctaggaaatgcagtgctgcgggtttacagagcacatcatgctcttccagtccttcatgttgctggcttaaagaccaggaatttccccagctgagattgtcttctgccttacaccttctaccatgcggtctggaggtcttgactttcagagtcaacctaaaaatctctctatatcgaactgccccaagtgtcaggcaaagggacgcttgttttcttgtgtggagtctacattttgtattcccaaatgtaataatttatcagtagttcaattattaggttaaactacaaacgaaaaaaagaaaggaaagaaaagaaggaaagaaagagagaaagagaaagagagaaagaaagaaaagaaagaaagaaagaaagaaagaaagaaagaaagaaagaaagaaagaaagaaagaaagaaagaaagggagagagaagaaacggtaagaaaatctacaggtctcaaatataagtggtcttcctgcccagctccatgccagtccgcgcaccagcctgagacattcatgggctcgaaggaaaagccctggggccagctgtagagatgagcccaaaccagatctggacaaggagtgtcagctccaaagaactcagactggggagcccagtggggtcggggacttgttggagaaagggccagtctggatggccattgtgaggtgaggggcacagagcaggcagagagtgcagagccatccaggacaatcataggtagagtagagaacattctacatttccacaattcccattgtgtcactggctaagctctgtatccactgggaacagttgattttttcttttaagtcattggaaacacattctggaattattatttaaaattttaggttctcacattttctctatgagggagctcccaagtcataaactggggacccatttcatggttgaggaaatggcagcaaagcggatataactggctgaaaattgcctagaaagtggcc

SEQ ID NO: 914612 - DNA, 4001 bp, Homo sapiens
aggacagctgcccatttcactgcctcccaagccagtgtccccttcactgcaaactccacaggctaactgttgtggagtgggaggggaaatagccccaaactacaaagggctgcggggagaaagcaacttccccctggagacaagggccagcagttaaggctttgcccaagggggataccaagctggagacagcagggatgtgaagccagaccaggggccaaccagcctggacattggtttcctgctgcctccttcactaggacggctggctcctctctatagacacaggctacagacagattgggcccaacagcgccctcgtctacccaccccaggcaccagggacagctccccgcacctggacagagagggctgggccagtgacatctcctgcccaggtagccctgggcatgcgtgggtgaccatcacagaggacagaacaagatgccacccacagtgtttagacctggaggtgatggagggcagaagctaggcaaagctttgctaaggtacgtggtatctgataatagttgctaaatactgcgcacctattatttgccaggtgcccacacatatgacatttagttttcacaggaaactgaggtgcaggatattaagtgatttgcccaatgtcaccctgctactgagtggcagaggaggacctgagcccaggacaactgcgaagcaccgttgggtggagggggtattgcctctcacatcctcatccgccactcatacagtgctgagatttaggatttccatcttccctctctgcccccacattgcgtgagaagcaagacagcccagacagactgccagcaaagctcagggctctttgcctctttgtccctgcatggcatcctaacaagctcaaagcataacggacaagctagaacttggcgatgcctggagcttgtcccgggtttctgtgaaaccacagtgctggaataccaggggccctgcaaacctctgctgacaatagggaaggccaacggcatgcctgacgccaactgcaggcaggtggtggccccagctacctagggagggtccagtgcagagcctctcggtggacaggctcagatccagactttttggcaaggaggcaaaacgaggcgggagtagggatcaccgtgcgctgcctccaggtcactccgcatctgctgtcggcccttcccaggccctgcgcgggacccgaggtccctggccagcgctcttccatgccttcccagacttcgctgcccccagtctggcgcttctcagagccccgcgccgccagggcgcacccacctcttccaccgcgctgcgcaatttgtgctgcgtgtcctccatcagttcctcaacctcgcggaacatctcattgagggtggcctcctcctgcgggtagctgagagccgggccgggcttgactggagccgaggtcgccgtcggagcgggcgcgggggccgtggggaccgccgccgccagcagcaggcacagcagggtggccccaagccgctgcatctccgctctgcgcccgcagccgccgcctgtgtgtcccggaacgcgatcagaggcgcgcggaccacccccctcgctgggcccgccgccccgccccgttccgccccgccgcccgcccctggcgcccctctttcccgcacccgcccggagacgggaggaaaccgaggcccctgaaaacgcagctcccctacacccgaaaagacgcgaccccacccgctccagcccgagccccgatcgccccaggaccccgcacccccatcctcgagcacaagctgagctctgctcctcacctgtgatgctggagccctcgccagagcaaccgaacccggatcctctacgctaatagctcccaagccccagctcacctagactctgtccccggttcaaaccctagcccctcctcgaccaggtcagagtgcccgacccccacttccacctcaagcctctctcagcccctacctggggtggaccaagcacaggtcagccccctccccttggcgtcgggtcctactcgagcgccccgccccacatccaccaagagaggctgagctcagcagagtcgtcccctcccccgccgccgcccctcacccaccccgactggaccgagttgcgctgcgggccggactggatctgctcgctcccgccgggaggccgccgggctgcgggtgcagatgcgggagcggcgcggtgggcgggccgcgggtgcgggagcgcggcggggtgcggcagcgccggtacccgagggagcccgcaagacgcgccccgcccgcccaccaggctccctctccgcccccgccccgagccccgcccgcccaccaggcccaccccgccccgcggaggggccgcagcccggccattggccagccggggcgccggccacctcacgccccacgccccacgccctcctcttctgcctcagcgaccagctctaccgaaggcagccatctccttcactgcctgcccctgcgcccgcggcatcccaggcccgtcttctctggcctccaggcttgcaacagcccaccgaggttgggggtagggggaatgttcctcagtcccaccttggtctttccaagccaacctctgtcctgtgaaatcctcaggaaaaatcccagcccccagcctggcattcaagccatcaccgctggccttagtctgccgtgattgacaccgtgctccagccaggataacgcacttgcagctcctggaatgggagaacgtcatgagaaagtcagcaagctcctcaagggtggcatagaggagtggtcaggaccagacacctgcagccagctctgctccttcctaacttcccgccctggcgaagttaccagatttgtatgcgtcccagttagccctaatataaaactttgacaagtctcaaaaacgtaataaggagtgggtagtggagaatcagagaagttagacgatcaggccaaacagcaggtgaaggcagggatggccagaggtcctgagtgtagctgactgctctccagcttgaaaccccaagactgcctttctctgcagcactccccacattactgtttaccgccaaaacagccgctttcccttctacttctgggcctggggcagggccctcctgaactgcaaggaaagccccattccccggcatctcctgctctgtcccctgggcatctggaagccctggttgagcattcattagctttctgggggtggctgagcccgtccaggaacctggagctgagtctccacatgcccccgcttgtcacttcgggcagagtggacattaggaagaaactaatgccgaactggagggtgctgtgggggcatattgtggggccgagctaggaaatgcagtgctgcgggtttacagagcacatcatgctcttccagtccttcatgttgctggcttaaagaccaggaatttccccagctgagattgtcttctgccttacaccttctaccatgcggtctggaggtcttgactttcagagtcaacctaaaaatctctctatatcgaactgccccaagtgtcaggcaaagggacgcttgttttcttgtgtggagtctacattttgtattcccaaatgtaataatttatcagtagttcaattattaggttaaactacaaacgaaaaaaagaaaggaaagaaaagaaggaaagaaagagagaaagagaaagagagaaagaaagaaaagaaagaaagaaagaaagaaagaaagaaagaaagaaagaaagaaagaaagaaagaaagaaagaaagggagagagaagaaacggtaagaaaatctacaggtctcaaatataagtggtcttcctgcccagctccatgccagtccgcgcaccagcctgagacattcatgggctcgaaggaaaagccctggggccagctgtagagatgagcccaaaccagatctggacaaggagtgtcagctccaaagaactcagactggggagcccagtggggtcggggacttgttggagaaagggccagtctggatggccattgtgaggtgaggggcacagag

SEQ ID NO: 914613 - DNA, 4001 bp, Homo sapiens
agaacgggccatgatgacaatggcggttttgtggaatagaaaggggggaaaggtggggaaaagattgagaaatcggatggttgccgtgtctgtgtagaaagaggtagacatgggagacttttcattttgctcggtactaagaaaaattcttatcctgttgatctgtgaccttacccccaaccctgtgctctctgaaacatgtgctgtgtccactcagggttaaatggattaagggcagtgcaagatgtgctttgttaaacagatgcttgaaggcagcatgctccttaagagtcatcaccactccctaatctcaagtacccagggacacaaacactgcggaaggccgcaggatcctctgcctaggaaaaccagagacctttgttcacttgtttatctgctgaccttccctccactattgtcctatgaccctgccaaatccccctctgcgagaaacacccaagaatgatcaataaaaaaaataaataaattaattaaaaaaaaaaaaaaaaacttacctctgcaattaggtcaccttcattgattttgtccccctcttttttttcccaacgggctatggtgcctgcctgcattgtgggggaaagagaaggcaatggaacctggaaaaggaaaagaagaaacattaaaatttttaaggactacctaactctcagtctggcttaagatttcattcaattcaatttcatgcaaagtgtatacagttccattgcacattgggaactagggatgccaagggagttcctgtccatgagaagttagtaatttccagtgacaggctttctcctccacagtcctgtgggtctgacaaagcatgaacctcggcagatattctgcatacagccccagtcttgaagctctcctttcaatgaaatagatcatgagagggacactaaggagctacagcaaagccaactattggacaaagggccaaagcagatactgggaatgggtggaggatcagtgaggcctctcaaggaggatcttgcaggcatccagtcagctctgaaggacaacggggtcccgagaaggggggtctagggctcaccttctgatgcgggggaagactgtaatagcggcggccgggcgaccccaaaagctgcagcagtaagcggttccgcggcgtggccccagaactgggggtccagccgcacagtgcccggaccccgccataccctgtagtcacgctgttgcgacgagcgggagccgggccagatcgcgaggtcactcgtggagttccgggtacctcctgcaaggccgtccaccgagcctcgagtcccgcccatggggctacattctgagcccgtcgcgcacagacgcgccacatagtgccaccaaccccccacaccccaaaaccaacgccgtctccggagtgacctctccaagagcagcggcgttgccgtcagccacaccgcacagccgcacgttgtcgtaaaatggttcccgcaggtttactccacccgctccccaggccagaaatgcgcggcacgcacgctctttctctacggagcggggacgaggggcactacggggcaggagtgttccagaggggcctgtgcgggcgcaagtttgggagaaataacagacggaaaggggtggaaagtggtagggttctaggggaggcatccgaaagggtgagacggggcctaagagatgacaagggcacgaccgagggggaggggcctaaaaaggcgcagagacgcgggttaattgcggccgagtggcctgagagtctgggccgaggggcgtggccaagctttctggaaaagctggaagtgagcccgggaactggctagggcagtgggagcctcaggccaaagggcgggggtcttggagtgctggggtggtgaaggagccaggaatcgcccgcgagggaatcgaggggtccggcgtggtgacctctgcttctgcgcatccgaagggggatggactgggccgcgccccgcgcaggctgtactggttgcaaagatttcgtttcaggtttgtagcccaagtggaaagtggagtgaacaggtgttccacccagccaagtggtaacgaaaggcagcccagaggaagatacattcccgcattcatgtatactgtagcaagattaagcatattccctgtatgaagatataggtttacaaaacaggtgttgctccctaataccatagaattcttttaagtaaccaaaagcttcgttatgtttcaaatgtttgaaaaacttaactgtaagccgttgaaggcatgaagagtgtctgcgtggtccttccatgtagccccagagcttaatatccagtaaatagcgggggctgaatgtatgtcttttgaatcaatgaataaaaagtcatctacacattttgttaggcacgcttctcttgtaaagttgtcttttaattagaaaacatatcgtttctgaactgaaggtgacattagataaggaggaagcatgtgctgtgtatcaccacctcccccctgtagagatggttagagaacaccaagaacgcaagaggaagttggagggaagaaacttaaaacaagattttagccaggagcggtggtgcatgcctgtagtcccagcaatgcttgagaggctgaggtgggggaatcacttgagcccaagagtttgagaccagcctgggcaacataatgagactcccatctgttaaaaaaaaaaaaaaatgggggctaatcttgctaacaattaatttggaaaactaaaacagattggatgtactatttcatgcctacttaaattggaatgtttaagcaggtacagctgtctatcagaataatatgtaagcaatataattgagaaatataaaatttctagattgaatgaaaaggcatattttaaataatatgaagagagcaattatattgttacaattatgtacaacttatgaattaacaattggaagaagcaatgaaagaataattgtaattactgaaaggacttattactattatttggggatggagtctcactctgtcgcccaggctggagtgcagtggcatgatcccggctcactgcaacctccacctcccaggttcaagcgattctcctgcctcagcctcccgagtgctgggattacaggcacgtgccaccatgcccagctaattttgtgtttttagtagatacggggtttcaccatgttagtcatgctggtctcaaactcctgacttcaggtgatccacctgcctcggcctcccaaagtgctgagattacaggcgcgagccaccatgcccgcccaggacttataaattattataaaaatgtttttgagttggctaaaatatcttgctgcttttgctgcatttgaacttaataactggatctaaattagactttggtataaagtatgaggtgatcttccggatctgttgtgcacttaggtatgcttgcttaaaccctgttttgcatttttcaaagaatagcgagtttgtgtcttgaatatacttttgacttaagtgtagttaaattataggaatgcatagctcaaacagtccagagatggcgagcttaccccagaggtgggctaggaatgcttaggtttctcaaatcagtcctgagagaacaagcttgaattccactaaacagactggataaaggaaattatggaaaaggagactcaagactcaaaggtttgaaatagagatacttaagagaatggtgatatcactgatattgagagaaacagaaattagttggtagtgaaagattttgagttatgtacatatttaattttaacataatgggatagccaattaatagttgaaaatacgtaattggaagtcaaatgaaggcactcagggataaagaatttaatatagcaaacatttaagatgaattgataagaggcatttaagaggcagctttcaaatgatctgggaattctggtcattttaaatacacatttctgaaagagttcttaatgcttgcatactgacttttgtcatagagtttatactcttgggttcttatttgtttgcatgtttacata

SEQ ID NO: 914614 - DNA, 4001 bp, Homo sapiens
aataaaaacacacatcaacttaaatatgtcaaagagccatatcatttattggctacattcccaaaaccattcttgttctagataaaccaattgtgtctggtctggacaagtgtggctccaaaatctcaggcagtttacttctgtcagtggtattattagaaacagcagggggaggaaacaatcccaatcttaaatcccagtgtgcaaatatcacagttctaggtgttccaaaagttttatatatcattgtccatctctacaaatatcagcttggataaggcatctcagtgattataagtttcctcaacatccctaacaaatccacaggtagaagaattaaacaccatgcagagataagttccactttaacctgcaattcacccagagctttagtttcagattgtagcaactcacataactggacaacatttggatctatattagtccagtatagcagagttcaaggctgttcatataagttttgattcaaaactcttgagaaactctttacagttgatctcaccttccatataatgtcaaaacaaaacaaaacaaaaacagtcccaaactaggatcctttggaacaaagttaacctggggtgcatctaagctaaactgaatccccaagttcagaatataatcaactatgcttcaggaattcactagatcttgatcaattccaataataaaagttgttgaggagggaggaaaaaaacaggtgtttgccccatttggggaacttgacaatcatgttattggataatgcatatatctggaaaagcacaatagtcacgaaagttgtgctttatcacaaaagtgaagatttacactagaataaatccaaataataagtctattttttaaccaaaagataaattataaagctgtaattttgttcagtgcaaatgaaattactttgctacctttcacaattctgtaattagtttgataaatattaaacccatgaggaagagctccactgcacaagtttcttttttaaagactgcttaaaagtaaccttcaacaagctaagaaaacaagctaaaggagactccaaatctgcggtactgaatctattcttattaccaacggtgatataaacaacctgatttatgaaatcataaatatctatcaataaatactatagtcttgcttccttttactttagtaaaataatattactgaattatgtaccactgaaactatattacaataaatatttcccccaaactgaagcaaaactttactctcaaatggaatataatttaaattacaagtaccagaaccaacaaaagggagaaatattatatagcaaccttatggcccacctgtcttcttgactggcattcttgggtctttccactgccacaggagtcaatatctcttttcaggtctcagtttgatccagctggattgaggccaagagccaggtaactgttgcaaaccacttcagtgttcagttttgaaatccaggctgagtcttctatgtcagacaaagaaaataatgatgtattttttccacaactaaactttttacaccgcccacagagtttacagcaacgtaattttttagtttttcaagtttttcaattttcagaaaatatttagactgtttttacaaactgggaaaattattgtaaacatgaagaacgttactgaaattcctcttcaggcagcaacatttttggaagttcaatgactaactcaattaaggcacaaaccaaatttagacaggtctcattactttatacatggtcaaattcaaagatgatgataaagatactcaaatctgtagagaaaaatgtaaccccacctccccaaaaatacttttaaaaatctctttgactccagtctctaaaaagataggtgagtttgaacagttttctgtggcagaacacacattgaaaggcccccttatatttactgatcagaagttccggatctcaccccctcagtaactcagaatccagcttgctgtccctttcatttttttcttctgtgctctccaagcccccaggcttgatccttaatgcccctctgattctgatcctcccatgtattaaccgagaggattgaaaaaaaaggaaagcaatcccttggcatggagacattaaagtgacagtgctactcaatgggcacttgatgcaggatgagttggcgaagcagatttcttcacactggagtcattcacatcatgccatctcttcgcattcaagcagctccctatccggcgaggaaaaacactgagacttcgagagaagccaaaccttcccccaaaggtgttttcagagacgccgtagtagtattagacatgtaagcataagctatgtaaacggtccgcgatttcctaaatgagaaagtgcagctgcttggctttcacatccaccttttctctcaatctctcttcaaactacccaccttccttttgcagaaaagacaagacatttctttgccaccgctggccacccctgcccaagccccgttcttttagggaagagcactgaaatgtcctgcaccctccacgcgatgaagtgtttcctcaggcaggagcaacagcagcactagaaattatataactctcgaatttggcttctgtaagacatggagactggagggtcgggggttgccggtctgggagatactgctgggcatttaacgtgcacaaaacagcgccaggccttgcagtgccccccaccccgagacacggctgacaagtgggtcttctcgcgggggtagtgggcaaatttctctccggtctctttccaagcggggctaaaggatgcaaattgaggggactacagactggggagaggagtcagacggctgagaggagaggaggctagtcggggctgctctgacggcgctgggcggctggtccggggtttggaggaggaggtgcccgagaaacagagctttaacaccacacaggccagggcaaaggggcgagttccctcaaggactgaaaggggcaggcagctagttcccagctgccctgaggagaggcaggagcgcagtaacattacaacattcgggccgccccatctttcccgcaggacgcgaagagatcagggagctaagctgataaatagtcagggaaggaaatactcggctggcgaggggggcaggcccacaggcgcctggacctcctctaagcgaataagtggccgtaatttctagacgccgcgcccaatcacagtcaggatggagggcgcggcttttgactgagtgggggcgggcccgggctgcaatcgagaggcgttgagccgtaaatcagcaccacttcccgcccagggcgttctgggtccccgcccaccggcaagtcacatgagccaccaaaatggtggtgttcgggtatgaggctgggactaagccaagggattcaggtgtggtgccggtgggaactgaggaagcgcccaaggtaggcggaaatccgaagtggtatggggggtgatttctgcaccttcaaagtgttggcagactcttctaagatgatacctttaaaggagatttgaaaagttaaaacagctcccaagtccatgcaaggagcagtcgattaagtctccagttgctgtggaaagaggcggagagaacgtagatgacctaaattctagtcctcattatctgcagtttgttttctcttgtctccaggcctttgcacaggctttttcttcaacttggagtatttccctgcttctatccgtcccaactcccctgccaaactgttctctttcggttattgatttaaatgtcacttcttccgggaagccttcccacgcttcctctggctagattgtttgctttttcttaggttgttgggtttttcgtttatgtcactctctcattctgtgtttaaattgccagcttttttgttctgaactcccactgcgttgtggattcctgaggatgggatgactgtatcttgattacccggaggtctggcatataccacgtgctccctaaattatgagcgaatgttgaataaaattctaaaggtgaaattt

SEQ ID NO: 914615 - DNA, 4001 bp, Homo sapiens
gcaaacctgaatgataatttgggcatgattttatatatgtgtgaattaagcaaaactggaaacacactggaatcaaagacagagtagcccacgaattatgagaattgaatccaaggttaactggacacataggggtctattccatgtattaacacatccctgcccctaccactacaccaccacaatgctatagtcaaggttctgagttttctccagatggactttaatagaaataattttatgagatcagtaaagacaaagctaataatgaaaactgtcaagcattaattggaaattggagacgcttgttggttgatttagtcattcctcacttgctcaccaagcactctttatgtgccaggcactgtgctagacactgggaatagatgcacttctgtatttaaggagctcaagacaagacaacaacaacacaaacaaataaatgttagttcctttctccaacttactttcctattcacatttaccccaaaagtaacaatataattagagagactgagaggaaacacttaagaataaaatgttaggtgataaatcagagatgcacacaagaaatcaagaagggggaagataaccctgcctggcaagggatggctccgtgaacgaggaaatacttgaggtccacaaggaatatcacactttgataataacaaaaaaaaaaaaaaaaaaaaaaaggaagagaagtctcataaacataggagaagcaaactatactttctagattctagttcaaagcaggatccttatagcaaaatgatttagagagtttcccaccattagttttttagacttcttacaaaaattatataagctttatggctttagtagtcaagatcaacttaccgtgatccaactaaaatatagtggttcaattagaagagcttcaaatatagcccagagtttgtgacatttaagtgatttcgaagttacagggaaaaatatgatggcatctaacttgagtcacttgaaaataacatgaacttcaaggaagatttattccaactgttgaaagaagcatatctcttgagtttctatgtcagaaataatgtttttcttgagaaggtaccaaataaattttagcagagattattttttaagactcttctctcatagctaattggtgatctcaattcttcaaagtagatctaatgaaaataatcaaacattttaatattcttcttggtagtcctatttaccttatctcggcctatcaaatgttgccagcctgattcctctggttaaataaattataaacacaaacattatttctccaaaataaaacacaatgacactgattcactaattcactttacatagctatacacaacttctgtcagaaatttttacaaaatctaaatattgcatcactactttactaaagaagcaattatacttttcaagataacttttttggtgggttttacttggagtaaagaatagcaattttggtttcttgatctatatatcaaacctaactgcaaaagatattcaagtagctctgggggaaccaatggggaaataaacattgcagtttatttcaaacattaatatatggaatatcaatattgtttcctttctttagtacatgccactattagaaactactgtcttcagtgggatgagtttgattggaccactgtttattctttctcaccgattaatgcttggacatattaagaattaggaattcatacagagaaaaaccatatatttagcctgaatgagaactacagagaaaataactatgatcatcaaatgcacagaatttatacatttctctatagatacaacaggagaaaaaggaagaataaataaaagaatccctaggaaaataaaagaaaattttccttaccggaataaatgcatgttgcatagcttgttcacattgttttaaggaagcaatagtatcccacaaaagctgataattctcagcccgagaaacacttggccgttgcatagcgaaagctggtaacactcaaactgagctcacagaacccagttgaagaggaaaaaaaaaaaaaaaaaaaaaaaccctgcagatctgttacataaacttcttaattagatctgctacacaaactgctatcttaagacttaaaaaaaaagttaatcagaacatttcttttgggggataactgggcatgacttgaacagagacagatgttttcatcgggaagaattttcattcctacacttgtgaaaagcaatcccatcagtgctctcctgtcttcacacgggtctggtgaaatggcacataccataagcgtgtagggggaaagaagtaggaagaagagagatgtgaaaaaatattcctaccagaagatttgggtggcaggtcatggtggtggaatttaagtagcttgtgaaaagtagtaacattgaagggagtcggttatatacacacatatatgtacatatacagatgtcagcacttgtttgctgtgtcagaaatacaactatatacatgcatactcacagtgtcatttaatatgtccagctctcctctcagtttagttaagagctagatgtgacatattcttcacctacagagtattactgtcttaatggcactatgagttgtttatctgggattatctctaaagacaagccagaaggcatcataaaatgtaagagtaactagaagaactttatgttgcctatatattgaagaaaagtcacttttattccttattctagataaaatttacatagataatacaaggagaatcgtgtctttaaatgttctcgggaaatgagagtaggctggaatgtgttaattccaaagaaatatgcatgtgcacttcgacaacaaaaaagactcgtataagcatgaaataaaatatgaacagaatttagggacatattctcaattcccttcaccaaggacagtacccacacagggaggtgaggctccaccagtccctaatgtctctgtaggattgctgagctagaaggtgctaggaggtaaggcatcttggaaggtgatgctcagagcacttggaagttccaaaggaatccgtactctaagggctggttgcacagtcaacaatggtgatatttactcaagcatgtcaagaggtaagaggcaaaaggagagaaactcacagcataataaattatgcatttaattgacctagaaaatccaaggaagaccaaacaaggtacaaattgtaggaaacagtttgataacatacacgaaatattttccctgtattatttttggaagagcagcatgatttgggttacctagttttcctccatttgtaccctgatgatggtagactggttcatactaatgcccttgtagtgttaaagtctcaaaggctgacaccagggaagttttcctcttaccttcatttcttttcaattttgaactgaaggaatgaaaagtagaactgatctttcaaaatctttacctaatttgtaaattttacctaatttgtagggaaattgtttttccttagtacttcacgagcacacaccataaggctattgccattagacagtttgtttttcaatatcaattcaaccaaccttctctttttctcattcatggtgttctgttcagctcacacccacagtccctcctctgccttcattcctgcccttatagtctcccatctgccccagccacatgcttcttctccatgcattgtcgaccagccagcccacaactttcagaaaatattccttcactagtaaatgttctgaatttctcaggaaacaacaggaaaataaaaagctgtcttttaagttaccttccaaaatcccagtcattcctctctgaaattcttaagcaaatgcttatcattattccagaccccacttgctgggtcttgtgaggcttttccaacctcctgtttatcaggttcctttattctttcctttaaagagcatgtcctaaaaatcctcttctctttagtttttggggaaaaaaaggtaaagaattcatagtctttgtgtgtggaaacagttttaaaaac

SEQ ID NO: 914616 - DNA, 4001 bp, Homo sapiens
tcataggctggctggagcatcaaacacagatgttcatttgtatctgtgatgatttgctgaatctcctatcttaatcattattgctctatccagaagctttgagccaaacataagacattttacagaccccttgtggggcagccgcttgtggattagaaaccaagtctcaggttacacacccctaagtgccaaccacaatacatcactcctctgctctttaagcagaacttattcagagaaacggaaaatatggaaaagctatttatggacaaaagaagcatgaacaaaaaagtgttcctgaaaaaatatatattccattttcaaatctgccaagtttttggtataatcagaaagtatactaagaaaggagaaataactttattggaagtgtggtggtgccgataaccaaaatatttatgcaaaaaataaagcaatgagtaagctaagtctttggtgaaaaaaatgcatacatttttttcaaagagatgctaaaatgagttgctttctttgaggttaaagaggacatttgtcacatctacagattctacatgtaaagagaaattacaatagtgtacaggtaaacactttggacaaacaattatgggtttagaagacagtagctacttgccagtgaaataaagcaaatgtcaacaagctagacacacttgaaacatttgaaaaaaatgtccttgctactcctctccatatataatatgccatatgacaccagagttaaatctgctattgcaaaaaaaagtacgtcaagctgtcggtttccatgagatttggacagaggcaaaacaacacagcagagagtctaagaaggtacagctttcacttctctttccttctgaagaggaaatgacttcctatagttagctgaccaggagttagcacgcatcccgcctggagctaggacctggagcaaatacccggagcccacccaaatgagaccaaaatgcagcttcaggtaattgttaatggtgataatgaaactagagaaaacagccagccacaagtcatgcaaatacaacagtcatgccttctgcatttgtccgtcctgcgggtacgtcgtacagctctttccataacgatctagtcttttctttcactccctctcccacatcatcaacaggcacgccaaatgcaaatctcattggattctgatcccatcccggcaaaacgcaggactaccaccatactgagtttcacaataatcgccacaatgccaattattcacagcccctctgttctgttcacacaaaagattgcaatttgaatcttgccttgcacaggttcagctcagttggagctggttaccaggcaaacagtctgttttaagatttgccgattgctgaggagagtgaattagtggggtggggatggacaaaccaccctgtacatacctccttttggcagctaagaaaaacaatttcgtgacaaagagacttgtttttttcaaagctcacccaacaaatgaaactgatagaatgaaacctgagaaactttagcaaccaaagaaagcagccttccaaggatcaaggtgaataattgattcatcggcttttctttcatcttttaagctattttgctcgttaaaaggaaattgtggaatttgtcaggagcccaaacactgacacacacttctgacagcaagtgcctattccaaactatgggtacgtttgccaagcttattcaacaacaacgattagctgcaaagccaggaacttaccgagcacaaaattattggaacaaagcagggaggaggcaggaggcaccaaaggcagcttctccgtctccttggtgccaggttctcctgtctgctgtccggttcacacttgcctttataactaagactctgacagaactcactagcggaacctgatgaattataaaacagcccctcctagattctcatattttacatcacagggggtgaccatgcagcattctcgctcactgggtacatatatttccttgtaactcatcctgataaatatatcagccttagaagcagtgacagtaattggtgtttgggatgtaccactattaaccaataagatgctttcccaccatcagtagtgtacccccatcctctgctcgtgttcccctacaccttgttaaggtggatccacccagctcagtgaggagtaggcaaagacaacaaaatgtggaaaaagcccctgcaccaatgcacatacagcaaggcgtattactcagggttaaagctcttaatagtaaggatcaactcctatatttgcatagcctgtcacagtctaccaaacactttcactctcactgagtctctcagtgactaaagaaggtatcaggagtgctacagtacagatgagcaccagagatcagagagactaaatggctttatttggtattcactgaatttatggaatgcaaggagtcctagagattagggagtcctacccccttactgagcagataaggaacccctggcaagaaagataaagtgacttgcccaggtcacacaaagtgtgatttgaacttgaacccaaacccaggtcttctgatggcaaagtacagtgcctttctattctaccatgctgcctctggagcatgaaagcccagcaaacgagaagactggaaatcataaacagtactgttgaccaaaaatcattaataggcaggcttcatggggagcagtgcctgagctttttgttccctccctgacaaggtcagtttaacctttttaggttcatcgaataacagcactggaaaatatgttttggataataatagctaatatctattgaacacattttaggtgccatgcagtattctaaatgcttagcatgtattgactcaatcttcaaaatgtccctgtaaggtaagtactatcatgagcaacatattgcagagaagaagctgagattcagggaggtcaactaatccacgcaggatcatatatctgttaagtggcagagctctaatggactccacgcaatttagtttcaaagcccagactcatatatattatctggccccaagtagtgttttacactaaactgctagaggcagatgaacaatgagagcagactgatttactatggcctttagtagaaaggataaaaagataagttttgaaattcaacagaattgtgtttaaccctgtctttgccactaatttactaaaacgcagattgttttatctgtaaaatgggtatattgaaacgtacatcacaagactaaatggagaatatcaagaaaatatagtgcctagtttatagtatgtacccccaaatggttctcattcctgccgtatttcctttgacaaaatgaatttctgccacaccttctccctcaactaccttttaagatgttaattttactgtgctaaggagtcttctaacctgccagtcagtgaaggggaaaaagccctaaagagacctaacatctctctaccagagatgggctttctataagagaatgaagggcccagggctctgtgctgggctgctggcccagctcactagcttctctctgctttacttccaccattactcaaataaattcatcagcccaagaaagcaaatttgcaacatgtctgctatccactgtgagaccatcttggcttctctcacccttttcaaacaagctcctaccacaaaacccataaaaacaatgaacttttatatgtaactatacacttacagccactaagtcatggtgtgccaagcaggaagacaggtatctctgtcttgaacgttccactgctaactcctaccgtaagtcagtataacctagtatttggccactggtgaggtctctatctgatgagctcctcccgatcagaaactgctatcttcaaggtatgcagtcagcattccttgagagccatcagaagtaaccctctgtgggacaaggtgatgctgtaatgttgcaggatatgcaggtttagacatgagagattttcttagctccatgtttccagagaataactctgtggccaacttaatttgctcacatac

SEQ ID NO: 914617 - DNA, 4001 bp, Homo sapiens
aaagtatgttacatcttggattaaaataattgcaacaataaagcaagtttgctttctctgctctgtgcaacaaccataagctagatgctattaagtaggcttgcttcctagcctatgtgagccttgagaatttaatgtaatcaatacagagatataagctaaagacatttaaatgaatgtatttgttaaagagtatatacagtgttcacaactgttaagactttttattcagtttggaattcatgttaactttaaataataactgcatttctaaatgtcaacttctattttaagccaaaccagtttaataataaaatggtaatgtattttttatttaaatcaggaggctgagatgctctatctctctaagcaaagcttataattccatgcaaatcaatcaaaggccatatatatggctatgcatatgtaactatattattaagaccagtgataaatgacattcttggaagtactttttaaaaactattattaaaattaaaatattctctgcacctgtcaccataacattttatttatgatcaatatctacttctccactatgctaaaatcatattaaaattgagattgaatttttctgcaaatacagcttttcttcaatacatattaaacagtcattgttctgtatgacagtgactacaggtgtattttatttatattttacagcatttgcaggaagttattttctctcctttaaatgaagagagaaaaaaatgagccaattttatttctgataaaatgatagtagtctgggggctagaataacctaggaatcaaattaaaggtatctgcacatctgctttagaaatgcgttatagaagaaagagagctatagatgttgatataaacttattgcttctccatgaataaattaagtgcttaattcttttattctgagtttaaccatcctctgttttgctcataattattccttttctttgtaaaattaattatttagtgtaaataattgttcttctccataactgaaaaggcatacagtattataagagtaaaattagaatagcatacttcaaatcactgttttctatagctaaagaaacaaatgttcttttgcctttaaagagatggaaagtttagttaaaatttattttttctctgctctttaaaaaaataataataaacaggcaggacagaacaaaagttaaaaatgattagaagtaaaagggctgctaaaagactatgataaaaaataatataacctgaggactagagaagttgaagaaaagtcagtgaaataaactgagcacggcatccctagactttcacaggccaccagaggtatgagcccacaaacatgtgtgaaaatgacaggtttttcttggcctaatattttacatacaggcatacccgtggtactctgcaaagtttccaagccattctaaccttaaacaacttgctctcactttcttcagacactcaagggaaagtcataaggaaaaggctcacctgtgctgggctgaaccaaccatgtgggcaggtacaatgctccccacaagtccctttgcccttggtgctcgtcttgtgggggcttttccgcacactgtcccacaaggtcctgttgaagctggaccccccggtcctgtttgaagctgggccccctggtcctgaggagggcatggtctgagaactgtacccgagcccctgacagttcctctgccagccacaagcacagtgggcatccctgatcagggtgggcgcactcctgacggcatccatcccatcggacccccggctgcagctgtgttgcttggtgaggtatgcattcatactgcactgatgcctactctttcctttggtcagctctgcacagaaatgtctcctccctcacacccctttcttccagccagttgtaaaagtcttttttccaccgtggattcctcagtatctttgacagctgctataagcagtgcatcgtgggagcagtgggagcagcgacagcagctccgcacagcattatctgcgggctggtagctctttgtcaatagatgactcaactcacagagcaacttgacagtatccctgctctaggcagaagcaatcaatgctccacacagctgggctacaagactgtacactgtgttacaaaccctttttggatggagccctacagtaaagaataactctttgctgtttggcattccggcttttccctttccttgccgatccccacacaaaatacaaaccttaagaaagagaacttattatgagattcttatgagattagtaggacccttctttccagaaaggatgcatctaggcttaaactttatagcataagcaataaaaaatgatgggaaagttaacctgtaaaggaattttcaacatttataagaatcacttatctagagagagatttgccaagacacagacccagtcatgaagtaactatataagatcatcaatattaactctgaagaacataaattcatttggaaaaatcattgaggtcacaccattatactagagtctcttaaaatttggaagtttgttttaaatcacgattatgcattttagtccaaacatatattctttatgctatacacgattattaattctttcttattcaaagcaaggcagttttcaaggtttaaaactgatgggttgggcttattttaaaacagtatttttccttaccccaaattattctgagggtttcctttcaaatactttaccataacaaatacattcaccacaaatagagtctgcgttttaaagtgaaagatgcatccaactctgccatacagtattttggtttccaaagacagaattttcaaattctttcactgaaaaatgagctaattttttctaacttaaagcaattgccttccaaagaggatttttgtgttaaattttagcatgcttgctgaatccatacatagtattttcagtgaagtgaaaggctaattgccataacattaataatttttattctgtttgaaactttccacatccatttccaaaatgtctatccttatcacacattactaaggaaataattttggtttaagtgtgcagccagttaccatccatgcagtacctaacaaagattatataatcctatgaaataattactttatctgtagaccatcagatgccatcaaatctaccttctcagtggattgaccaggtgctggggcagtataggcctgatttttgcctgagctggcaaggtgcttattgcaagggctgagatcatagcaagttctacatttgaacactaagactccctggataaatcactgttagacttaaaaatcttgaaagtaaggagtaggatcttctttgtccatgtatctccatataagggtacttttccaaattctgcacaaggggctgatattagcattgtgcccatcacagaaggtattcaaaacacgtttgttcaataataatggccagatatgtaagtttagagggcaggttctggtctatgttaatggccatttttctctaagcacctttcacaccgtccaccacaaaacaggcagtaaatacatacatatgtttgacggatgaatggatggttgggtggaagtataaatggaaggaaaaaatagagaaatgaaggagttgatacacatttttaaaataataatatttaattcagcaatgttctagaaacataaactattcctttaaagttaaatttagttctggtgttgaggtattcttgttaaggaaatttgtcaaaaatatatgaaacttgaactgttgggcagaaataacaaaggcattaatagtttttgccttcttaaagaagatcaagaagttaaaatcaatacctgaagacagtgacgaaaagggagaaaattatttctctctctctctctttccctccctcccccctttttattttagatcaatagattatacctgaaagaactgttgggtcgaagaaaaccctagagaactttaggcttttctggtataaccatgatgcatggctgtacagtaggatttga

SEQ ID NO: 914618 - DNA, 4001 bp, Homo sapiens
tttattattcaaaagtaatctgaatttagttaagatattgttagtgaagcttttattactttgcttatgaatttaaatgagaaaaatgtaaagctaaattcataaagacgactgttagtaggtaagagtaaaaagaaatttcccaaagcccattatgaaaggaactttggacttaagttttcctgcacttccaaaatataacaatgaaatagcaaaacaattgttatctctttatctaaattatttatggagcttccgctgaataaagtacttttctcctttcaaaaagatgaggagggaaaacatttacaatttactgagtttacaaaacaatgcatgtcatacccatactttggaacagaagatgataatagagaaaatccaagatgatatttgggcacacttttcatatttttaattatttttttcatgttgtttactgtctacatcttatacatggaggaaaattgactgctaaagttcattttaaaagtagtaaaaagcaaattctatagaactctgcaaaatgatccacagaatgcttccgggttgtagttgtaaaagaattggtcatcaaaacataaatacctacctgtttgaaattcaaatagaaaacagaaaggcttacaaaagagtgagcagcagggagttctttaataaaacttgcaaacacagaaaatgaaactttagtacccagacacattaaaacactcccctagtaaaataaaaaggggaaacactttatattgactttaaaaaaaaaaaaaaaagattcctattttaggttgtcttaactgcttcttaattattttttctcaaaggcaatcactttccttttggacttctttctccaagaaatgtaagcttaaaatgttaaccaaggatgtaattcacttaaattatgcaactggaattccacagctggtctggccggctcagtgctgaatgaacacagtgtcagaaaaccttctcaataataatgccctgttcgtgacaaggggtaaatctcccaaacttgggctcaacttcagaggctcattagctacagcaagtgaatgtcagtggggtgacaacagcgggacagcagcgcccacgcagctgaagcaaccagcccacccagagctgacgatttgtataatcagtatcaccaatttccagtgaaaatcatttgttgatatgcacaggatggtcaggtatcccacagagcacatctaatgccattacagtcactagatttaaccccccggctcttaaacaattcagctgcaagaacacaggaagctcacagcactttttaaaagaaagacaaaatcataattcaaagcatgctttatagctttttaccttctctgatttcttggttctggcctacctaaataattttcatcttttcttcccccctctccaccccccaactatgagcgtgaacctgaattacaaacagttaaacctgaaggtcacttcacagcagcgttccaacatgctcccccagcgaggctgcacggcaacaataaaacaaagcctttgcaaccacctgtaataatctgcctgctcagccagcaatccgaaaagtcctgaagctacacaaggtagacattttctgcagctggtttaacatgtatattgtgcccagttgccggctcgcctcctcttaccttcacgttagtccggagtgcacagtaacatgcaaagaacattgcagtaaataaggagcatatggaccggtattcagcttctcagcacagcgcaagccccacacacacgatcctgggcatgtgctactaaagagcatccgttccctctgtcagtttgaaaatgcattgatctctgttttctctgactacaaaacgacatgtcttgaaggcactgagtgagagctcaaaatctcttcattggctatatatagcattatgcccagtaatttcaattagatgagaattcagcgtctgaaagttaagacctcagttgcttttccttctagcattttaaatcactggattaaaaaaaaaaaagaagaagaagaaggaggggggaatgagctcactcaggaaggagggggggaaaggtgaagaattgaaatttaaccaatgagttacttatatttctggagagccccggtgttatcctattaaatactttacaatgggatcgcatcgcagactgtaaatgaagaggaaacccttcttcctttggaggtttaatatgagctctgcactatattccaggctattctggtgcagcaccctgtttggcaaatactacaaatcaccgcaagcatgtctcattctgcttctccatgtggaacaggaccaggaccagaggatcattgtcatataaagtcccctaaaatgtgaactgggttcctctggggtgatctgtggttaaaggactgagaagtaccaccttctcctacttccctgccctgttacatcttttagagctatctaaagttgccagactccataataaaatgatgtggccaattttccaaaactatgttttattggtacatgacaatcagtaatgagatggggttgaaatggagacagaagatttcaggggataacataacctcagattcagtagcaactgctgctgaatgtaaaatgttcagcaggctccagaagggagagagcaagagagaaaaataaaagcttctgcccctataagtccgtaaggaaaaaaaaaaattaaaaacatccgtcagatccttctatctgttgtcattcctgtcaggcaccggatgctgcaaattaactcaatttttacttaatcaaaaggacaaagtacaatttagggtgctatacccttatttccagccttgggaagccgattctcagctagaattctaaagctatctggcaaaatgcaagcagaaatgaacagttttcactgcagcaaaaatagtgggaggaaaaaaagtggttatgtctttgccacgatgctccccatcagcttccagcaacaaggaagatcagcataactcactagaaaaagctgcagtgacttttaggatctttctttaatatgctttgcataagccacctcccctctggagcctgcagaagtgctgaagcaccatcagagttactgggcatttctcctgggcaatgaggtgaggcagcttcaggaggaagaaaggtatttcagggagagaaattaaaggaagaagaaaagcaggattttctatttctctcttaatgacaagcattcagaaagtgtcgtcagttctgactaaatagctattttgggctgtcattgtttgtgcctttttttaggaagaaaaaggcagtcttatcctaagctggagatccttgggcaacgtaagagaaggcagccacttattttgatttccagttccgtctgtcttaggagcctaggtaatttacaaattataagcacttacaacacaaccagtgacttccaggacattaaaaaatcgacatggatgcccagctctcatcattccacaactttttctacggactttaaatgcaaaactgagtatttcagttaataacactttcccctcccaaggttatagcaggtcacatttcctgcagctcttcctaataaatgaacccaaatataacaactcaatgccatgcaaaacatagaagaacttaaaaatgcctttctccactgaggattcagaggaacttttaaaaacctactttattcaacctgtgaataagtaccatttttttccattagaagctgggaaaatgaaatttacctattttattaatattattttagtagttgccgggatatttggatggcccaggagagagagaccaaaaagaactggaaaatgttacaaatctcagaacagctcgcaagcaaggattaaatgaaacaagttacaggtgaagaagtacatgtaggtttccctgtcaaggctatcagggaggacttctaacagggctttagataccattttaatgtgtatacatttttttaaaaaggcccttagccttaaaaacttctttaaaacacct

SEQ ID NO: 914619 - DNA, 4001 bp, Homo sapiens
ttgattgagttatcctggactcctcttttcttcaccctccagtgatccacttaattaccaagtccattccctcccctttctctggcctcatcttttgccttgattaccacgaacagcctcctaaagggtctctctccttccaagataacttccacagccccccatacttcctcttctgtaacactcatcacagttgtggtgacttattcaacatctattcagcaacaaaatctagctgcatgaggtaagggagtgtcgatgtcggattccgacatttatctccagctgctaccactgcagcaggagtgaagtaccctctcaacccttgtggtagacgctcaataaatatttgttaaaaaaaaaaacatgtttttggccaggtgcggtgactcacacctataatcccagcacttgggaaggctgaggcgggtggatcaccagaggtcgggaatttgagaccagcctgaccaaaaaggagaaaccccatctctactaaaaatacaaaattagctgggcatggtggtgcatgcctgtaatcccagctacttgggaagctgaggcagaagaatcgcttgaacccaggaggtggaggttgcggtgagccgagatcacgccattgcactccagcctgggcaacaagaccaagactccgtctcaaaacaaaaaacaaaaacatgttttcagaaaaatgtactgactcctgttgtaggctttcttaggaacgagccagaacgtccttaagatccgatggaagtattcaggaatgtagtttagtcaatgctgaaaacctccatcatggccagaattgaatttaaaacatccatctggcctggccactcccttgttcacaagcctctggttctccataatattcaagataaagttcaaatggctcctttgtccccacttcattgctgggaaaagcaaggcacccaggagaggatatagggcatggagcataaagggagatgggttgggagcagattgaggaactaaagagttcaaatttccaacctgggccctgacccagaccaaagccaggatacaggtatgcaagaagtgaaaggaggaacaaggtttaccttgtctgcgctaagctgtgcaggaaagctcgttttggaagagaagagggcagggcctgccccagcacacccctaaggcctggctcccaccccaacttacgcctgcttgatctgggcatcctctgaattgcgagtgatcccgagcacagagtaataatcctggcccatggctggctagctggcagtcaggccctggatagtcctcagactctagcaaggctgttagttggcttccttggttgctcctgacaaccgcacaggtgcactctgggagttgtagtcccacttccctaaacaaatttcagctctgccacagagaggagtcagtgaaaggactgggggagagctggggctgattctgcgaccctgtgaaaggtcactcaactcggaaattgaagactcacagggctctgttttattttgtttttgtttttaaagagagcagtaattagttttaataaaaaggttttagaagaaatgcatttggctaattttttaaaaatacatttattttagaacagttttagagtttagaaaagttgagaagacagtacagagagttcccatatacctcacatccacattctcctattttattattattattatcattatcatgtttttgagacagggtcttcactctgtcacccaggctggtgggcagtggcaggatcacacctcactgcagtctcaacctcccaggctcaagggattcttccacctcagccttccaagtagctgagacacaggcgtgcactaccatgcctggctaatttttgtatgttttgtagagatggggtttcaccatgttgcccagactggtcttgaactcttgggctcggcttggcctcccaaagtgctgggattacaggtgtgagccactgcattcacattcccctattattaacatcttacattagtatggtacatttgtcacaaataatgaccaatattgatacattattattaactaaaatccacattttattcagatttactagttgttttaacctaatatcttatttctgttccggaccccatccaggatgccacgttacacttagctgttgcatctcctctggtgcctcctgactgtgacagtttctcagactttccatgtttttgatgaccttgacagtttaagtaataatggtcaggtgttttgtagaatgtcctgcaattggaatttgtttggtgtttttctttttgtttgtttgtttttgttttttgagatggagtctcactccatcgcccaggctggagtgcagtggcacaatttcagctcactgcaacctctgcctcccgggttccagcgattctcctgcctcagcctcccaagtagctgagattacaggcatgtgccaccatgcccggctaatttttgttatttttactagagacggggtttcaccatgttggccaggctggtctcaaactcctgacctcaagtgatccacccacctcagcctcccaaagtgttgggattacaggcgtgagccaccgcgccagccctccttccccacttgctgtattgcactctttggaaggcagtcactgtgcggcccacccttacagtgagggagttatgctccacctctctgagtacagcagagccctgttttccatgcacatcccaaatccaactggtcaccaagctcagtccattctgcttcctagacaacctctcaagcccagctcctctgctcttcctcctcataatcagggcccagctctggattcatctttcagcaagaccacaacaacttcctcgcgggcctgcctgccttgtctctgttctgcaaagcccacactcctcattacttcgagtgaactccaaactgcttaccatggcacacaggccctctgtgatctggtgcctccctttccacctgagctctcaccactgccctacacgcacccactgcttgtcagaatggactgcagtgcctgccactgcccaaaccagccatcccctctcctcattcacctctgctgctacctctgctcagaacctcccaccccacccaccacagaccctcgcctcaacccagctaacttctatttgttttttcttcttaggaagaaaaagagcagcattagaacattccttgttgaaggaatattgccccgatgtgcccctccctacctgtttgtaattctcttgcttttctttagagctttactccatatgcctgtacccagtggtgtgctgttttgtggcatttgccagttcttcccaagccagtacaagccagctccagtgccacactgcaaatatccacagcaacatatttaccttttcatatttttgaactttatataaatggtatcatttatacaaatggtaggtatttgtgtgtgtgacttattgtcacaggctgtatagtactctctgttgatgaacatttgggtatatgcgcccactttgcaaggcaatgccaaagttttctggtgtggttttctaatttacgctggcaacagcagtgtatcagtttcttttgcttcatatccttaccaactcttttttttttttaagacagggtctccctctattgcccaggctggagtgcagtggtgcgatcatggctcaacctcctgcagcctcgacttcctgggcttaagcaatcctcctgcctcagcctcgcaagtagctggaaacccaggcacacaccaccacatcaggctaatttttaaattttttgtagagacgaggtcttgccatattgtgcaaacaggtcttgaactcatgggctcaagtgatccttccatctcagcttcccaaagtgctgggattatggacatgagccaacactcctggccctcaccaactcttgatgtcaagttttaaaacgtttgccaatatagtaggcataaagtggcatctcattgtggattttaatttgcatttcttggttgagt

SEQ ID NO: 914620 - DNA, 4001 bp, Homo sapiens
aaaaaaaaaaaaaaaagtcaactgataattagtgtataaatggtctaaatcagcattacccaatagaaatataatgtaagtataaatgccggctacatatgcaatgttaaaaaagtaaaatgcaagagaaacaaactttgatatgtgcaaatacatgcatgcatattatgtatataaaacacaaaatagccagtaatccaaaatatcatcatttcaatatataatccacataaaaactgtttgattattaactacaaagaattatcagacagggagtttaactgtgataagtttattaaaggatatagtagaaacagtggacagtatgtataaaaagatgagaaagagatagaaactttaaaaaaggagccagtagaaatgctagatatgaaaattaggtaagagatcaagaattcttttaagaagtttatcagcagatggacacagtagaggaaaaataaaaccagtgaactttaatcaacataatcaacataaaaattgttaaattattttaattccttttaaatactgtctttaaaatccagtgtatattttacccttacagtccatctcaagtcaggctagccacacttcaagtaatcaacagccacatgtggctagtagctactgttgtttattatgtaacaacacttctaaatattttacatggattatttcatttaatcctcccttggcacatataagaaaaagtaacttgtccaaattctcacagataaagatggactcaagattctaactcaagcagcctgactcagatctcctgctcctaaccatgcttttccacctcaaatcaagtttttctgcaatattactgaaatgttcaattaaatcaaattaatacctggattcctgccactggtatcctattttctggaaacctaaatttgtggtttcatataaaaattgatttttttcccctcatgatttaaaatctgaaagaaaagacttaccattaatatgagtttttgatatttttgttttaggtctgatatatttgcagatgggtctgctcccaggatgctgtaccaatccttttttggcatctgctcaaccgccatcatccatggaaccagaagtgggccttctcagattagctgaatagaaatattaatgacaattcatcacagtttgccatgtatctaagaaaaaattaagtactgcccttgtaaattctttagtatttagtcgagtaaatcatgattataatgcaaacctgaggaagcacagattttcatttaaaatgccccaagaattccaggtataagtgtaccgacaagtatggaaaacgtgttaggtatttcacgatatatatttatactttaattaatgaacagcattaaaaaaaagaattttataatgaaccaggtggtgtatgaacctctaagaaggtatttctgctagtcttatgataaaactggcacacaagtaagcacccactaaacacgctggaggagcttaatgaatatttacaaaatgaacgaataaaaaaaaagcaaaacagaacatcaaagaattaaaataaatttgggggcattccttctgaaagtttctcgtttgcttttcctccagattgtctggagagcatgatatgggaaataacgtcagcaccagctggtagagaacaagagtcccctgttattggagaggcgctgagacctcgcaaagacagagtgaaactctctacgcgaggatgccccagtcttccacgctccagaagagagaccctaccaggagccccagaaatcaggcaacctcttcccacagctatatacacttaacgaaacagccggggcctcctcaagctcgggacttgggaatcttctccattcacagtcggctttacccacccagccattggcgggcaccctctccgcgctttatacgacatcagacctacctaacttcacataggcgctgctacccactcctcgcctgctgtcggccagaactccggaccggcttcttcttccgccggaagtcactgttccgacgtgttcgcgtttctggccgagctgatgtggccgtggcacagctcagaagcgacgctccgcccaccccgacgcggtctctatggtaaccggtcaccgcttctatggagtggcgtttactaccagtaagttcccaaactgtgaagaaaggcgcctttggcttcgctctaagtctctcttttccgggccccgcgactgtcgcttctctcctcctcctcagcgagcaccccctcgccatcccaggctttccccgcctttttcaaagcttcctccgtttaccgtaccctgagctactctcaatcttttcggttggtgcttgaactctggggtgagagaggggtgcgggggcaaggatgtgagaaggatgaggagacctgatgccactctcgtccctacagttcctttacaatgttctaattcgaaaattaaaagaactaaaacctatgccaggtagggctagatgtgcgggggatggggtcggtttaattttttctgcagaagatattcgacgtaattattaatatttcttttagaccttagcaaccaacttacaacataaaaacgttccaaaattctttcacatttgctatttcacttcgctttcatttcaacccagtgagacaagtaaggcaggtgccattattcccactttatagatgaggaaagaaatcaaggatcaaggccaaacagctagttgggtaggggcagaacaaggactcagcaagtctacacattcccagggcagctatgctatctttcaagcttacagaaaaaagcagaatgaactgttcttcttcgaagcagttagggggcactgcatatgggcactgttggggtttgttattgttgctggtggtggtggtggtggtggtggtggtgtttttctcacctttctttcttctccctttcttgattcctgtgtttccttttattacttctttgtgctgcttactttacattaacacctcttcctagcattgtacctggagatgaaaactacatcttatttttggccagcatgacataaatttcacttggagatgttaaaatggttttgttgttactgctttgattttgctttccttcttttttaaacttctaccaatctgagtttgagaagcagtcaagataaacttaagcagaataaataaaataatctaatatgatcagttatttaatgatgttatgaactataaagaataactgaatgaaacaagcaagtttaaaaatctaaagatgaaagcatagattaggttctccacagggttttgtcatgtttaaaggcagatacaaagagcatctggttttagtcctggctgcatcatactttcttgtgtggcctcatgaaaatacctaaagcaatggaattaagtagtgtggtgaatgcttttctaaacagtactgtcagaatgatgccaccttgaacatctctagccctcaaactcccttctgtccacagcttggttcttccttgtgtaggtagatatgctccggtactccaggttttttgttttttacagcaaaagcattttattttgatttactatttattaggttattgtgttaccttatttatttattggggtttggaaagtaagaaatagtttttttccccagcaataccaaatattttgtcatttcatctctacatactttagtttgcatccctaaaatgtaccaactttttcttttatctccataatgtcattattggactgtcacataatatctagaccttacttacatttccacggttaattgaaaatgtctttttctggttggtttgcttgactcagaatcagacaaaatgtacactttccatttagctgttctgtctcttaaatatcttttaaattatagcagtcccatttcttcactagaaccttgtttttttctttacttgccattggcttactgaatgagaacagttgtcttacactctgcttataccaaaataaacttcttaaaacaatttttacataaatttctgat

SEQ ID NO: 914621 - DNA, 4001 bp, Homo sapiens
gccagagagcatggactcctgcttcctcctgtgttcaagccctccccacctgccagccccctgcattcaccatatgccctggtccaggtttctcaagagcaggcaggcaggtcaagaaaaccaagcccagcccatcagacaggacccctggctcctgcccacagcctttcccctaccattgagcacctgccactccctatgagggctgaaaaaatgtggcacccgccagagatgctggtctactcctgggaatttgaagcacacccccactggctcaaagttcctgctccccctccccacctcaggggtacgggtacctctttggacttggagaagaaagctcgtttaacttcctcagtgctggcaccaggatgcacccccaacagttcataataagtactgggtctggacctgtggacagagtcccaaaccttgcaggggctgaaggaacccagaagctagctctgccctgccttctgggccacacccttcaactcagccaccaggagctgacagggctgaaacaggtcccaggacagatctgtctccagatcagcaccccctttggagtgtttcaggcatagtgcaggtcaggatttctcaaagtggagtccaaaaacttgttggaaaaaactgattcctggacaggcgcggtggctcacgcctgtaatccagcattttgggaggccgaggagggcggatcacctgaggtcgggagttcaagaccagcctgactaacatggagaaaccctgtctctcctaaaaatacaaaattagccgggcgtggtggtgcatgcccgtaatcccagctactcgggaggctgaggcaggagaatcgcttgaacccgggaggcggaggttgtggtgagccgagattgctccattgcactccagcctgggcaacgagcgaaactccatctcaaaaaaaaaaaaaaaaaaggaaaaagagaaagaaactgattcctgacccccacccaattgattcctccagttcagaatctccagagcagagcccaggaatctggattttgtacccgacacctccccatctcccaccccccacagagggttatgcacagtgatacagcgatgcttggaaaccactagagctgtggtaagagcgttgggtttgacctggactcaaacttcctcctctgccgcttaaatcggtgtatgaccttgggggtcttctctatctctgatcctcagcagggaaggcgagggttacctgagacaaacctgggagcctcctgacacggagtagagaccacaactaactcagcacgtagggcaaacagaaacccattgaacaaccgggccggccccccgcgcccaactcaccgctgcccggcggccgctccgaggagccgggagggagggttgcggggccacagccggcacaggcgcaggggcagtaagggcggcatggcggcgggcgggcagctgggaaaggaggctaccaagagcgcattggaccaggatggggctagacttcaagcacccgggggcagagggaaggggcctggcccgttgttctgcaaaggaagactgaagcaggcccggagagggggcggttcttgcccaggaccagacccgcgtgtccttggacctgccccttcctctgacccgggcatccgcagcccttcccagcgctggcttcggggtctggccacccagccagggaccccaagaccccgttcccacccagggaacttggggacgggagaaggaggggccacaaccaggccccgcccccgctgctcacagacccgcggccgtcgccatttcctgcgtctattcaggccccgccctcacattctcattggcgtggatgccaagaccacgtccacctgtcaggaaaaaaaaaaaaatcggtggagaccccgcccctacatgtctattggcctttggtgcctccggtcccccagcctgcggactcgctggacaggcgcgggcgcccacctggggagcgggcgggacagagcccgctctctgcggctttgtgacgttttcggcccggccaccgtgtctccgttccgctgttgctcccctctgcagcgaggtatatcttacggagctgcttccgccccggagcctctctggagccagcaaagaaagggaggcacagttcttatcccctgcttgcagagggggacacaggctgggcgggtttttttttttttttttcccaagtcacttgtcctgccttacacactcagggcccattgctcctctctgttacagaaatagcagatgccaacggaatccaagaataaagtcgtttattattttcagagcggcgggagtagggctggggaccctagggccgctccagtgggacttccctgaacccggttgtagaggatgatggcgcctttggccgaggggcagagttcagcccacatctccgtctcgagcaatctctgcacgttctgtggggagacaacgagacccaggcattcaagcttgccacttctcctgccagggctgtgcccagaattcctgagcctcagagacctctgcactgtccttagggaggcatgttaaggggctgaacatgtccctggacctttcccttgcactgagggcaaatcttgtgactctggagggaattgtgacccagccaacacctcccctacaagatatgcattgccaggcctctgcaggccccagccctggcctccaagcaagatggtttgtcactctgcacctgtgtctccacaaagaagattcctgtagactcgtgggcctcgggtcccccactcaggtagtgcttcctcacctgctcagaagtcaggctgcacctggacaagaacacaagggtggcttagtgggtgaccagcccctgcggggtacctgtggagccacagctgcctcagcccactcctcaccacccaccttcccaagacccaggatcatgtacccgagcctactcactggacatagaactcggcactggctcggccagcactggtctcatttcgggcgatgcccaacagcaggggctggctcagggtgagcagcggcaggttcacctgcggtggagggtggggtggggggaggtcccacctatcaatgccactgcccacatccctgcccgtctcaatgaaaaaccgcctgttacctgtgtacagcattttatagcttgtagatcaaggacccagcattacagaatgtcagatgatgggcatgtttgttttacaggtacaccaaaaccagagagattgaacacgttgcccaaggtcacccaagagaagtcaatttagtgactgggactcccacttactcctttttctttttttctttttttgagatggagtctcgctctgtcgcccaggctggagtacagtggcacgatctcagctcactgcaacctctgcctcccaggttaaagtgattctcctgcctcagcctcctgagtagctgggattacaggtgcacgccacaacgcctggctaattttttgtatttttagtagagatggggtttctccatgttggccaggctggtctcgaactcctgacctcaggtgatccgctggccttggcctcccaaagtgctgggattacaggtgtgagccaccacaccctgccacacttactcctttttcttttttttgagacggagtctcgctttgtcgcccaggctgaagtgcagtggcgcgatttcggctcactgcaacctccgcctcccgggttcacgccattctcctgcctcagcctcctgagtagctgggactacaggtgcccgccaccacgcccggctaacttttggtatttttagtaaagtcagggtttcaccgtgttagccaggatggtcttgatctcctgaccttgtgatctgcccacctcagcctcccaaagtgctgggattacaggcatgagccacggcgcccggccacttactcctttttcaacagacttggggagtaggcaagatatttatcattgtttccattgaaaagaagaatccttggcggggcaaggcatgagaatcacttg

SEQ ID NO: 914622 - DNA, 4001 bp, Homo sapiens
aaaaataattaaggagacttctgacatcatctaagaaaaaaacctggaaactgaaaagtcaagctgttattctaaagctttggctgcctcatagctgacttctgattttcattaatttctgtatttctctatggggattaagactaacaccactgggtttattttgcagagaaaaaggaagaggaaagtagcctcacactagctttgtgtggagttgggctaatccctgtgataaacagagagctggatctaaacttccaagtgaccccagaggcacccataaaacagcaactttttctcctctgctcaagccctagactgagtccctcacttacctggtctcttttcttccaacaggctccacctctgcattgtcagtgtcactgctttcataccgtacagggatgtccgctgccagtgccaagggaaggagactaagtccatccagccacacagcctcttctagggccacctgagcaccaacaatgcccaggcagcgctgtagctcaggcagtgtcaatggtcgcagccaggtggccagctcctcctttacttgctgcctgctccactgggcctgcacaaaagggcaagctgggcatgggggcctgtgatggagcctccgcttctggggacagcagtcagcatgggaagcactgtctaacaaagagctgtctggaggaaaggcctggacaatggcacctagcaggtccagatggaggtgggtttggacccagggtgcccagcagtacagctgctccaggaagggcagcaaatcaaggtggccaactagcaactcacgatatggaggcagtagacccagtactgcatgaagatagcgccaagctgcagggctactgtcctgcaacacagctgagaacagagttcggagctcagctagcaggagttccagcactgtgggctgctctgactcagtcactggcttcacgaactgcctctgtttctgctggcaggccaagggctgttctttgctgtccaagacacatatggagtgccaagacttaagggaatcagatgatgtctcatcagaagacaaacctaccctcctctcctccgggaccatgaggagctgggcattcaactgctgtcgaagtgaccttgcccatagctcaggctccaactgccagttccaggatgccagatgcggggcctcacctgcatgggccagcccagcagaggggccagagaagggacctcaggctctgggcaggggatggtcagagtcaatggggttaggaggaagaaaggacctgggacagggaaatagatggagctacagagcagagccagaccagcagagagcctttcctgagaccctcaggccctccctactgcttccccaaagactctggtaaggagcaggcctaagacagacgtgagagccctccttgcagaagagttccttcttacctcccagtaccctgtccccctcacctggcctaggggggttaggaggcaaggcaagggaagagagcccgatctgctgatgaggtttcattgaagagtgcctgctggagcagtgaatgaacttagacttgagttccagtctgaggctcaccctaatcatagccacccatacacggagagactcgcacacagacgtgcaatcacctgaagaggcaaactgacacaccgacagagctcactctgaacctcggtcacagcaaggaatctgcactcgagctggcgatcgcctgaaaaacgggttaacaggtcgtcactcgaaggcagcagagccccagtcccatgacgtcttcgcccacagcctaaggaggtcgtgaagacagaaagccgaggagcaggcacagcaaatgatggtcaggatgcaggtaggggaagacgttaacaggcaaaggagggggctgggagagcggggaagaggaggcggactctgtgggagggggtcctagggaacaaagagaaatggatccggagccgaggactcacccgcagctccacccgcacccagctgttagaaccgttacaagattccagaaggaccgagtctttgccaggagcatccgggggagccagaaagaggaggggccagggtccgatatgggcggggccgagagggcagagcccaagcctggaggggcagaactaggttcaacctgtgggctaaggcttgcctgggacagggacctgtagaggaccaggcggggtctgaactgcacgtgcagtacggttgactcgggagactagcaatccagagggtgtcgtaagcaggtgtttatatccattcgctgagtatctaaactagtgccaggtctttggtatgtctttggtactcccccatccccacccccaacgtatccatctaccctatcccacctccccaaaagaagcccgaataaaacaaaatccttgatctcaaggagctcaacatctatttggcacggggggagggggattttttggggaagggcttatggaggggctaatttttaaaaattaagttgaatgaggccgggcgcggtggctcatgcctgtaatcccagcattttgagaggccgaggcgggtggatcacgaggtcaggagatcgagaccatcctggctaacacggtgaaaccctgtctctactaaaaatacaaaaaaattagccgagcgtggcggtgggcgcctgtagtcccagctactggggaggctgaggcaggagaatggcgtgaacccaggaggcggagcttgcagtgagcagagatcgcgccactgcactccagcctgggcgacagagggagactctatctcaaaaaaaaaaaaaaaaaaaaaaaagttgatgattaaaataaaaaaagaaattcagcccacctctcctctgaaatcagattagtatatccaactgcctacttaatgtctccacctggagagcttataggtatctcaaacttaaaatgtccaaaagcaggctcctaaccaccctttccccaccaaagaaatgctgctcctttcactgtctttcccacctcagtcaatggcaaatccattctttctggtttctcacaccaaaaccttggagtcagctttgagacctcttccaaaccccttctttctctttccctcttctttttccctttctctttctctctctccccctccctccataagtaatccttcaggaaattctgctggttgtgccttcagaatatatccagaatccaactatttcccaccatcttaagtactacaaccttggtctaagctgctatcatttctcacctgggtttttccacagcctttgaactgttctccttgcctcagatccttctcatgcttctcaccattgcccctacaatccattctttttagagcagccagtgatccttttcaaatataggcagatcctataactcctctgctcatagctcactaatgccccctcatctaattccttcagctgaaggccaaagtcctatcatggcctacaaattgctgataactgcctgctacctctgtaggcttctctcttcacattcacactctactactgctgtgcctgaatcacaccagccatacccccacctcacagactacatacaagctgtgctgtctgcttgtgtatcagttaggagatacacaagttatgactgttatttatttatttttttgtagagacagggtctcactatgttgcccaggctggtctcgagcctctggcctctagcaatcctcccacctcacccctaaagtgctgggattacaggcgcgagctattatgcccggctgtgatggttaattttatttgtcaatttgacggagctaagggatgctcagatagctggtaaagcattatttctgggtgtgtctttgagggtattcctggaagagattagtatttgaataggtagactaagtaaagatcatcctcaccaatgtggatgggcattgtacaatctgttgcctaaacagaatttaaacaggcagctggtggacttgctgttttagctgagacattcatcttctgtccatggacatcagtgctcct

SEQ ID NO: 914623 - DNA, 4001 bp, Homo sapiens
acagggctactatttttctttctcacttttaataaatctgcattgttatttgcaaagtaagtagcttcccttatcttctataattactatgcatattgcttttttcccctgaatttcccaaagtcatatatcaggccacacctttaacactcagacttctctctccccacccccaatcccacctaccttccaactctaccaggttgaagacaatgatggaagcagaaatgactagtgactggccagcctctaggccgttaattcctgctaggatattgatggcattggtacagaacactgccagcagccccatgtagacatagtacaggattcctgcggggagagatggtaggaaaagaagtagtgccacctaggggaggaggatttaagaatttttagaaaagtggtgaggacggacgataggatgaagggctaccagaaaggatctgggaagacacagagacaaaaaaggaacacttggaggagaatgtggagcaccaggaagggttccctgaagtaggtgccataggggcagcagtggtaggactacctacccaagtccagatgcaggccaagtatcgggcggaagggcttgggcaccacaatggtcgtgttgccaaagttggtgaaatagaccatgaggagaggtagtgaggcagctgtaggtagcagcagcttatggcgccagcgcagattcagtacatcatccgcaaagcccaggaagatcatgcagcagatggcaaggagggcacctatcagggccacaaactgggggaggctcgggcaggtccatgactcaagcctgctcccattccaccttttaagaattcctgtcttttctgataatttcttagcccctccccacaagcccaaataaccccagttctctcaggtacctcccaggtcccagccacaggcaatcacccccacgaacccacttacttcatggtgggggaatgccttacactgctccttcacaaagcagttcaggaaggggaaagggatgaagcagaagaggatgataaggaaaacagcaccgctgatcactccctgggattctgggctgtggcccagcagcaagggggcgagggggaagaggaaagggggcgtggtcactcactagtgcaggtgttacagtaacccaaagtggtcttctcattcccggttttttattctggtaagtggtgaggggggcggagggaggaaagcaccactgccagagtcccagatatacccaagggtccctacccatcctttccccaatgcgagtaagttctgctcatcacctctccgagttccaggctgcctgggttagttctgagtcttcacgtgtggtcaagcaccccggttcccgcccctgccctagccactccttccttagcccttgccccctgcccggacccgtgtgccgctgctcacatctgctgtcggctggttttgttgaggtcctgaccacagaggcgcgcagcaatgaagtggccccggaaggccgggatgagggtgactgtggccacaaatcccagcagcgagacgatcaaattgatcagcagcggcatgggcaattccgagaaggcccacatggtgaccggtcaggggcccggctccgccgcctcttcaggtaacgggcaagctgagcagcagtcctgaggcctcagcagtatggagtggccgctccccacaggcaggctcttcccacaccaatctgagcaaaacccagcaactctgacttgagccgccgtcgggacaccggggaacctctctaaggcaacctatgttctgccccgctgcacccgcctatctactgtttccgcccggatcttgttcgctgaacaaccattactgcggaaggcggcggccgccatttttaatatgggcattagagggtggggatggaagtggaagagaagtgtgattccaaatttcatcctatgttcaagagtagaatcaccgagagagtactggaaacgcaattaaagaaaggcagccaagaacggatacttccctaacattatgttaaagatgtactacccagagcggaaatgccaattgcccggttccaagatgaatgcctccttgtaccacgtgtctgacaccgctcacattccggttccacgtcagttttagctccgtccgcctccataggtcaagcttaaagggcccgtacctctcccttaatctgggatgcctccggctccaggaagatggctattgaaaggcagggggtggggaggagggacgagggtgtggagacgcgcctgtttcttgcaggaaacctgttgccaacatagtcggaagccaaggtaaacacaactcagttcccggaaacaaagctacgatttggaaggatggtgtaaattctaaagcgtagatccttgaaaagcccctcccactctgtttttcttgtcctcgattctggtatttttttctcagcatcccacccaccttctgccccagctgtagcagttagttgcccggcaacccagcgcagcacttcactgagggattgggagtaccctcaggtcttggatttaactcgagacttcagcttggccgtggatcactgcattgtacctagctcccacaaggaggagatggagatttccaggctgaggctctggaaagagctgaggagggagaggaatcagacccacaactgatttcctgtgagtctgaggaactcccagtcaggtttcttcctgtaggtcactgtgcattttgcttggcctcctgcaggttgctgtgcattttgcttggcctgttcccctgcaaacaacaattcaccagctttttttttttttttttttttttttttttgagacagagtttcgctcttgttgcccaggctggagtgcaatggcgcgatctcggctcaccgaaacctccacctcccaggttcaagagattctcctgcctcagcctcccgagtagctgggattacaggcagtagctggaattacaggcatgcgccaccacgcccggctaattttgtatttttagtagagacgggatttccctatgttggtcaggctggtttgggactcccgacctcaggtgatctgcccgccttggcctcccaaaatgctgggagtacaggcgtgagccaccacgcccagccagttcaccagcatctttattacctttcattccccgacaggctcttaggcggcaaatgatttccatttgtcagagaggaagtcaccaccagtgagttagggaaaggactccaatagcctagcgctttgtccactcttccctctatggcatgttccaggagtcagggtcatgttgaccgtttttaagccgaagatagtttcttctttccctcaaaatcagatgtgaggccgggcgcagtggctaacgtctgtaatcccagcactttggtaggcgaaggtgggtggctcacttgaggtcaggagttcgagaccagcctggccaacacggtgaaaccccgtctctactgaaaatacaaaaattagccgggtgtggtggcacatgcctgtaatctcagctactcaggaggctgaggcaggaggatcgcttgaacctgggatgaggaggttgcagtgagccgcgatcatgccactgcatcccagcctgggcaacagaggggaaactgtctcaaaacaaacaaacaaacaaactaaatcagatgtgaaatggcttttctacttgaaaatggctctaattaacaacaacaaaaacccagatatgtataaaatacataaattttcgtaatttacttgctagtattccaccagattttcagtacttatcccactgctattatttttctgtgtgtgttgtgtgtatgcacgtgtgccccttttaaactagaaactcccgggaggcaagtgttttctcttccacagggtgtccccatggggctaggaacacagacatctgtgtacaaggaaggcatcatcacacataatgaggctgaggctgaaaggaggactgagggcaataggtgcatatggagggagcaattagttgtgaccaga

SEQ ID NO: 914624 - DNA, 4001 bp, Homo sapiens
aagactaggcacactataatcaagagaagtgccatatctccaaatgaactggaagaatagaagccccttcttaaagggataattctgtgggagtacgtattaattgtgatctgaggccctgtgcagctagaaatgaggaggagagagttggtttctcattactggcattcaggaattagtggctggtgatgctcacaatctctacagtttttcaaagagaaacaagatgtcacgctctgtttaaatgggcaacccctcacttatgacacaacttgaaagcactggcaaccctatttctctgaggaaaatcttccaacacgaagaacctcactacgtttaactcccaaaacctaggcaagtctgatactcccccagtacaatgagaatcttcctttttatttttggagaaacctgtgtaaaacatccccttacaatgggatgagggaagtcaacaaagacgcagggaaacaaagaaagaacatctgagtcaggaaggataactggataaatggtagatcaacagtgtcatttctaaattgagaaaaatgtcagcctgaagaaagagctggggaaactggagtgggcagatcagagagaaagacaatagcgttgggaggaggggtggctgaaagagacagcaggatagagcagaaagcaacttaaaaaaaaaaaaaacaaaccacaagaggaggaaaggcacttagcttaatggaagtgggaaagcattctcaaagaaaaggcttcaggcaggagggagaagcaacttactctttaaaaaggctcttaggaagagtggggctcaggccacgacaaagacagatgagaagctgtgagtcccttagaagagttaccgaacctttacctcgtcatccagtcaaaatgcaaaaaccctgactggacagctagacaccactcaattttcccacccttgcaccaagcccaacatacccattaaaagaagctctattcgcccaccatgcattaacccaatctaaaactcattctgattcttctgtaggaataaatcaagtcccaaagcatctttaactcacaggaagcagttcataggccagcgtccatggccccaacagctattaactttaactttgcttgaaatctgaccagcacaatggtatcgtataataggaagaatgcccacctagatgcccctttaggctaagctgtcctgaacggcttcggtccagttgcaggtttttgatggctgctactggacggggccaaggcccactcccctgaagttccttcccttctggatccgctcctcgataaattcttcccaagaatatttgtagtcttaggtacctgccacccaagatcctcccaaacatcacggggctgcctggaactgaaacagccagccccgcagtgcactccgcaggggccgccgagcctgttgctgcagcgaacgggacgggacggggcggggtgggcggcgggccagccgtagggccgcccgggcctcggccccgctcctccggactgaggcgtctcgggagaggaccgggacggtgagtctcgcgtgcaggcagggcgccatgctctggaaaccgtcagccccgaggaacgctgaggccacacagccccgcagggatgccgcccgtcggggctccagtgtgcccccaccagggcctccacaagtttccaaagaagcgcaacgtcttctccggagtctcctgttgccctccccaccaggagtcgcaacatggctttcccggggatgtccctctctccgcctagtcccttcccccaccgccccctactcccaggccctttacaaaacctgccgccctaggagagaaagaaacgaccactcacagcttcactacattctccaccacagccgccatcttccctgttcctctgcctcgggccgagaagccccacagtccgcagcgcgcaggcgccgggaccgcaccggggtaccaggttccttgccctctgcgcaggcgccgtccgggcgcgcgcactagagcgagcactgaagaaagagctttacgcctgttcgcgggggccgggtaggaaatgcgtggaccccacgggagcccgacgcgcaggcgcaaccggagattggcatgcatcccggagctccggttcgaggcttgcctctaatatttagaggagcaggagccggggccgggcgcggtggctcacgcctgtaatcccagcactttgggaggccgaggcgggcggatcacgaggtcaggacatggagaccatcctggctaacacggtgaaaccccgtctctactaaaaatacaaaaaattagccgggtgtggtggcgagcgcctgtagtcccagctactcgggaggctgaggcaggagaatggcgtgaacccgggaggcggagtttgcagtgagccgagatcgcgccactgcactccagcctgggcgacagagcgagactccttctcaataaataaataaataaataaaggaaaaaaagaaaaagaaaaaagattagctgggcatggtggtgcatgcctgtaatcccagctactagggaggctgaggtgggaggatcacttgagcccaggagtttgaggctccagtgagccactggagccacatcactgcactccagcctgggcaacagagcgaggctccatctcaagaaaaaaaaaaaaaaaaaggaaaaaaaatatatatacatatatatatacacatatatatatacacatatatacatatatatatatacacatatatatacatatgtatatatatacatatgtatatatatatatatatatataaatataatcactaaagctgaaaatacacataccctatgacccagcaaagtccactcctggatatacacacaagaaagctgtacaagaagctgagtgcaatgcctcatgcctgtaatcccagctacttgagagggtgaggtgggagaatcacttgagcccaggggttcaagaccagcctgggcaacatagcaagatcctgtctcttaaaaaaaaaaaacaaaaaaaaacaggccaggagcattggttcacgcttgtaataccagcactttgggaggccacggtgggcggatcacgaggtcaggagatcgagaccgtcctggctaacatggtgaaaccccatctctactaaaaatacaaaaacaaaattagccgggcatggtggcggacgcctgtaatcccagctactggagaggctgaggtgggagaatggcgtgaacctgggaggcggagtttgcagtgagccaagatcgcgccactgcactccagcctgggtgacagagcgagactccgtctcaaaaaaaaaaaaataaagctgtacaagaatgttcgtaacaacattatttgtttatatttatttatttatttattttgagacggagttttgctcttgtcgctccttaacaaattcttccttccagcccaggctagagtgcagtggcactatctcagctcactgcaacctccacctcctgggttcaagtgattctcctgcctcagctttccgagtagctgggattacaggtgcccccagctaatttttgtattttttgtagagacagagttttaccacgttggccaggttggtctcgaactcctgacctcatgtgttccgcccgcctaggctttcaagtgctgggattacaggcatgagctaccacgcctggccagctgatgtaaccttttcttaaacaatcctaaaagaactgaaagctattgatgctgggttcataagctgcctttccaattatatgcagctagcctatttattattagtactatttttaaattcaaacttttaattgaaatatacataaagagaagcacatagatcttatgtagcttgactaatttttttttttttttttttgagacggagtttccctcttgttgcccaggctggagtgcaatggcgtgatctcggctcactgcaacctccgccttccgggttcatagcttgactaatttttttcaattttttaatttttgtgggtacatcgtaggtgtat

SEQ ID NO: 914625 - DNA, 4001 bp, Homo sapiens
ggtcacaaaatacactggtggaccatatttggtctgtagtccctaaaccttaaagattgactctaaggtcaggcatggtggctcacacctgtaatcccagcactttgggaggccgaggtgtgtggatcacctgaggtcaagagttcaagaccagcctgaccaacatggtgaaacctcctttctactaaaaatacaaaaattagccaggcttggtgccaggcacctgtaatctcagctactgggaaggctgaggcaggagaatcacttgaacccaggaggtggaggctgcagtgagctgagaccgcaccattgcactccagcctgggcaacagagtgagactccacctcaaaaaaaaaaaaattgattgactctaactacctagtattacagatggggaaactgaggttcagagaggctaagagccttgcctaatcccacaatggagacatcagcagcagagatcctcatctctaggctcccagcccaggcccctccctgcttccttgttcagtattatttttttaagacggagtctcacttagttgcccaggctggagtgcagtggcatgatcttgactcactgcaacctccgcctcccgggttcaagcgattctcctgcctcagcctccaaagtagttgggactacaggcgtgcatcaccatgcccagctaattttttgtatttttgatagagacggggtctcgctattttgtccaggctggtctcgaactcctggcctcaagcgatctgcttgccttggcctcccaaagtgctgggattacaggcgtgagccaccgcgcctggcctttgttcagaattctttacactttccactgtgctcacaaggataaagtgccaggccgccagctggaaggctcagcctttagccaggactcggccccagactcctaaaagtcaagtccattgcttcacttttctgtacctccgtttcctcctctataaaagagagaataaccccaatattaccaggtgggtgcgctaatcagatgaagtcgccctggacggaaagtatccacagcaataaatgattttgcttgaaactgtcccattctcatccctctaaatgccttttccttggccctccattctcctgctcgctccctgtgctccaccagggaagccacagaagttcacaaccagaagaaagcccattttacagatagggaaactgaggcttggaaagggcaacaatttactgaaggtctgacagccccgttggaacccggggattccccaacccggggcattctccccgccacgccccgtcccggctgggacagagtgtccagcctcctcgccctgccccggcctccagaagccccgccccaatagcacagcctcgaggttcggaaagggctgttaactctttgctccccggagcactccttggcctcgagggcggggtgaatttggagggggtactggagagtgggcagaaagggaacgattttgcgctcagtatggattcgccttggtcccccgggatgacacgctttgaccccaaaagcccaggcgccgcgcctcacctgcagcagctgctccgttcgcaaactcacttcctgcttccggctcccccattcattggggctctgcgaaccccgccccccttggccaactgcctggcctcggggtccggatgggcgtcagtaccagccaatagacgcgccaagacgagcttctcggctcgcccgctcccgcccccaggcgctacggggtggcgcgcggattggccctgcgggctcggccttttgtcagcaggccgcacacgcgccggaccgggtaccgctgtgcccggcctggccgcggcctagtcccggcagacgggactgacgaggtcaccaagcccaggccgagacggcgcgggtgtcagggacttgggaatccccctcccccagtcccgatcccgctttcctttggggtttcacctcagaggacccgacagcactcttgcaggtgggaacctacacaataggagtaatgtggctccaccttcctctcgggactcgggacctgggggtggagacttggaagttgcaaagctctcggtgccgggaatcggggctacggttgagtgggatcgggccagggctgaggtggtcccacccgtgtaggggcgcggagaaacgcctcgactgcttcactgtaccaccacccacccgccacgggcctggaaggagccgctaaacattcccgagcctcagtttccttagcacaaacaggctggtagtttcctggtgcttgccagatgcctgatggatgagaaagcctcctgcggccccgaaagggagtccagagcagaggcgggcccgcggtccacttttacaggtctggacggactcacgggaccacggtctgggtggggcatgcggaagggcctaggccaaatggggagtagtggtgagggcccagggtcagactggggggtggagtgaggttgtctgggagtcttggctttatgaaccggaaaaccaggctaataattgaatccaatccaagggatattgtaagttgtgatgtgttgactgcagtgccgctccctatagttgcgcagggtgaggggcgtttgggtactgaaatcccgcacggtctccttgctacgcccgtgtctaggccagacagcctctgcttaccatagacaccagtttctcatccacaaaggtgcccaaggccctgcttgacacaacagtgttacaagctgttagctttgatgattacttgttatatgggggagttcaacaagttggtcggtgtccttaggaaagtcacccctcttctttcctgtgcctccgttttcattgtctttaaaatgggtataaagttggctgacaggtgaagttgaaatgtgcacaggtaagggaggtagtgctgcccactgccagcagggggcagctcaggcaaggaaaagaccccagtgctctcaggaccccccaaccagctacgtgatcacatttttatgatcacagataagatgagcatatactgaggtcccttgctagcagtttggcatggaggacctcatttaattcttgcaaaaatcctgaggtatgatcactttacccattgtacagatagggaaactgaggctaagaggttcgccgactcctataacaccacacagttcagatatccctggccccaacatagagatacacacacacagtcactcacatggagcagtctatcactggagtcataactccccagccttggctcttccccatgggaatgcaaaaggggtcggtgaggagcaacagttacgaatcaactgtgttacaggtgctctctgtatattcacaaccacctggcgaggtagtgactgttatcccctttagcactgaggaaactgaggctctaacagctggcaaaggcagagctgggacaagaccagggctctgacctcctccaccaatacctctgaatcctccccagcatctactgtggtgccctttgctggtctttcctcctagggtctgaggttccccactggaaatgggatcagaatgttcccctgcctggttcccaacagggtcagaagagagaacttggaagagttggattttgagtgctttgtgtgttgtgtgtatgttgaggggagagaagttggaatgctcccacacctcctgcagcatccccaccctccccttcacccccactgcagcagtgccatgctctggaagcaagaatctgatcacaccctcctccttctctcatcacattcgggtgccctctgtcttctcaataacccaggtctgatctccctggccgcaaccagctgtgtggccttggtcaggtccatccctccccttggaatctgtacttccctaggctctgtcatctattggggacgatgcccaggtcaggcctatactcagagccttcttctcttcatctccagaacagccgtctgcctgtcttcctggctcgctccctgcaggaatggtctggggcaaccccagcaacacgcccacctgtggccagg

SEQ ID NO: 914626 - DNA, 4001 bp, Homo sapiens
cctccctcccccatctgaccctcccaccaccaccctccagatccatgcggccaaggcccagggcagctcacgcagggcaggcccaggccccacccacgggccctggcagggtggagcaggatctttcgggagaacagtctcctgccttcaagccctcctcagttattctccttccaccccacaaatctgccacaatcaacaagaccaaggggccagggagaacaagaggggtaagttggctctggggagtctgccagcaccctcccatgcctctgggctgctcacctctgaaagtgggcagaggggtggctggcctggggtgggggttgtgatgtctcctcttccccatcagtatctgtgtcctcagattcatcctgtgagcaccgcagaggtcagagttgacaagaaaagacacgaacccatcactgggagtggcagggacagcagtagaccctcatagccccaatttacaaataaaccagtgagcaaacaggttgcagaaaaggatgagagctggcctcctgccagttcagcctggggcgaggctgcctgtcccatcaccaagggcagggcgaagggctggggcctcactcacctcctgctccgagtctgtcccggacagcttcttgtccttgcttttcgttcccatcccaccgttcttccggccgccgctgcctggcttccggcccctttgggaaggtacagtccatctgcccggagtgctccctactccttggccacccccaagccctgtggccttggccttccccactgtatgccaggccctggccccacctgcgggcgcccttgtccccatccatgtggttgtcttccccgtccccctgcatgtcgggaacagatgccaccaggtccttcaagaagtcaaactgctgctccagctcgatgcactgcttcctggaagaggtgaggaggggctggcactcaagaggggcccagacacccaaacccgcagtgggtggcagcaaggggccccagatgtcaggctggagcccgggccgatctccgctcccgggcctgccctgctttactcaggtggctccctctgcctggaagcccagcctctcctctgccagtctgtggccttgctggtgtcccggctgccgcccacctccctcgccacccaggctctgccttcctcagtgtgtgaactccccgcgccaaacccgccggcccctcccggctcctcgccgctcacaggtgggatgtggtcatggtcttcgcgttccgcgactgggtcacctggcaggccttcttcaacagcgactctaggaagagctcgagcgcccgggctgaggagcgtcaaggagaactccggggcaggagagggcgacccgctgcctccctcccccacgcccctcgacccggtccgcccccggcaggatacagatgatgacaggcaccgccgccgccaccttcccaatctcttcgtccgtctgcatgatcttcttgatccgcgcctgcgggtgggggagcagagttcagaccccgtcgccaccgtcccctaagggggtgctgggggaggaaggggcatccccggagaaagggggcgggggacacggacgcggggagggcatggagggggcggggcgtccaggcccccgaacaccgcggcgcgcccgcctgcccagcgggaactgggcccaagccacccgggagccgggcccactcctgccgggctctgccacgtgctcaccggcgggaaccgcgcgttgtacttcttcttcttgctcggcatctcggggcctctctcgccgcgtcgggtccagcgccgccgcccgcagcctcccggctcccgggcctgctcgccgcccgcccgtcgcggttcccctgggtcctggtgccgcccgctccgcccccgccgtttcccgcggagtcctagcgccgccggttaagacgccgctcgcagggccctagtgccctcctcttgaagcctcctggccggtgcgcgtccctccccagtctggaccgccgctcccgcccgcccccaaggccagaagagcgaacgttggccccgccccccgcggcccgcccctcccggggttcccgcgatggccccgcccccgagtcagcacctccccgtcggccccgccccttcccctgccggccccgccccacagcgcggccgctgcggccgctgaggcccgcggctccgccctgtggctgcgcctgtctataaagttgttgttgaggtggcgcggcgctaagatggcggcggcggcggcggcggccgtggcgggggtggggcgcggtggcggtggcgcggagccacggcaggagcggagccgggcccggggctgggccggcgtcgaacgcagcgaaggccggaggtgactgcgggcggcgggaggggcagggcagggccggggcgggagcacagctcgggcccgtgggcgttaatggcggcgggcgcggcacggccggagcctggctctcctgcaggctctaacaagccctggttcgagtctgggaaccgccccattggcctcggaacggcctgtaacctctctggacttcagcgtcctcgtctgtaagtgggcccgataacgcctgcctgggaggcctggccttacagagccggcctcgggagctgcgcgaacgtgcgcttctttgcgttcctctattaaatgccagcgcaccggatacctgccaggaaaagggggccttggcagggccgggaggtgtagctggggctggttgctcccacgcctggattcacccttcggccctgccacgcactgcaggtgtgaccttgggcaagtcctttttctcagcctcagtttccttttctgtaagtcaaggagaatagtaataactgcagcaacccttctggagcgctgactcctcaggcatctaattttcatagcagatctacgggacaggaacagttgttatcccattgtaaagatgaggcaactgaggcgcatcgacagtaactcttactcaaggccacagtttaatccagtgcctggcatctgtagttattgtctcagaccctgccctgactcggttccctcacagcaggatggaaccaggtgaggagctggaagaggagggctctccaggtggccgtgaggatggcttcaccgccgagcacctggctgcagaggccatggcagctgacatggacccctggctagtgtttgatgcccgcacaacgcctgccactgagctggatgcctggctggccaagtacccaccatcccaagttacccgctatggggaccccggttcacccaactcagagcctgtgggctggattgcagtgtatgggcagggctacagccccaactccggggacgtgcagggcctgcaggcagcctgggaagctctgcagaccagtgggcggcccatcacaccgggtaccctgcgccagctcgccatcacccaccacgtgctctcgggcaagtggcttatgcatctggcaccgggcttcaagctggaccacgcctgggctggcattgcccgggccgtggttgaaggccagcttcaggtggccaaggtgagcccacgtgccaaggagggtgggcgccaggtcatctgtgtttacacggacgacttcacggaccgcttgggtgtactggaggcggattcagccatccgtgcagcgggcattaagtgcctgctcacctacaagcctgatgtctacacctacctgggcatctaccgggccaatcgctggcacctctgccccactctctatgagagccgtttccagcttgggggtagtgcccgtggctcccgagtgcttgaccgtgccaacaacgtggaactgacctaggggggccaaattggggagactgcccactcccccctccatgctggggttggatcctcctgtcttcctccttgtcctatgaaggccacaccccccagctctggggactcctaggtcacttgggaactacctgcatcttcagtccccttgaacttctgccctctgttcagggctgacacaagccccacaggctggggggctccgg

SEQ ID NO: 914627 - DNA, 4001 bp, Homo sapiens
ggaggtaatttgctaattcagtgtacacatgaatcactcagaaacattgttaaaatataaatttcctgggcctccgcttgagattctcattcagcagtttttcaaggaagaagcaaaaatacgcatttttaaccagcttctcagggaattcattaaaaagaaaaaaacccttagagaaatgctgcccggacttctacaacaaatcagaacctctccactttctgggcacctcaggctgtgcagggaaggtagaaggaactcaatgatctttaagagctgggactaccctggccctcatttggttctaggtctaaccctcccaaaccacttccttgtcagatgtctgcattcagagatggcatcaaaaccccctgcaacaaataatccaggaattttgaacactaaggagggaagtccaaggcagggactgaaacccaggaaagcagcttgctgattttcttgaaactggtcatgctgaccacagtctctctatctggccaccctcatcaaacagctgcatgagggaaagacgataagcatgatttctttttcaagtggtcctaatgctgcaggatgaatcagagataagcatgcatatttgcatttgaagcagggtgggagtggggagaatcgttgaacatctagctccctaaggaggagcaaggattggcctaaaaggtttgtagcctggtcaaaatacagaaaggcttggatctgcagaaggatctggagtgggatccacaaagtgccttgcacctcactccctcaccccctcacccaacctcaagagccaccgaaaaaaaagtagtggggtgtcaggtggggcaacagtgacttgctcagacagcttccttgtggctgagagcaagcgcctgtccccacggagctgcactgctgtgacttgtgtccatggtgaagcctgttatgtagacgcacacgcaccctcttacctctgctcttcaagaggaagcactcaagggctgcccgcctcagacagggatagggaagcgctctgtctggtgcttagaggtgtctcttgtctccgcataccaccctagaggggctctcggtccatcatagagccgggccgagagccgggcggtcaccctccgctactgccgccaccgtcgcctgcactgccgggtagaaacgggtctggcacccaagcctccctccccgactaggtgtcaacccaagagaaggcgaaggagaacgaaagttcaggaccaaggacagcggcaaccgtgggagcgggagaatccagccagaatctgcctctcccccatccttagcttctgccttagaaactgaaaagggtcaggtcgcaccaacacagagttgccaaaaacagcccttcttcctccggaagaagtcggaaactctggccgcgagccccgggtctcgcgcttgggtgctgggggaagtgccctcccgagattgtggggagcggcctccctcccgccctccgatgccgcggctccgccgtgctgccctgggcgccccgcggggaggctgccccagctgcgcccgctcgtgctcggggagaggattcccttctaagtggcgaggaggctactgagaaggagggagaggggatagcagccgcgggctccagacgccctctgcccccgcccgacggggagcccatgcagagccggatcccaggcgggcgctcccgagcaggcggccaggagtggccgcacaaacttctggtcctggcctcgctccccttggaggtccctcctcctctccccgtgacactgagtcgcccgccgctccatccggccggtgcttaccttcaagccatagggcgcccgggggcagagacggcgccggctgcttgaggcttccagctcccgccgcatccacgcgcggccgcccctccggcagccgtccggggccgccactctcctcggccggtccctggctcccggccccgccgcgccgttcagagccccggcgggcagcagctcggccggctctggcccgcggggagcagtggacgggccgcggcggggcggggcggggcggggccgggcgcggggcgggcgggcaggagggagcgcggggacggggcggaggcggcgcggtgcgcgcgtgaggctgccggttcggcactgaagctggacagctctgcggcgcccgagcgcggggagcgcgggagggaggtgccccggtccccgcccctgagacaggccccgcccccgccccccaccaaaggagctgtacctcctcggcgatccccggcctgaacgggtaggaggggttgggggattccgccatcccttgttttgaggcgggaacgcaaccctcgaccgcccactgcgctcccacccacacccagagtaataagctgtgattgcaggctgggtcctcaccgtctgctcgccagtcttctcctttgaggactcagaagccaagggttgcgggaggcaccacccatccagcaagtcaggcaaggagaggaggtgttggaagaggtccgcatccgttttctgacttcaggtcttggaatctatgtagtcagttctattgctggactcatccaaaggaaaaagcctgtttggagttgacctgacatggaaatgcaaaaggaggcctcaggggttccagctcacccttgactccaaactgaggtgtgtgaggcagggagtggggagagggagaaagagatagagtggtgaagggtgttccgctgctaccctgcccactgtcatttgggctgcagaggaacctcgttcttctccccttttcttcctctctccttttctttcttttcttttcttttctttctttctttctttctttctttctttctttctttctttctttctttctttctctttctttctttcctttctttctttctttcttccttcctttctttttctttctttctctttcttttctttcttctgcagcaattagttaccaactgtcctcagtttgccagattctgtgtcagattcagaagtcacacacagaaagaaaaccaggcccctgatcccgcaccctggcaatccagagaggggacccccagggaaataactgaggcttaaacaggtgctgtgaagcacaaaaaagcgagactttacaggaaccgggcattgaaggagcaacaccagttcccaaggggagaaggtggcacaacactccagggagagggaagagcaggggcagaggactgactctgcagagcagggagtcggccctgcatggctggaatccagcctctctgggccacaaggattaacttcatctcagcatttcctccaatgacacacacaattatagaaagtgagggctggaaaggaccttaacattcatccaattccgcctcacctcagaagggagaactgagtcccagagagatggagtgtccttgcaaatcccacagagtccagcactgaaccgtccccctctccagaggcacaaaacagcacctctctcaaatgcagccatctctggaggcacgggagcagaggaagctgtgggctccccacctcaccccaccatgactcttcccagctcctgcccctggatcttgctgatctggactggcctccatttgcctgcaggctctatagggagatattacaccaataggagtcctagaatgttgccataattgcctttaagggatcagccattacagatatggttgacatcccagtgtttcccttgtatacccttggaccattctttcctaggtttaatccacataaggagatatttggtacctcccaactcagcacctctacataggttcagggatgggtcagactagccagagcacctggattggtgtcccgccttggtcacctacctgttgtgtgggcttgcctaaattgcttgatctcgcgaagtctcagtttctccatttttaagtggggactaaaaataacgatctctgagctttactgagaaaaatagatgaggacatgttagacaatggtaatatgggccatctctggctgctctggggtggggaggggagccct

SEQ ID NO: 914628 - DNA, 4001 bp, Homo sapiens
gaggaccgggcagggaaacaccccttccccacgcagatctccctttgttttgagttagggtctcgctgtgtcaccgcggctggagtgctgtggctccatcatggctcactgtagcctggaattcctgagctcaagcgatcctcccacctcagtctccagagtagctgggattacagccgcgcgccaccacccccggctgatttgtttttctttttgttttttgagacggagtttcgctcttgttgcccaggctggagtgcagtggtgagatctcaactcactgcaacctccgcctcccaggtttaagcgattctgccgcctcagctcccccgaatagctgggacaacagccgcagccaccacccccggctgatattttaaaattttttgtagagaccaggcctggtatgtttcccaggctggtctcaaactatcctcctgcctttgcctcccaaagtcctgggattacaggcgtgaatcacggcttctggccttggtctcccttttgttacaaacatgagaacggcctggggaattccctgggggcgggcctgatatcatcgggctcaaagggagcccctccccagcctggggtaggcagggtccccgctgggcctagaagcgaagctggctgctctgttggctaagttctctgtgggagactcgggcacgttaattcatttctgtttcttcatctgtaagacaagggtgatgatagtatccacatcataattgtcttgaagataaattataattaaaaatatgaagaccgtgcccagtgcccagcgtaggactccacgtggagtgactctctccaagggcaaaggagcaggcagcccctctaatccttcccgccgatttggggagattaggagcttaaacgtcgtcactgtgacgtctgcggctcgaaaggagcacaggtcacgcgtgtcccgtgctgctggtctctgccccagccgcctggattcactgtgtccatcaaggggaaacctcgagtccccctcccccacagtcggggacaccgcgtctccagctcagccctaagctgcttttctctggccgcagaggggctggcaccaaggccgacccactcgagggccagacctggtgtggagtgtgggctccatcccccaattccccctcaggcttccccccagggttctcagcaggggcctggtccccacacaccctcccctcccctgggttttgtccagcccaggtctcccctgcgagctgtgagcctccttctgggggtgtgccagcatctgcactaggtgtgtgtggtgggcagtggctgtggcagtgtgtgtgtgtgtgtgtcccacggcagccagggggctgagcctgcatctgcctgtctgtccagctggctgccctggaggtgaaatccagctacggaggggactgggcttgacaaagtcgcctgtttccggggtccctggatagaaggacgggcatctcctggataacagacgccaagacagacggggaaggagaagaggaacgagggtcgggggacagacagcgcagcgggtggaaggtcgcgaggtggcggcggtgggtgtatcgccgagggacaaggcgcagcgcccctgccgccgccccagctggaagctccgcaccagaaaggggccgggtcgcgccgggtcctccgtagggacagggacggggaaccgaggagcaggtgaggatgctcgtgcggccggacgcggctcacctcggagtagacgaagagcggcagcaccaggagagcgaggaggaggtcggcggccgccaggctcacgatgaaggagttggtgggcgtctgcagggcgcgctcggtggccacgctcacgcacacgagcgagttccccgcgagcaccgcgccgatgagcagcacgccccccaccagcgccgccgcgccctgcccagccagccccgcagatgcccccgcagatgcccccgcggccggcccgcgcccagccagcagcccgtccgcgtccgcggtgctgcggttccccatggcgcgcccgggcgggcgctgagcaccgcggacaacgccgggtcgcaagccggggagtccctcccctcgggcacgccccggccggaccctggtcccgcccccgacccgccccggctcaggggggcccccgcggcgctccaccgtgagcccagtatttgctcatcttggaattttgcgcagggagagacgggcacgtggacgaatgcggcggcccaaagagacgggaatgaagcgaggtggtggccacgggcaggccagcatcgcccggcgccgcgcggggtccgcgacccgagaaaccgacaaggatggaggggcggccagaccaggccctgaagcgcgcgggcatcgacgccagcgccatcctacccggcccgtgcgtgcgtcccggccctcgggcgctcaccctagtccacctggtatctggcaaaacctccctcccaggcccgttccgccagacgcagaaagacctgagctcaggctctgcccgcctcccccgcggactcgcctcgacctcgtgcgcaccctccacgcccgctccccctgcccccgactccgcgcccgactcaaccgccgacgcctagctcatcccgccgccccccccccgcagcctctggccctcagcccccgcgaccaccacggtcagccgcggccccacccgttgcacagttgatcctcgcgtggccgcctccgaaactgggcggacagctgagcggtcgaccccgctccctcctccattccctccggcccaagaccgtgagctaggtaggcgcccctctgaccctgggcagggggtcccgggaccggacagtaggttcggctcgcgaggaggccaggagaaagacacgacaggccggggtaggttccaaacgtgcagaagagaaagtgcttgcaaagcgcagcagagaattctatggactcttcaccaaagaggggtgacctgtgacctgagaggtattttctgtagtctgtcactaaggggcctagaagacactaaaagggggcaccactctgtgggaccccaggcggcgcacatcctgatgctctagtctgtttctgggaggcctggagtggaggggctgtgccaggaattgaggcccctgacctcgaaggtctggaggacacgggctagacggaggcgctgacagggcgtgcgttaaagggagaaatgaggactctgagaaggagcaggcaccgtgagcctcacaggacaaggtcacggggctgcgggggaagggcctgcaccagggacaggtgtgcacaggcatcaggtgcggccgcagccaggctcagtccctcttgtgcagatcagtctgctgcccttgtgaacccttgagcaaaagaagtcaccacaggagagaccaccagggacaggtgtgcacaggcatcaggtgcggccgcagccaggctcagtccctcttgtgcagatcagtctgctgcccttgtgaacccttgagcaaaagaagtcaccacaggagagactgggacagtggaagtttcttctctcccaggatggaaccggggagggtggccctggggtctccggctgggcgccaaacggcgagtccagcccagcctctggtcggcttagagttccttcaagtagcccccaagatgtctgcgaccaccaagagtgaaaaccaagctaggcggagaaaggatgtgtgcagcacacatctctgacacacagatccagaaacaatggaaacaatgagaaaagacagacaaccccaatttgttttttttttttttttttttttgagatggagtttcactcttatcacccaggctggagtgcagcagcacaatcttggctcactgcaacctccgtctcccgggttcaagcgattctcctgcctcagccttctgagtagctgggattataggcgcccgccaccacgcccggctaatttttttgtatttttagtagagacacggtttcatcatattggccaggctggtctcgaactcctgacctcaggtgatccacctgcctcagcttc

SEQ ID NO: 914629 - DNA, 4001 bp, Homo sapiens
agcggcttcggcctgtgctttctcgcctgacaaattgcgaaaggggatgggggttggagagagaactatcgagagagaaagccgctcctcaccttatgtatttttaatattaatgtaattaaagctgcgagccgagccagcctgcgggggcggagggaggcaggaagaacctggggagagggagactggggttcgggggtggggcttgaacaggaggcaggcttcttgctctgctaaggtaggatgaaggagtgcgatgcggggggcaaggggttaaacagcagagaccagccttggtgtgtaacccgggggaccccactgggcctgagaaactcaactactttgtcgacgatttttgaggccacccttccttgtcccgcaatccgatcgcctagtaaatgccagcagtatctgggccttgagtctggctttgacccggcagtatctacaaataagggttatcctctttcccccaacccacgatgtatcgcagtgggctccggcaggctgcagactccagacccctggagcaccggcagggcagggttggacccctccccgggtggcaaccctccactggagtgcccttcctcatcgtcttggggttaagagttgccgcccggccagggcaacagccagggcaaagggagagagaagccgccccggggcgagaaggagaaaagttagagggctgaacaggtgacgctgagcttgttggagcgtgtgtgctccaccacgcaagggcgcggagttcggccgcctcatctcccgccatctgcgcgcccgggggcacgtcctctgcgatagcctggaacccagactacctgcgcctgcctggtcccgactcagtgcccaggtggcttcagtcggaaatgtctgccctcttccaacctcccgatcccggctgcctcgcggatcaggtacgcagcgccccagccgcaggtctggacatgccggacacctggacccacccctagcaaccccctctctccgggaagagggacacgccccccagcctgaagacttgtccccaggtccaactggccaggcgcggaagcggagaatctcgcatcttggggcgcgctgcccgaggtggccacggtggcgcaccaagccggggctaaagccggggcagaggggtggggtagggccgggggagggtgacctctgggtttggagaacaaacttgctatccgagggacctccagctctcgggactctcactatccccaccctgcctccagccaatgcgcggataagcgccatgcggtgcgccaacattcgcgccagggctggggtccgcggcgggagagggacgcacggacatagcggaggaatcagccgccgagtccgaggcctgaataagcaaggactcctaggtcaagagtcacggcctgaggacccctcgactcggagggcactccggggtcccagtgccaccaagccgcaggaagagggcaaggggctgggggaggggtccagggcagaactgccgccgtgcagggagcagggagatgaggggctcctttgccaccacccctacgggcgcgccccaaaacggcagacgcgggtggctggcggagcggtcgggggctgactctcactcggcccctgtcagggtgcctgcccctccccgctgcgccccacccggggccttgcaccccggtcggttcccccacgcacctggagcccgccgggcaccccgcctcgccgccagccgcgccaccctggccccgccgcctccgccgcccagccgcccgcgcaggtctcacctttgtgtaaagagtccaggagcaggaggaaagttaccagccacatgccataaagaggccctattctccggggaggtggtcctgtggccggccgtgcggcagcgcctctcccccgctcagcgcgctcccagccgcccgcactcggcgccccgctctctctgctcctcagcccagcgctcggctgcggcggcggctcctccctcctcggctccccggctcctgtcatccgcggggctgggctaggcggccgctctccccgcccccccgcggcaccccgggtggtgagcgccgcgcgagcccggagcccagacggaccccagccccacaagcccaggaacaggagcggcggcccgggccagaccgccccgacccggctccgctgtctgagaggcgaggggtccctgtcacccaccggcttggagcctgtggtcgcagacaggcatgtgtcatccatgtgccaacagcctgccatgcttcagccaaggacgcccggtttctactggcctaagtcacctgggacacgagcttcctgcctctttcggactcagcttacccggcccccccaccctccccaggaggagcatggacgctctgggtagaatcccaggcttttcagtgctgtctggtgctactccccaccccaaagttcatagctgcccttccaacccctcgtgacttccgcaagcctgccctccggagaaccccagatgagtccagccaccccctggcacgctgttcgaattttcctcagcacttggcacattgtgactatttaaacggttattcacaatgagcagtttaatgtctacgctacctgtgttatcttcctcctttgtcttcacctacccacccctatagctttcctgcctgacagaaattggcttattccttacactcatctttatgaagttggcatagaataggactggagtgagggcgtcttctcagtgaccaaatgaatgttgagcacctgctgtgtcaggcactggctcaggcactggggactcaggcatggctgagccaggtctgctgtaaaaggtcaatatggttggaaagccctcctttcgtcttaattccaaaataagaggatacatagaacccagagaagggatccaggtatccctgagaatggcctatgagccaggactgtagctccctttgcagggtcatggaagctgctttgagtatgccctgacaattgggctgtacctgggcagactctaaggtgtggagtgcgaagtttggagggagagaaggggtccactggctagctgcatttgccagaggaagaaaatttacttcctcgaaatgtgcggcctaagttcacatgggagaattgggactcctcactcccaggttttgccaaaatatccctagaaattttaactaaattttgaaaagtgtgttttttaatatgttaaaatgtacataacataaaatttaccatttcaaccatttgaagtgtactattctgtggcattaaatacattcacgatgtgcaaccatcatcacttaccatttccaaaactttttcatcatcccaaacagaatcctgcacccattaaataataactcccccttcccctcccctcccccagctcctggcaaccactattctactttgtctctatgaagttgcttattctaggtacctcataagtgagatcataaagtatgtatccttttgtgcttggcttacttcactcagcataatgttttcaaggttcgtcctttaaacgggtgagaaaatcggggcttaacttgttcaaggccaccaaggttgtatcagaagcaagactagaacccaggcctcccgactccagagcagagcttgctctataagctgcagcatccctcggtggctcagctcttcatgcaaaatcaccaccctgaaacaatttgcaggaggtgttttgtcatctggaaacacaggcatagaacagagacggggggacagactgcagggggtgtttgagatgacccagaccgatcttttgctttacagataaggaaactgaggcccagagtggggaagccatgagccttccccgaggtcacgcagggagtgacagagccctcacgtttccagtcttctgtcttagctcccatctctcaccgccctcagcctgctggcttattcttctaccatgccccctcccttctaaagggaacggtcattgagaggaatccagttatttaaaactaagcctattgacccagagcacctgg

SEQ ID NO: 914630 - DNA, 4001 bp, Homo sapiens
gggtaccccagccctagtctctcctcccagggagcccggcgcttcccttacccgactgtagcgagaacctccggggaatcccttcttcctcccccagttcccacacccaggacccagctgcggggaggcatcccacacaggagacgcagaggcagtgagatcgggggtgaggggacgtgtggcaagccccagcgtgcctgaagcaaaacagggtcaggtcagccaaggtgccggccgccacgggatgagggcaggaagcctttgcgaagggctgggattgcctgtagtctggggcggccctagaatttctacatagaaagacttagggccaccaactgctgaaaagcgggggcatgaaaggggtggggagtggattgttaccgactaggttgaagctgggtttgcaaaaccacaacactgatactatttgcatggatgtttaagggggagggaggatcctgcgaggattcagcggagtgaatcgcctcccaccaccacctcttggtgacactgctgcacagaagtgccgactaggtggccaaggtgggttcacagggagggaggtaccttggcaggttgggaaggtgggagcaggcggggcggggtcaggggcggctggctcacccgtgtcttggcggaactggttcatggactgcaggtcgatgatgtagggcgcgagacggctgtccacctggcccagcaccacgctgccccccgcgcgggggccggcgcggaccaccgcctcgatgtggtggctcaccgctgggctgtagggacgccagcggccgtgctcgttcagccattcccagaccaccacggccgaggccaggagcatggcgagcccggggctgcggcgctgcgcggcccgcctcccgggccccgagcgcccgacctcctccgcttcctcctgcgccgccgcctccgggcctcgaccgcgccccctgccccgcgccccgccgccccgggcagcctcagctccggcccatgggctcctccccagccgtgcatccaccggggccgggacaccggggccgcctggctgggaccgcgcgccgccgccgccgccggggtccgctgctgctgccgctgctctgtggggtcgagtcgcttcatgcaaatgcccggctctctgcaaacaggcccccgccttgcaaaagccactcggcgggcgcgcggcccgagccccggcggccgcgagctggggctgacggcgaggcaaggacccagccctcgcaccagttgcgcctcggcctctgcagacgccggggtgggatctcgccgcacggccgcgctcggaatggcacgctctggtcccctcccctctctccctccctccccaccccttcgccgcacgaattgcagtccccgccgctgggagagctccccctgcctgtggctctgctcagttccttccagaatgaaccacccctcccaagcagggcgctaaggcaaacccgcgcccgcgtgtgtttccctggttccttgatgcagagaagcgacccgccatgacacggccccgggaccaccactgtcgcccagccgcaactttgcagcctccttcccccaaatgtaattttctctctctctctctttttttttccttaatgcagcatgatcagtgtccgcagcgcgaactggagacacgcattgtctcggggcttgcgcacgcactggcacactcacagtcgcacacacacgcgcgcgcaccccaactccttccttgccccggctcctattacctcatcctctcccgcatccttagctgtccgtcaaggaagcagaagacacgccccctgctgctcgggcgagtgccctggagcttacccgccccctgctggcctaaagtgtcgtgtgccggccagtggccactccaacctctgctaatgagacccagtccaaagggatgcagcaatttcgctaatgatggatttatattacctacgtagagagcaaatgtggtttttctggccagattcaacgtactagagtcaggaagacgcatgttagattaattttatctgcatcgtttctgtaactaaaattatgaaacactaggaaaaacacgagttagacttattttgatcatcaatagttaatatggaaaataaccttaaataggtaggttctgactaaaagggaagactgaagtcaggattatgcattatccttgtcaaagaacacaaattttgttttgttgagattgcaaaccacataaaacaacgaatcgagtcttatcaagatccaagttataggatgcgggaaagtaaaaatagattatgtgttagagaatgggattgtgaatctttttgaaataatcaattttttcataaatatcatatgacccttttatgttttagaagagttgcttccccctccctctccttgcagctgtcatttctcccattgttagaattttgcatccttctacctttatctttctcccaacagagttctaaatacaaagcaaaagaaaaagtgtgagatctgttcttcttcaggcccctaaaggcaccaggctcaaggaacctctgagctttgttctttctggtcttcttgcacagcttggcctccaaaatgcctagtcggcctctcccttatttggggactgttcctaatccaacctaaacaataccactcattaaaatgtcgagtttcagaattagaagaacaaaaagaaaacaaggatacctcgactaattatatcataggccattattattaccattttacaaatgacaggacttaaggaatttaaactatttgccctagattacatagctagttagaggggaaaccagtattcaaaatttagttgggctgtctcaaaagaaaatgcctgttccatagcatgtcctatacaacacagaggtggcacaataacaggcaatgtagaagtgtctcagtgtgaaagaagggaagggagaaaatgggggtagaattttctggaaaagaaacagaaggcaaactgaagaaaaagtaatttaaaaatttattgggctacttttatttctagtcataaaaatggaaagtatcaaaactcaggaaactttcttatagtcttggtaagtatgaatcaaaaagtgaagagtaatgattcaaggggatattggaagtaccagcgaaaatatagcacctgaccagctaagccagaaattccaaggtgaaaaaaatctaaactagataagcaggctaccagcaaatgttagatgagctgtttgaaaggcgaatggaaggcagaaggaaactgacgcctacctgcctatgtccagcctagttttgtatctggtcttcttgtatcttccatgttaaacacaacagagtattacagcagaataaaaatatcttatgacatgtgagaaggtttgtatgtagtctgattcatttgcaagaggaagtgaatacacacacacacatacacacatatacacacaaatgagaggggtctttaaaattttatggaaaatgcatattatgaaaaaactaggctggtagttcaaattgtttttttgcacccaaataaactcatactaacttgttataacatgtctgaacaggatctagtttgagacactaagaagggtaagacaatgcccttactgaagaggatcaaggattagcagtcaaaacaatagcctacaccatagatatgtcaactggttcagcttacacaattctgacaaagaaattaaactttccattccttgataggtgccaaaaccattgcacccaggttggccacagacaagagcaggcctttcaatagagattttaaatgggtgggatcaggatcatgaaacatttctttgaagaattgtaacaggagatgaaacattaccagtataatcctgatgacaaggaacaaccaaagcaatggctatcaagaggtagaagtggtccagtcaaagcaaaagtgcactggtcaaaagcagagaccatggcaacaattttttggagatgctcaaggcattttacttactgactttctggagggccagagaaca

SEQ ID NO: 914631 - DNA, 4001 bp, Homo sapiens
cattctctccctccccctcagccacacttaatcctctttctcaatctccccacattcctctctattctctgctcctcccagtctccctcagctccacacacggttgaagcccctccagattctaacacttccagaatcctctccccagaaagctctcctcaatcagccagtgtctgcagagtccttggcaaaggggttgctgggagttatgactaaagatggggacatgagggtggaaagatacccctttcccatgacaatcctaattagcacacaggatgtgggggctttccaaggaagcagagagactctgctcaaacagctgttcactggggagggcctttccgagtcatcttctctacgtcctccccagcacaccggcctctccaggctcctcggttgcactcttgggaaagccgagccagaattccagaaacaatggccccctccccacctgtcactgacggaggcagaaactcttcccgggtcatcgattaagcaaggaccgagcaaagagaggcagttttgctctcccttgggcagcacccccactccccaccccccaaggccccatcctggaggctcccttcctggctctgacctggaaaggcaggtcagctgggaagcgggtttgtgctggctacagtgacaacttgattctcatgaaaagataggagtttggcgctccaggagaccatgggttccttacaggctatggtttcaagaggaagcctggggacagtttctccttaggaatctgcgtcctcctcctccgcagacaaagggagcggcttccctgccatgcattccgaagccccgagcctccccctcctctctccatctgctccggcctgttgcttccgcgcatgtagtgtgtagcagaggcattcgccaatgccgcggcgtccagggtaccccagccctagtctctcctcccagggagcccggcgcttcccttacccgactgtagcgagaacctccggggaatcccttcttcctcccccagttcccacacccaggacccagctgcggggaggcatcccacacaggagacgcagaggcagtgagatcgggggtgaggggacgtgtggcaagccccagcgtgcctgaagcaaaacagggtcaggtcagccaaggtgccggccgccacgggatgagggcaggaagcctttgcgaagggctgggattgcctgtagtctggggcggccctagaatttctacatagaaagacttagggccaccaactgctgaaaagcgggggcatgaaaggggtggggagtggattgttaccgactaggttgaagctgggtttgcaaaaccacaacactgatactatttgcatggatgtttaagggggagggaggatcctgcgaggattcagcggagtgaatcgcctcccaccaccacctcttggtgacactgctgcacagaagtgccgactaggtggccaaggtgggttcacagggagggaggtaccttggcaggttgggaaggtgggagcaggcggggcggggtcaggggcggctggctcacccgtgtcttggcggaactggttcatggactgcaggtcgatgatgtagggcgcgagacggctgtccacctggcccagcaccacgctgccccccgcgcgggggccggcgcggaccaccgcctcgatgtggtggctcaccgctgggctgtagggacgccagcggccgtgctcgttcagccattcccagaccaccacggccgaggccaggagcatggcgagcccggggctgcggcgctgcgcggcccgcctcccgggccccgagcgcccgacctcctccgcttcctcctgcgccgccgcctccgggcctcgaccgcgccccctgccccgcgccccgccgccccgggcagcctcagctccggcccatgggctcctccccagccgtgcatccaccggggccgggacaccggggccgcctggctgggaccgcgcgccgccgccgccgccggggtccgctgctgctgccgctgctctgtggggtcgagtcgcttcatgcaaatgcccggctctctgcaaacaggcccccgccttgcaaaagccactcggcgggcgcgcggcccgagccccggcggccgcgagctggggctgacggcgaggcaaggacccagccctcgcaccagttgcgcctcggcctctgcagacgccggggtgggatctcgccgcacggccgcgctcggaatggcacgctctggtcccctcccctctctccctccctccccaccccttcgccgcacgaattgcagtccccgccgctgggagagctccccctgcctgtggctctgctcagttccttccagaatgaaccacccctcccaagcagggcgctaaggcaaacccgcgcccgcgtgtgtttccctggttccttgatgcagagaagcgacccgccatgacacggccccgggaccaccactgtcgcccagccgcaactttgcagcctccttcccccaaatgtaattttctctctctctctctttttttttccttaatgcagcatgatcagtgtccgcagcgcgaactggagacacgcattgtctcggggcttgcgcacgcactggcacactcacagtcgcacacacacgcgcgcgcaccccaactccttccttgccccggctcctattacctcatcctctcccgcatccttagctgtccgtcaaggaagcagaagacacgccccctgctgctcgggcgagtgccctggagcttacccgccccctgctggcctaaagtgtcgtgtgccggccagtggccactccaacctctgctaatgagacccagtccaaagggatgcagcaatttcgctaatgatggatttatattacctacgtagagagcaaatgtggtttttctggccagattcaacgtactagagtcaggaagacgcatgttagattaattttatctgcatcgtttctgtaactaaaattatgaaacactaggaaaaacacgagttagacttattttgatcatcaatagttaatatggaaaataaccttaaataggtaggttctgactaaaagggaagactgaagtcaggattatgcattatccttgtcaaagaacacaaattttgttttgttgagattgcaaaccacataaaacaacgaatcgagtcttatcaagatccaagttataggatgcgggaaagtaaaaatagattatgtgttagagaatgggattgtgaatctttttgaaataatcaattttttcataaatatcatatgacccttttatgttttagaagagttgcttccccctccctctccttgcagctgtcatttctcccattgttagaattttgcatccttctacctttatctttctcccaacagagttctaaatacaaagcaaaagaaaaagtgtgagatctgttcttcttcaggcccctaaaggcaccaggctcaaggaacctctgagctttgttctttctggtcttcttgcacagcttggcctccaaaatgcctagtcggcctctcccttatttggggactgttcctaatccaacctaaacaataccactcattaaaatgtcgagtttcagaattagaagaacaaaaagaaaacaaggatacctcgactaattatatcataggccattattattaccattttacaaatgacaggacttaaggaatttaaactatttgccctagattacatagctagttagaggggaaaccagtattcaaaatttagttgggctgtctcaaaagaaaatgcctgttccatagcatgtcctatacaacacagaggtggcacaataacaggcaatgtagaagtgtctcagtgtgaaagaagggaagggagaaaatgggggtagaattttctggaaaagaaacagaaggcaaactgaagaaaaagtaatttaaaaatttattgggctacttttatttctagtcataaaaatggaaagtatcaaaactcaggaaactttcttatagtcttggtaagtatgaatcaaaaagtgaagagtaat

SEQ ID NO: 914632 - DNA, 4001 bp, Homo sapiens
tctgggaggcagggaccctgcactcacacaggtcagctcatcttccctcactgggctcccccagatgccctcatccctgcctcccctcagctcccttggctagtgctgtaggacccaagctggcctacactctgctccgctggcctggggaagctgtggacctgggagaaagtggggtggggcggggggctccctccgatcccaggaacggggtccgggcagggcaggggatgggaggacttggcacaaggggccgtgacagtcgagtctcagagccggacatatccaggttccctcccttcccaccagacctgtgtccctcctcctggtcactgtgccacatgctaaacatcaggaccagtgtggcgcttccaaggttcactgccctgagcaactccggcagagggggcctcagcgggtgcagttctcatggccagagtccaaccacctctctctcactgtgggtctgcccctttccctgccttctgcaagaagtgacacctaggtctccccaggccctagctgatgccccttcgaggcacctgtccagtggcagcctctaggccctgacttcagccccagcctgagaagagaagggtcctggagcagagactgactctaagcgtctttctgcacctctgttaatgggactttattcccagaagcctccccgaggacagaggataccaggggaatagaacctgcccagccacactcgtgcagcccccggctggctgcagcaggaggtatttcagcgagacttcaggatgaacttccagctggggtcacatgatctgccatccgcatccagtgcttattagcagtgaatgcatgggactgtcctcctggtggagggctggggcctggggtgctacattcacccctggaccgccctaggtgcaacagtgtctctgggtgggctgtgccagaagggaggcaagggagagtgccggggtttggatctcccctcagaccccccgctggggcacaaaaggagcttccctggcctgcagcaccccacccccaccccaagctgcacagcaagagcactgcggagccacgctacatcctgccaccccctcctccatcccacagtgtccccgccccccatcactgcagcaccagagcccctattcccctcagcagaggccggtacaccccgcagcagggagacggaggcagattctcccagaaggggtgaccctgttggggctgggcctattgttgccccctcccctccaggccagactattaggtatccccacctggtctgctccgcatcccaggctgggcagctgggcctagcgaggtggctgcagcagcctggctgtgccagcccctcccccagcgccgcggctgcctctgcagcaggcggaagggcgcgggggctttatccctcaggggccggctgggcaccccgggatggggaggcagtgcggcctggacactggggggatggatctgcagccctcccccccgacaggggaaggccccttcccgggtgtcccaggccagaggccgtcgcgtccctcccacggccgaggctccacacctcccggaccgactccgggccagggtccgcctgctccggttctggcccccgcgggggtgacgttcgggacgtcgggggctcgcgcagatccgcgctggatctcaggcggccctggtgggtcctggatttttgtcccccccccattccacacccaaagaaggagctgcggggagaagggcggcaacgcggcgggcgggcgtgggctgggcccgggtccgccgggcgttgcggggggcggggaaggggcctccctgtccctggcgtcctggacggccgtggccgctcattccggggccgcctcctcctcccgggcgcccaccgggtgccgctgccccagcgcccccgacgcggcgccctccgccccccggcccgggccggtgaaccccatccccggcgcccgcccccgccccgccggcgcctccgctcacctcgctcgcgctcgcctcgggggcgctccggggacccgcgccgcgctcagggcgcccgctcggccgcgccgtccatgggcccggcgggggcccgcgcagccggggcaggggccgggggagcgcgcgggccgcgtcgccgtcgccgccgtcgccgccgccaacgccgcggggagcgctcgctcgggccggggcgcgcgcactgcgggcgggcacgcgcgctcgcggcgcgcatcccagccccgcggctcggcgggcgcggccgggaggttccggcgcggctcgggctcgggctcgggctcgggctcgggcgtccggcgtccggcggggcgtcgtggggggagccggctcggccgccgcgctcggccgcgagtgacaggcccggggcggagggcggggccgccggcggggatgaggtcatgccgagcgaaaaaagcccctgacgtcacctgcagccaatcagcgcgcgcggctcgggggcaggtgacgtcagcggagcccgggctcggggtgaagctgaggcggctgccgcggggggggggcggggtgcagggtgcgggtgggtcgcgccgccgccgccttccgccctcaccccgggaccggctcttaaagggaccacgcggcgtccgggaccccgcctccaggaagccctcccggccccgggccccgcgtcacccaggccccccgtcacccgggcccccggccgcgtcgcacagaccccggacggtccagctgagcggctccgggcgcgaagtcctccccccgacccggacaggcgccggcgccgctccccccttctcctggcctttgttggcgctgggccgccgccggggagccctccccagacccaggcgcggcgttttacctgcagcggctgtgctcgccccgccgcgacccccgcaggacggagccggatccccctgcactcgggcggacctgggaccctcagaggcgagccggctgcctcgggtcacacatccgcgaactccgggggcgggctccccaggacgccgccgaccccccacgacccccagccctcccgcttccgtggaaagccgccccgacgacccctgtgcgggctgttgaggggccgcaccccgccgaccgctgtgggaacacctccgcgcgtgcggcggggacgcggcgagtccggggcaggaagaacgcacgggtaattgcaccttcggcaggtgttgggcgggagcaagggggtcagactcgcgctgcagggggagggcgggggaggcctcgctgtcctggaggaaggggacaaagacccctgcccaggagcctgggagcctttgaaagtaatgattttttggcgggggggggttgtcacgagacaccctagacatttctaaaaggccccctccccgctgccgggtggagagggagcgtggggggatccgccttctgcccccgagcccccagccagcctgggccccccagggtcaccctggggctctgaagggggcttcggccgctggttgaatgaagggccacagaaaatgaagctggcgcaacgaccgcagaaccctcagtgggcaccaggaccacggagctcagggtgccaatggtgatggctgggggtggggagtactgtgggcagcaggggatgctgagcggggtttggggctccccctttccatactcagtcttcctgccagcctcagagctgagtacaccgttggcgattaataagcgcttgcagctcccttccctggccagcctgaggggagcggcagtggcccgtatggggtgggggtggcggtggagtgcgtcctggcgcagagctggcacacagcacaaacaaacgccttggcgggagtgggtctgtcccggaagggagcccaggggttattggggttggggctgcgccccaaagcgggagggccctgcgagaagggaggccctggctggagggggaccctgagactggaggtgccggacccggatgcggggccaggtgagtagggctgcctgctgcagccttgctgggtttgaaaagtgggggaggcttggcc

SEQ ID NO: 914633 - DNA, 4001 bp, Homo sapiens
cccttactttcctcagccataaaataagaaaaagaatagttcctatcttacaatgtcgttatggctattaaatgaacgaatacatataaagtacttagaacagtgcttgacagagtctaaagtgaaaataaatgttagctatgattatccatcctttttatatctttgtaaacccatcatgcctggcaaagtgccttgcatgtactgagttcaaagtaaatgtttattaaatacaatcgaattaaacctaagaataaagatagtgaatagggtgaatgattcaatcatcctataaaaatgcactgaagccaggcacggtggcacacacctgtaatcccagcactttgggaggccaaggcgggtggatcacctgaggtcaggagttcgagaccagcctgaccaacatggtgaaaccccatttctactaattgcaaaaaattagctgggtgtggtggcacatgccctgtaatcccagctacttgggaggctgtggcaggagaatcgcttgaacccgggaggcagaggttgcagtgagccaagattgtgccattgcactccagcctgggtaatacgagcgaaactgcgaactgcgtctaaaaaaaaaaaaaaaggcactgaatgtttttgctgagtgtcaaaaactctgctagacctagggataagggtgaacaccaaaggaagaggtttaaaatatgtctttgttttattaacttaaatctatttactgagtcccctttaatgtgtcaggcaattttcttctgtgtttttcttttaggcttatatatataagccctgattgcaaatgcaacccattttttaagcaatcctgccagtggagggagcagtgcaattaataaatcagtatatcacatgatgtacaccaaaaaagaattcaaactttattttgaaatatatcatttcacaaaaatttaaattcctaactaatctttcccttgggcaatgttaaaatcagagcctgatccaaaaaagatagactagaatttgccttccccccaaaaaaaaaactcaaaaaggggagagaaaaaaataaaaataactaagtaaatgttttctttttagttataacgtatctgcagtctttcttaaaaagtagaatataggccgggcgcggtggctcatgcttgcaatcccagcactttgggaggccggatcacttgaggtcaggagatggagacccacatggccaacgtggtgaaacccccgtctctactgaaaatacaaaaattagccaggcgtggcggcgcgcgcctgctactcgggaggctgaggcacgagaatcgcttgaactcaggaggtggaggacgcagtgagcagagatcgcgccactacactccatccagcctaagcgacagaacgaaactccgtataaaaatttaaaataaaacacaatctaattgcttctattcagatgtatggaagggaaacatgcttcggtcaggtaggatgcaaagcttggaaactacctgcttaagcacgaggccaacgcatctaagccaataatgcaggagaagtggagacagccttgggttcctgaaaaggatctggttggtaaagctaaagagtgtgacccgacgtccctctggctgggcctggggacttgaagagtggtcaggggtcaggcaggagtgcaaggaaccgtaccgtgttggaaaaggagattcctgcgtcggatcgctgcaccctgaggagcatctggttgccgtcatccaagaagttgttgatttcaagacagttgcacaacagtggctgatcccagagttcagacatcaacccgaagtaattctgggtagtagtgaagatgaagagcttccgaacgtccgcagtcccgttcgccatgattggaaggggtggagggaagttgggggaagggggaaggaagaagaaaccagtccggagggaagtgaagggaagagaggagctttgctcaaacccgtagcccgaccgcgggaccgcagagcttcgcggttgccaggggtagtcgctatggcgacggagcactacggcggcgtcgctggcggcgcgcggtgggcgttgccctctcggggcacgcgcacgcaaagctcgcggaggctatcgaccgcctcggagctcttcagcggctccctgcggtcatcgattgtaaggggttcggacaagtttatgttggctctcaaacatgtcttttattcttcttactgatttcttatcacgcataatcagaagagagacatctagccttcaagtacagcagcgtgatctagatttaggagagctgggttccagtgctcgctctccacgtgcacctggtagcaaaccagtctgtcagcgtcaaggtacacatctgttaagaaggggaaatactatctcacaaccaggggtgtagtgcggattgtaaaagattactatttaaaaatcgctttttagagaagcttataaagactaggaattcaatacaatgttaatttactttctcagtcgccctctgctcctttctgtgctgctgcatttcccaacatcgttttttctattattaattttagaataatttaaccagcaattttttattgcaatcattacccgagcacaaccatatttgtaaaatagctaaaatgtaaaatgatactttttagtttattttataacaaccgcaaccaaattctgtgaaaatacagatatgaaaacggtctttgtcattttctacttcatggcattactataaactactaaattgctggtcattcatccgaacattcgtcaaacactttctcaattcagtaattctcttctaaaaatatttactacatgctattaggttggtgcaaacgtaattgcggttttttggcaagaactgtaattacttttgcaccaatctaacacaatttgccaagtaccgaactaggccctggggacacagttcctgccctcaggaagtttttgctgtagtcattcatcacctcagcactggtttgacccaagatcctagggtacacaaacatatgcagattttttttgtttgcacttaataatcataacctccccttaaaactatactatttgagaattggaaggagagagtccttttatttgctgagcaacttaagattttggagtgggaacttaaaaaagctgaactgctctaaattataaaaggaaatgaatgtaaattctcatgaaatatccaaacagtgagagatgggagtctggccactggatgggaaaacatccaaacagtgaggtgggatgctgaccactgggtgagggaaaaaatcctaacaggaacccaagatgactgtgtagctaataaaaagattttgaaagccaaagtgaccactatggttacagagtttcctgctctgcaatgagcattatcactcttaccaaggtcttcaggaaagtctccattacccacaagtgctcggtttggtgagttgttttggtggaaatgtatgaaatggctgaattgagcttccataacaatatggtaaataaaaaggcaacacatgtaggaagatgagtctagaaagcagatgagatcatgagtatgtgatcctcccaagaatttttagaactcttcaggaaacttagggcttccacaaactatgaaattgtgtttgaatcaagtttaacaccgatctcaaacatggaagctcccgttgacatgtaaaccccatgaaatagaagttttgtgtttccttttcactactatatacgaaaaatgaggcacagagtgggaagaaaagacagatacggactttatgtattgtatcaagcatacaataaagaagaaagaacctcacagattaaataacttacacaaaaacacagagatggtaagtggtagaaccaagattcctaccaaaatccaattctgagccaatctctatataccatatcacagtgttagccagatatccaccaaaatctatttttcccttccatagctaagaagtggctaccatccaggtgtggtcatgtgactaattctcaccaataaaatgtga

SEQ ID NO: 914634 - DNA, 4001 bp, Homo sapiens
aatgccctttctgaattccaagttgttcaagaatcctcagaaatgttgtaatgaaactaacgaatttttgaagaggggtaggtttgcccctttacactctttctagtttttaatgatttggtagctgtctcagacataaagagagaaaaggtatttttaagaataataaaatttgttagtttcattacaacatttctgaggattcttgaacaactggaattcagaaagggcatttgacatgattggagactgaatttctttttaagataattttcattttttaaactatattaattaaattagtatatattttaaactatatatttttgaaactataagataaggttcattttttccaggtctttacagaggctaaccaaggttgtggcattaagaaaacacattggatagggaaaaattatggagttaaatcaggatgatactgaatttaaaattgcaatgatgaatactgaagttataaagtaccttttcgttctccattctgtaaattcctcatacatttagagtttaaaaatgaaaaatctggagttcctccccaaatcccgatggttcaagtagtccaatcaattgtactaaaagttttaatatccttaaagaaaaaaggaaatagaaaaagttagagaaaaacaagaaccaaaagatctgttgaaaattccttcacggacaagaggctacggaaacaaagcctaacgaaaaatgacaaactagatttacattttattctcgaccagagatcgccccactgagcggagaacgccaacaaatgccagtaaattccttcagcaaacggatcggcggtcctaagacttcaagcaacccacggaatttctagtgacagccctctcccatctgtagaaaaggcgagccattctccggaccccagcgaatactttaggaagcacccacctgttcgcagatcagggctccggactaagcgcacgagcccaggtcccagctgagcgcacgcgaccccaagtaactgggtacaagtctgcatctagatgcctggatttctccccttacacacacgtgcacaggctcagcagtaaagtcgtgggaggtcgcttgacaggaaagttccaaattcagtcccaaagctccaagtatgcagttgggcatttaaagagtcttataattaagactttttttttaaatttaaaaaagggcttccttaaagatacaaagcactatttactccctgttcgggtggccagttcacaccacggcgttagactccaccttggaaggctgtatttgcccaataaggcaagcaggtactgtcccccggccgccactcgctcagtgcacttcccccaactttcggccaaaggcccctcccccaggccctgtccgcccgccgcagtcccgacagttcccggacagcatcatcgtggtttccaggacaacaattcccgaccaatcagagggccggaagcgggcctgcgattggccgacggcgccaggggcggggccggaccttccgccttcgatttaaaaatttggcgcggaaagtcggaccgtggccggcgcctccccttagctgcgcggggcctgagcgcgggcaaacccgcgcccggaaccacggcaaccccgcccctccccctcgttcgcccccgcccctctgcgcgggagctcagctcctccctcacggcccccggcgaagcgggaggcgggaaacggccgccgccgccgccgccgccaccctcccgagccctctcccggtgccgtgtcgcccgggcgccgcgcccctctgcgtcccgctgacctgtcagtccacctcacggcgggagccggcgggggctgagccgggactcgtcagcaccgctgcccctctcaggcccgggagcccgcgtacctggcagtcagtctttccgcagcgccgaggtgggtgccggagagagacgccgggaccgggactggcgggccggctggcgggcagagggagcgtgaccgtccaggagcagccaagcccccgatttgaaattaacccgctcccggcgcgagccgataccgcgggcggggagggccgctcccctcccccacgcccgctcgccccggccccggcccccgagcgccaatccgagcctcccgaccgtagccgccggcgaatcggtgcaggcaccgccctccactcccgcctctacggcagagttgggggaaaagttcagcaacttttttttcctttttttttttttttgcatacaccccctccccttgctcaaagttggggaataaaatttggcccgtccggggctcgcgggctgggccgcaggcgccctgcgattccccgcttggggctatctcacccctgcccagccccaggccggctcacctgccctcggactccagccggacctctcccccttgcacccctggcatgcatgattgtgctgcccaccgtctgccccgtgcctcgcagaaactggcgcgaggagggagaagcttggctactggtgcctaagctccgtgggctctgggccttggcccagcggtgagaactcaggtgtaggaggaagaggaggaaggcggaaaaccctccaaccctgtcctcgccgtctttcctcagggtctcccacccactcctccctttctcttccctgttgtctttccctctttttccggtctccgagcctcaggcagctttagcctggttccctgtagagccctagcagggtcggggagacacttcgatccttcgtcctcactttgcagaacgggacaccgaggcccggggcggcggcgctgcctcggctgcacctggatcatttgcgcccgcgttggctccctttgctctcctctgccttagacttttctgcggactggtgctgagtgttgcccaaccgcgccgagatctgggcgccggtctctcgatctggactcggtttggctcgtcctcctctgtaatcgcgtgtctttaggctccagcagggcccggggccacacttccccactcccaccgctaacttggggatcagtgactctcccattgctgactagcagggcgaggcatttttattttctgcgaaacgcgatgagggcggggatgctatgatattgaggctggggtcgcagcgcagcagctgccggccatagggccaggggtctccgtggcgagcgaaggctcatctccccgcggaacgcgaccgcaggcttgcggtgtggccgccctggaatgttggcgccgtcgtgtccctgtccccctttcgtcgccagctgaggtgcaggtcttgctcaagaaggcgcttcgacctgaaagcaggcctttcaggtactgtgcagaggggccactgcctgtggctcgcagatttgaaataaagcagaggtcactatatagggttccaccgttgctagcactgagcggctggttcttactaagcccaggtaccccttttttggagcaagactgggttctaaatgtatcaacaaaaagtggggagttggtgcttctgctttagccactagctgttggccagattgtcatctcccccaaccccctgaatggtcagcgctcccaagagtgcatagattcagctatgcctaatgtacccgaagttattacagccccggagtcctgtgggccataaatcccttttaaagttctttagaagcagtctgcctcatgcacctgtgttcagagatagtgactaattcgttcaaatctgtgatctacagggccattcatgctgcagatgtctgagtgacagttacctgtaaggcacatcatgcagggagcagccacctctggtgacacttgacagatggcctctcatttcatactcagcacaggtgtgaaagcatgggttatgactctgagagggaagcagcattttaaagtgacaaacccaaggtctaactgtaagggacaggactgggatttgaagccaagggtgtttaacgtctcagggctttccactgaaagctgtgttcaccactgtgcggcgtgctcatccttacttgcttcataggatagttgtgtccca

SEQ ID NO: 914635 - DNA, 4001 bp, Homo sapiens
ctcagaaatgttgtaatgaaactaacgaatttttgaagaggggtaggtttgcccctttacactctttctagtttttaatgatttggtagctgtctcagacataaagagagaaaaggtatttttaagaataataaaatttgttagtttcattacaacatttctgaggattcttgaacaactggaattcagaaagggcatttgacatgattggagactgaatttctttttaagataattttcattttttaaactatattaattaaattagtatatattttaaactatatatttttgaaactataagataaggttcattttttccaggtctttacagaggctaaccaaggttgtggcattaagaaaacacattggatagggaaaaattatggagttaaatcaggatgatactgaatttaaaattgcaatgatgaatactgaagttataaagtaccttttcgttctccattctgtaaattcctcatacatttagagtttaaaaatgaaaaatctggagttcctccccaaatcccgatggttcaagtagtccaatcaattgtactaaaagttttaatatccttaaagaaaaaaggaaatagaaaaagttagagaaaaacaagaaccaaaagatctgttgaaaattccttcacggacaagaggctacggaaacaaagcctaacgaaaaatgacaaactagatttacattttattctcgaccagagatcgccccactgagcggagaacgccaacaaatgccagtaaattccttcagcaaacggatcggcggtcctaagacttcaagcaacccacggaatttctagtgacagccctctcccatctgtagaaaaggcgagccattctccggaccccagcgaatactttaggaagcacccacctgttcgcagatcagggctccggactaagcgcacgagcccaggtcccagctgagcgcacgcgaccccaagtaactgggtacaagtctgcatctagatgcctggatttctccccttacacacacgtgcacaggctcagcagtaaagtcgtgggaggtcgcttgacaggaaagttccaaattcagtcccaaagctccaagtatgcagttgggcatttaaagagtcttataattaagactttttttttaaatttaaaaaagggcttccttaaagatacaaagcactatttactccctgttcgggtggccagttcacaccacggcgttagactccaccttggaaggctgtatttgcccaataaggcaagcaggtactgtcccccggccgccactcgctcagtgcacttcccccaactttcggccaaaggcccctcccccaggccctgtccgcccgccgcagtcccgacagttcccggacagcatcatcgtggtttccaggacaacaattcccgaccaatcagagggccggaagcgggcctgcgattggccgacggcgccaggggcggggccggaccttccgccttcgatttaaaaatttggcgcggaaagtcggaccgtggccggcgcctccccttagctgcgcggggcctgagcgcgggcaaacccgcgcccggaaccacggcaaccccgcccctccccctcgttcgcccccgcccctctgcgcgggagctcagctcctccctcacggcccccggcgaagcgggaggcgggaaacggccgccgccgccgccgccgccaccctcccgagccctctcccggtgccgtgtcgcccgggcgccgcgcccctctgcgtcccgctgacctgtcagtccacctcacggcgggagccggcgggggctgagccgggactcgtcagcaccgctgcccctctcaggcccgggagcccgcgtacctggcagtcagtctttccgcagcgccgaggtgggtgccggagagagacgccgggaccgggactggcgggccggctggcgggcagagggagcgtgaccgtccaggagcagccaagcccccgatttgaaattaacccgctcccggcgcgagccgataccgcgggcggggagggccgctcccctcccccacgcccgctcgccccggccccggcccccgagcgccaatccgagcctcccgaccgtagccgccggcgaatcggtgcaggcaccgccctccactcccgcctctacggcagagttgggggaaaagttcagcaacttttttttcctttttttttttttttgcatacaccccctccccttgctcaaagttggggaataaaatttggcccgtccggggctcgcgggctgggccgcaggcgccctgcgattccccgcttggggctatctcacccctgcccagccccaggccggctcacctgccctcggactccagccggacctctcccccttgcacccctggcatgcatgattgtgctgcccaccgtctgccccgtgcctcgcagaaactggcgcgaggagggagaagcttggctactggtgcctaagctccgtgggctctgggccttggcccagcggtgagaactcaggtgtaggaggaagaggaggaaggcggaaaaccctccaaccctgtcctcgccgtctttcctcagggtctcccacccactcctccctttctcttccctgttgtctttccctctttttccggtctccgagcctcaggcagctttagcctggttccctgtagagccctagcagggtcggggagacacttcgatccttcgtcctcactttgcagaacgggacaccgaggcccggggcggcggcgctgcctcggctgcacctggatcatttgcgcccgcgttggctccctttgctctcctctgccttagacttttctgcggactggtgctgagtgttgcccaaccgcgccgagatctgggcgccggtctctcgatctggactcggtttggctcgtcctcctctgtaatcgcgtgtctttaggctccagcagggcccggggccacacttccccactcccaccgctaacttggggatcagtgactctcccattgctgactagcagggcgaggcatttttattttctgcgaaacgcgatgagggcggggatgctatgatattgaggctggggtcgcagcgcagcagctgccggccatagggccaggggtctccgtggcgagcgaaggctcatctccccgcggaacgcgaccgcaggcttgcggtgtggccgccctggaatgttggcgccgtcgtgtccctgtccccctttcgtcgccagctgaggtgcaggtcttgctcaagaaggcgcttcgacctgaaagcaggcctttcaggtactgtgcagaggggccactgcctgtggctcgcagatttgaaataaagcagaggtcactatatagggttccaccgttgctagcactgagcggctggttcttactaagcccaggtaccccttttttggagcaagactgggttctaaatgtatcaacaaaaagtggggagttggtgcttctgctttagccactagctgttggccagattgtcatctcccccaaccccctgaatggtcagcgctcccaagagtgcatagattcagctatgcctaatgtacccgaagttattacagccccggagtcctgtgggccataaatcccttttaaagttctttagaagcagtctgcctcatgcacctgtgttcagagatagtgactaattcgttcaaatctgtgatctacagggccattcatgctgcagatgtctgagtgacagttacctgtaaggcacatcatgcagggagcagccacctctggtgacacttgacagatggcctctcatttcatactcagcacaggtgtgaaagcatgggttatgactctgagagggaagcagcattttaaagtgacaaacccaaggtctaactgtaagggacaggactgggatttgaagccaagggtgtttaacgtctcagggctttccactgaaagctgtgttcaccactgtgcggcgtgctcatccttacttgcttcataggatagttgtgtcccattttatagagaagaaaactgaggcacaaaagggtt

SEQ ID NO: 914636 - DNA, 4001 bp, Homo sapiens
gtaaattaacagcagttcataaataaggctaatggagactatgttccttccagttttggacaccagggacttcacacactactcccatctttatctattttaaagaaaatgcttggaacagcaataagtaaaataataggcagaccaaataactttaagaacatggacaaatgggacatgttgtgacatcttgggtttatcaagtgcatttccgtttgtatgttcatggaatcctgcattcttagctcgcagaagagaagatgcaggctgagagaggtcacgtaggagtggaacacagatattttcactccaagtatggtgctcttcttacatggaagtcagtatggtggacccaacaggagctccttgccagtgtgtgcatctgagatgtactgatctgacaataggctttttctttgcctcagattatcagaagcaatagtaattctcttatttgactaacatctaaaactattaggaaatatgcatgtaagttcacttttttaaacctattagtagttggacaccccccacagacaattcttttgtaattttacaaaatgtttgccccctaaacagagcattttgcagaccccataaataagctgccaatttggtaaaaaattatcttaaaaagaaattcagtctccaaacatgtcaaatgccctttctgaattccaagttgttcaagaatcctcagaaatgttgtaatgaaactaacgaatttttgaagaggggtaggtttgcccctttacactctttctagtttttaatgatttggtagctgtctcagacataaagagagaaaaggtatttttaagaataataaaatttgttagtttcattacaacatttctgaggattcttgaacaactggaattcagaaagggcatttgacatgattggagactgaatttctttttaagataattttcattttttaaactatattaattaaattagtatatattttaaactatatatttttgaaactataagataaggttcattttttccaggtctttacagaggctaaccaaggttgtggcattaagaaaacacattggatagggaaaaattatggagttaaatcaggatgatactgaatttaaaattgcaatgatgaatactgaagttataaagtaccttttcgttctccattctgtaaattcctcatacatttagagtttaaaaatgaaaaatctggagttcctccccaaatcccgatggttcaagtagtccaatcaattgtactaaaagttttaatatccttaaagaaaaaaggaaatagaaaaagttagagaaaaacaagaaccaaaagatctgttgaaaattccttcacggacaagaggctacggaaacaaagcctaacgaaaaatgacaaactagatttacattttattctcgaccagagatcgccccactgagcggagaacgccaacaaatgccagtaaattccttcagcaaacggatcggcggtcctaagacttcaagcaacccacggaatttctagtgacagccctctcccatctgtagaaaaggcgagccattctccggaccccagcgaatactttaggaagcacccacctgttcgcagatcagggctccggactaagcgcacgagcccaggtcccagctgagcgcacgcgaccccaagtaactgggtacaagtctgcatctagatgcctggatttctccccttacacacacgtgcacaggctcagcagtaaagtcgtgggaggtcgcttgacaggaaagttccaaattcagtcccaaagctccaagtatgcagttgggcatttaaagagtcttataattaagactttttttttaaatttaaaaaagggcttccttaaagatacaaagcactatttactccctgttcgggtggccagttcacaccacggcgttagactccaccttggaaggctgtatttgcccaataaggcaagcaggtactgtcccccggccgccactcgctcagtgcacttcccccaactttcggccaaaggcccctcccccaggccctgtccgcccgccgcagtcccgacagttcccggacagcatcatcgtggtttccaggacaacaattcccgaccaatcagagggccggaagcgggcctgcgattggccgacggcgccaggggcggggccggaccttccgccttcgatttaaaaatttggcgcggaaagtcggaccgtggccggcgcctccccttagctgcgcggggcctgagcgcgggcaaacccgcgcccggaaccacggcaaccccgcccctccccctcgttcgcccccgcccctctgcgcgggagctcagctcctccctcacggcccccggcgaagcgggaggcgggaaacggccgccgccgccgccgccgccaccctcccgagccctctcccggtgccgtgtcgcccgggcgccgcgcccctctgcgtcccgctgacctgtcagtccacctcacggcgggagccggcgggggctgagccgggactcgtcagcaccgctgcccctctcaggcccgggagcccgcgtacctggcagtcagtctttccgcagcgccgaggtgggtgccggagagagacgccgggaccgggactggcgggccggctggcgggcagagggagcgtgaccgtccaggagcagccaagcccccgatttgaaattaacccgctcccggcgcgagccgataccgcgggcggggagggccgctcccctcccccacgcccgctcgccccggccccggcccccgagcgccaatccgagcctcccgaccgtagccgccggcgaatcggtgcaggcaccgccctccactcccgcctctacggcagagttgggggaaaagttcagcaacttttttttcctttttttttttttttgcatacaccccctccccttgctcaaagttggggaataaaatttggcccgtccggggctcgcgggctgggccgcaggcgccctgcgattccccgcttggggctatctcacccctgcccagccccaggccggctcacctgccctcggactccagccggacctctcccccttgcacccctggcatgcatgattgtgctgcccaccgtctgccccgtgcctcgcagaaactggcgcgaggagggagaagcttggctactggtgcctaagctccgtgggctctgggccttggcccagcggtgagaactcaggtgtaggaggaagaggaggaaggcggaaaaccctccaaccctgtcctcgccgtctttcctcagggtctcccacccactcctccctttctcttccctgttgtctttccctctttttccggtctccgagcctcaggcagctttagcctggttccctgtagagccctagcagggtcggggagacacttcgatccttcgtcctcactttgcagaacgggacaccgaggcccggggcggcggcgctgcctcggctgcacctggatcatttgcgcccgcgttggctccctttgctctcctctgccttagacttttctgcggactggtgctgagtgttgcccaaccgcgccgagatctgggcgccggtctctcgatctggactcggtttggctcgtcctcctctgtaatcgcgtgtctttaggctccagcagggcccggggccacacttccccactcccaccgctaacttggggatcagtgactctcccattgctgactagcagggcgaggcatttttattttctgcgaaacgcgatgagggcggggatgctatgatattgaggctggggtcgcagcgcagcagctgccggccatagggccaggggtctccgtggcgagcgaaggctcatctccccgcggaacgcgaccgcaggcttgcggtgtggccgccctggaatgttggcgccgtcgtgtccctgtccccctttcgtcgccagctgaggtgcaggtcttgctcaagaaggcgcttcgacctgaaagcaggcctttcaggtactgtgcagaggggccactgcctgtggctcgcagatttgaaataaagcag

SEQ ID NO: 914637 - DNA, 4001 bp, Homo sapiens
tcttaatactctaatctgcctagagaaatttaagaaaacgcagaaataaaatgaacggtcttcaaataataaaaagaagagggtaaaaaatgttagatcccaatgtacagtgagattggggcgcacaatcgggtgaaaaatacaaaagtaacacttaacacccaagcttttctgaaatttgaagtctaagatcccacaaactgacaatcccaagaatatctatcttgtctctgcaaaaagaatcctttcccatcttttccgtgaaaatcttagtcatgacatcattatatgtttcagctaggaattatgacagaatttagaaactgcgtgtagaagatgtaacatttattcctaaaactagccaaactgagaaaatgaagaacttacgccactcttctgaaacattttaaggattttttaaaagatattcacaagttgttatatatcatgagaaggagaatcacattttggagtagtatctttgaataaattgtcaagatacttcgttgaccttactggttatcaacctaaaacatgaaactgaaaacttatttatgtcaattcggctcttactggcgagtcaattaaaactcagttgggttaaatgttggtaccgaatgattacgaatacccatttcagagcttaaaaaaatctgattgcaaaacatcgcgcacttggcgaagccaggaacccacacttaaatacatctgcctataccactgttgcccaaaatcttccaggtcgccacccccctcacctttatcttaagtaaaaacgttcaaagaagaaatcacccactcttacttcctcaaaggtagtcactccccacccccaaatcaaaaatcgatcctctcaattcggctcctcctacagaaaaggcgaccttcaggcgcacccggtctccgcggacaggacggaggcggacacaaaaccccctttaataaagtctcccaaactccgcaaatcgaagatcactttccatcctgaaaattccacaagggtcttagagtgacaacccttacgctcctttaacagggtccctaactctgccccgtccttccaactttcttagaaaagtctctaacgtgccttttaaactactagaatctcagacccgcactctccccttaaatccccccaaaggccaaaacactccccatcacatgcaaactgatttcagggcagacttctcagacccacgcaatcactagaaccactctcctttgcctagttcctgcttgctctcggccccacatcaaaatccccgtaggcaatttcaattttctcccgcacgcccgcgttttcctgagtgacacctctccctccccccacagcagcccgctcgtccccgcgccccccgttttaaaagaatttaaaactttcactccgcagtctcgtaactgccagaagctgcacttacattctcgtctccagagaggtctggattgctgttctcgtcactgctcagcttctgcttcttggccgcaggcatgtctgttcccgccggcgcagtcgacacttccctctcggacatattcctccgcctccctccaggttcctgccgcctggggcggggcctccgccacaccgccgtcaagcaagcccggcccgagcttgccgcaaagttgccgctgccgccgccacctccaccgccccccccactgtcgcaaatcgcgcccagccgccgaggcgggcgtgcgtgcgaccccgccacactgctgaaaaaggggcgcgcgcgcgcgccctcccgcgcggcttcctggctccttcccttccccaactcccgtcttgcccttttcccgccgccctcccggcagtctacacgatgtaaggtccgttggattaagagggcagtattaagtatgtctcccttcccaccaccgcctcgagaagaggcgaaactcaaagggatgctccctcacccccttcctccttccaaagacgtttcagccgcaattggcccgttccttcgatctccgacccgctgctagggagcgaaagtctgtggaatgggctacaccaccaatgtcccaggaaacgggggaagatacaagacgtcacctcttgctttagctgtgcatgccacgtttccttaatcttgaacttggaggacagcgcttcctgactattcacggaactattcataacctaattcttccttgaagatagaaatgcaaaaacagtaacctgcttccccctggcttcccccatctggcgaatggaaagtacccgtcaggggatgcgcaggcgccgtggcgtactcttgcgctgggttcgtcgaaacccgcctcctccaagcccctcctctgtttgaattctcgtttgctgaaccaggtagttttctacccggtttccgaatcccagggtggatttcaaagcgctaccgaattatactctagacgcttcgtaaattcttgtcggatatttattctgttgactatttattgtaatgaatgattatccttccagttgctaccaatagtggttaagacttaaatagaaatatcctaacattatgagactagactccaatgagttacagccaaagtgctctttttagctgctaaaggataggccctgaactacgccaaggcctaagaatcagtgctcatctccattatgagattgtgatacttaaccgacaatgttttgcttgtttttgcacatcagatacaatgaaattctagaaggcaacacaactgttaaacttcaccaaaatatttgcctctgttactatatctattctctagcaggtgccagataacattggtgagccttgtggaattattatatgggtcatgaaaccataactgaatgagcagcaggaaaaggagagtgatgacgaaaaataaaatacggcatccgccaccttttttttgtttttcttagaacatgattgtgactacttatctattcgggcttctgtaaaaatgtcctcatctgtaaaaatgaggaggcaggaagggagaaagggacctaccatttcttgggcacctgcttgatgttgtatatcttttctcttctagacctcattacccacctagagtgcaccatccataaaattctagtatacttgaattatttctgcatgataactttataaccaggacatcagtttccttatctgcagattgcaagtcactctttcttttgtagataaagagagaactcttggttgagaatgagaaaaggaagtaaagcaaaggcaggtcagaatgagaggtttctgcagtgaagactttgaaataaagaagccgaaaaaaaattaaagttgaggtctcaatgacggcagtcatttgttcagtacttccaatgttccaggcactactaagcactcctcagttggtgagaagagatgagactggagtagagtaagctcctgacaaagtaagacgtgctttggcatgacattttcatcagcagacagaaacatccttccctttgttaagaacatctttcccaacaaagggaaggacgtttctgaaatatagttctacaagtaaaggataattgactaaagcatttcaaattaaaattactccgtgtgtgagagattagtgggagctgggaagtgggagtcaacgtctagtcataaaattagaaaagtgctgaacatttggataaaggacacatatggtagaaaaatgccttacagcattcatattatctgtaacaaagcaaaaatagtttaaagaggcttattaaaacttgaaggggttatttttaaaatgtttctgatgaatcaggggtgataaatggaaattagtttatattactacgttattgtcactacattaaaggaaaaatattctgacacttgttaaaatagtaaggaacacttaattcaggactattttgatagctgtcaagactatcacaataggagagagatcaggctcaactccaaattacagcaaggagtggggatgtatagtcaaggagcaaagttggaggggttggtggttggaaaattactaagaagagacatcaagaatgggga

SEQ ID NO: 914638 - DNA, 4001 bp, Homo sapiens
tatataaggctgatgattctcactatccaaactcttgatactcaagaaccataaataaatacttcaagaacttggcctcctttgcaatctgaattcacaatgttaactaggaagcccaatagatttgaatattacaggatatttgtatgaaatctctggatcaaacaagcagaaggccaaaagcaactcctgtatcaatgtctgtatcagttaaagtattagtgtgtgacccagacccacacagcacttcatctcctccattcttagcatgtttcttcacctatctctataaaccccttggggtaagaattctgctcataacagatatctgatatatttgcactgaaaatgcttagtcaaaactcattctctttcccacaaagtaaactcgtgaattttataaagtcacagaatagctctgtattttttttcacaactacatgtaaatctgtatttatctcaaaataaaatcaccgaaattgaataaaacaacatgggaagctcccttttagagatgggggccaccaccagagtgacagaatcgcagggccttggtttctcagaaccgaaggatgctccccatctcccaactcaccttgccggcaggaaatttgcggagaaattcaggggtgcggttggtttggccaaaatggaagtggggtggtgcggagagcacgcggacctgagccccgctgtactgagcagcgatgagagccttgaaggccctccagttttcaggatacgtgtacagggtctatgggagaaagagagggacaaaattaatgagtagaagggtcccagtccttaatgccactctccaggatgactttcctgaataatcccaatgtattcaactcacccttttacttcctctggtgaaccaagtcctttagtacttgtcatatgtaatcagaatcctccgaaataccaagaacagaactacacaccaactgctaaataaagcttgttgacagatttgaccttccctaaggacacctctggaagtattctcttcctctcaaatctatctccaagaaatccagaacttctagctccatcagactccatctgcctacaaacatactctcctcccttcccggagccctcgcttcattcattgatggttccgagcgcctgcctactctactgctcagctgctcaccgcttcaaaagcatcgtcctgtctctaaggcacgcacgacgatcgagagatttctagttcccctcagactagccagagataggggatggcatgccgtcttcttaaatcaactcctctctctcaaaaagcctttctttccgtgtcgcgaatatcatccctccggtcctgtcccgcagcgagttccccggcgttgggcttctctattatgccggccagcggagtccaattggtctgacttcactgtccggagaatcctctcgctcccaaacctccctgagagacgacctttaaccgtgccagccggacctgcctacaaagaccctcctcttcaacctgtcccctgtgttactccacaaaacggacacagaagttcgtcaacctgcccagataccacgcctcaaagcggcaacagagccgaacccctttctcaggcttcggacggcccagacccggcatctcttttctcctcttccccagacccttccacctctggcctccgagagccccagcctcagttcccctccaggccctaggaaccctactctccagcagtacagtctgtagacccccgaatcagttccccactcaacctcagaactcctctggcgccgactggccccactcgggcaaaggatggcggtggataggatgacccgaaccaccagagccagcaaacttaccccagccgccatggtgattccgcaaagaaagggggtggggttctcggcgctgccgcaaagtaagccgcccgggagagaagggagggggaaagaggagagccgtggagaaacagcagccggaaagcgaggacgaaacagaagacatacgtacgacagttcggtatccagtggcgctgaattggaaaaagaactgggtgggtggggcctgctggccagcgcggaaaaagctcgggcctgcgcattggagctcttgactggcccgccccccaggtgcagcgggccaatcggagtctagacgtggaggtagacagcgtggagggcggggaagttgtgagaacccgctggaaaagccgcgagttcttggctacgtggcgcggttgttggcccggcgcggccagtgctactgggggcgtccctctctggccctcccagggacaagtgacttgatggtagattttgccaagcccctcacatgattctatgaaactcatgggagcgaggaacagctgctgcgcggaggtggcagtgtgtgtgctaaatccctttagttcctgctctgcttttcctccagaaagggatgagcgtctaacaggggccccggtctgaacccgcctgccaaagtgaggtttgctcacatccaacccctgacagctccagggtgctgttactgcgagcagggcaccggccctccggcccgaagcagggcagggacatgagggagaacgcgccctgtccctcccacctcctccggactcggcccctggaggggctgacgctggaagacctgacatcgtcgcttctgatgttcatggcttttgacccatgttcaggtttgaaatctcttacccagtttaagaacgggatgaactctcctcgtttaaaggagagaatgaagaacgctgaacgcaaatctccgtccttgtgcgcataaatctgaggcgacaggaagaatgtggaggcaaacctggctcttctcagtactgctggagccacccaccgctctgccattcaggaactctgcgcgggtgccaggtgccacgcgcggtgctgcccccgcactcccctcgagctgtgcgaactgtaggaaggagaagctggtggggtggagagcaacagggagagacccatgttcggggtcagacgggagcagctgcaggaagttctgggggaggggaagggggattatgaccagatggaaatgaaaggaaacgggagactgtattaataaactagcagctttattgcccttcaggggccatgtcttcacttgagatgtcgaattgcttgagggaggaaaacctgtaagaaatgatggagatcagggaacaggccttggggatcctggagcggggtcacagtgagcattcggtcagccggggagacagacgccacaaagctcagcaggggctcagtttctggcctctcttcgccaccactcagtcctttcagctcctgggtgacctgagcctcagtcgccagccaccctgctcttgtgccagcgccacctccagctccctccttggtttgctgctgcaagcgtctacgggctcgccgccgcccttgccacactcggtgccacaaggcacagcgccagctcgctgaggagggcagggatgcccccttccctgcctcaccctgagaccattcttgggctgcctcatgtcccttgggcccccgctctgccagggctgcgtggctgggctgcccctcttctccaggggctccatgctttccagtggtcaggggcaggtcccctggctgcccagggctctgcatggcccagtcctgcaccatctctccaacctctataaccatctcttctaccctgtcttccccaccgtcccctgcacatccctgctgctcctctttcccctcctcacagcagtttttctgtccatctactttgagtcttttgcttgtccctccctgagaggactccccagttccacctccttctgaccgcgttctcttggttgcctgttctatatggcaccccagtgcttccctgaatacctgcaccagggcagcagtgagctgggtgaagggtgcaaggggtaaagggatcggcgtagcagagagcagggagctgggggagctgggctgcagaagagggagcagcccccagtcccgaccccgggaggaacggcgctggtactgga

SEQ ID NO: 914639 - DNA, 4001 bp, Homo sapiens
ctgcagtgtctctgcagcaaccgaggggaggggcccggagctggctggagcagtggcacacaagctggggccacctgcggcaggtcctaaacaacatgagtgtctggatgagggtgtggacatcaccagtggcccttttgagctggggaggaacatgaggtctgagtttaagacgcctggtgagaggactggaagccaggcaccagagcagtccccactcacccacacagctgtcctgatcgtcgggctcatagcctggtgggcaggggttggggtgttgagcgggaggcactggtggcgggggtccctcgccgtgtaggtcgttgatgacggcagcggagcggggcaggcacaagtagcccccgtagtggttgatgcacttcatttcccccttgcaggcctcagggatggtcagacactcgttgacatctgcagagaggggcctgctgggcacagccagtctcctgggctggccctggagggagcggaggcaggaacccagctcggccttctctgagatgtgtggccccagcaaagccttcccactctgctcaacaagctaagtctgcctgctcaggacccctccccagggttggccaaggctggagatggggcagctgttcccactgttgccctcattctcggcctgcaagtgggtctctatccctccccacggccctagccctagctcagcccaagatggggggcctccttacccacccctggggacgctaccctcccaggttgtgatgagacaaagagctgggacaggagagtggttcagagaaggcgtacaggatccagctcctctgaggggtagggacaaggtttcctgggtttctgggagaggatgaggccacccctagctcaactggcctccagagagccagagctggcctctgtgtagcagagctgggcatagaacgggctgctgggctcccacggcagttcttggaggtggggctgtcccttggaaagcagctatcaatccctttccgggttcctgggggtgtttggtcccccaggcacacacaccccggcagtgctggctgtctgggtcccactcatagccatctgtgcattcctggaagggaaccagaagtggccagtggtcaccctaagatctcctccaactggccaggccaagactagggcctgagcctggccaccctccggcctgctccaaacaatggcccccagctctccaccagccaggggaggaagacttccccggcagcagtcaccctgggtcccggtctcttcctccctacccttcctgtcccaggccagcggccctcactgtccccaccgtgtagctgtcgggctcttcagaatcctgaggagaagctgatcccaagagcaacagtagcagcgcccagagcagtagagacccgggtaggcaggaggcgcaggggagcatcctggggctgcgagatggtggacacgggtcaggggcctctgcccgcggcacctcaactccctgtaccgggagcccgagcccagcccccgccactgcccgctcaggaccgtgcttgggcctcggggcctcccagggctgggggccgactcctcacaggcccaggtcccaggcccgggtcccaggcccacccgccccggccaccccgcccccgccccgcgcccctgcggcgaaggccgaggagcgcgggcctctgtgggcgctacgctgccgcggactcggccgagactccggcccacgccctcccccacggacggtcacagccactcacttgggcccgcgacacccccgcggcccgcggctctggcggctcggctggctcgggcaatgcctgcgggcagacggacgggcggacggcacagctccctggacgcgcggccccaggaagcgccccccgcccgcccgcctgccgcggcgcggcccaccccggcgcctccgcccgcccttcggcggattcctgagccagcgccagggggagggaccccgaccccccgcttctccgcccccggccagccacaggcccctacccggtcccccgcggcgccgccaggagccgcctcccggcgccggaccagggtcccccagtgctcgatcctggggccccgaccttgatgccaggcccccagactcacccgggggcccccagacgctcaccaaaaatgtcatcctgctcacctaggtcctacctaatctgcgcccccagaatttcatcctgtgcacccacaccgtaatcctggagcccccagattctcattgtgcgcctcccgagatcgtcctgggtacctagagcccacctaacccagtcctccagaccctcaatctgctccctgcaaaattttattctctgccccagaccgtcattgtaaaagatcctaaaacttcatccagggtccccagaccctcgcccaggaacgagaggctcccaggagcagaactgtccttctcgctccctcctgccctccacccccaggaccgtcttcagccgggtggtcctttcactacacacggcctcccccacaccctccatccacaaagctacaagtttgggggcgagggcggcagttcccttttggcacaaaatgaatggaagcccctgagaaggagggcagggctgatgtcggacgtgcgggatgccagagtcgggtgccaaggcgcctcctcgacctcctcgcaccagcgtcccccgcccggtttccgcctccgcccgaagtgggggcgtgtccttggggcggagtatgggcggggctggctcccaggaagggcgtggcctctgtttgcccacgtctttgggcggggccaggcgggaaagcactgcgtgtccggggatcccccgcctggggcccgcccttcctttccccttgccatccctgcttatccccgcagtcgccctccacgtgaccccggggagggagtctgccgaggaggggacgtgctggtgggtcccgcggcgagcgcctggggctcaggtgaactgcgcagtgcccgctcctcgccactctgccaccaccatccctcccagctgctggggcagaaggttaaataatagctctttaggggccggacgcggtggctcaagcctgtaatcccagcactttgagaggccgaggcaggtggatcacctgaggtcaggagttcgagaccagtctggacaacatggtgaaaccccgtctctactaaaaatataaaaattagccaggcgtggtggcgcgtgcctgtagtcgcagctactcaggagcctgaggcaggagaatcacctgaactcgggaggtggaggttgcagagagcccagatcacactgctgcactccatgggtgacagagggagactccatcttaaaataataataataataataggcccgacgcggtggctcacgcctgtaaccccaacactttgggaggccaaggtgggcagatcacaaggtcaggagttcaagaccagcctggccaacatggtgaaaccctgtctttacaaaaacacaaagaaattagctggtgtagtggcacgtgcctctaatcccagctactcgggagtctgaggcagaataatctcttaaacccgggaggcagttgttgcaatgagccgagattgtgccattgcactccagcctgggcgacagagcgagactccatctcaaaaatagtaataataataatagctctttaaaacgagaaagacagtaacaagtgttggcaaagatacggagaaactggagccctcatgcactgttggtggacaatggtctggcagttcctcaaaatgttatcacatgacctgacaatttcactcctaggtatacatacctaggataattgaaaagatatgtacacacacacaaatctgtacgcagcgtttatagctgcactatatataagagccaaatgcagaaacaacacaaaagccgtcaactgatgaataacaagatgcagtacatccacacagtcgaacattattcagccataaaaactaatgaagtactgatgcatgccacaatataggtgaattctttttttttttttttttt

SEQ ID NO: 914640 - DNA, 4001 bp, Homo sapiens
ccccttggggttagatgttcaactgctgcccaggaggggtgatgcttgaggggacgatccggcccagggcagcacgcgaactggccttgcctgtacccagccccatgcctgcaccctctcgtgatgctggggtttgcccagctcactgttcgtctgaggccaagccaggataagtgcctctctgttaaccctgaggatgctgaggcccacagaggtttggagccaaacaagtttacacggttgagcctagagccctccaacccagagccaagttcccttccccaagcccaaattgccagcgatggcagagcaagggtaactaaggggccttcccagaaaggggaagcggacagggggtgcctagggagggcagggcttggctgggcagcctgactcaggctgggcacgccctcctgggaagctgcaacctgggcaggggcagcttcccggcctgggctccaggctaagcagcccaggaggccctacccacagccgcctgtgactcagctgcgttgacactgccggcaccctcagcctgctgtgcccagtgtttccctggcctcccgcaggatgctggagcaggagccagaggccagagttcaagtgccagcccccaagctctcccaggctctgctgaaagatgtgaatggccctctagcaggcccagtgtgggcaaggccaaggatatggcagctgcccaagggaccccagcctcctgcttactcccctccccctggaccccatggtcccttcctgccccagcccttcccctggggagcctaaatttagccccgcctggcgggtgaggcccccacagctgtgccctaatccagccaagggaagctgacaccagcaagcacgtatatttagggtgtgacgcaggggcctgggcagctatgggtggcggcatgtgaacgagatgcccctgaacctgttggtagtccaggctggggcctgcaccctctggtgaatcacccctcaccctgccaccttgccctccgcaaccctctcctcccggacccacaacctcctaggtcctcaggcccctttaagctgctccccgcctccctcctcaatcctcccagcactcagtttccccttttaaggacattgtggagatgtttccagcctcccagcactctggctgaagaggcgggagttggaggggttcttctggctcaacaagatggcaggggaggagggggcaacatctctgttcttagctggactaagtaaggtcagggaggctcctgccccagccctagccacctgcagacctcaaaacttgatcccttttccaatgccaccctgaaccacctttctggcacaagacatgcggcctccctcccccagccctgaccgcagctgaggaaggagtggacacaggcagaacctcaggcctgaaagtcctgacccccgcgcagggaaggctgcccacgcccccaactccaggggtcccacaaattgcaagggcacttctgaatctccgagcctgggaacggaaccagggcccaagctggggtgggggcccatttggtcattgggctgggggggcagagtcctctcaggctcaaagggccggatgaggtcccagcaagttcgggggagcccccccgcctccctcccactcaccatttcttggtgcactccaacactagctcgtggtaacaggccacgaactggaacttggccgcccgcttgcccacgcgctgcaggcgcttccacaccgaggtcatggcccccgccaccccgccgcccacttctcaggcccggggctcccgctggcccgccaccgctggcccggcccgggtccccatggcctgtccgcgccgcccgccccgtccgtgcggaggtgtcccaggctccgacccgggaccgcgctctccgctgccgccgctggggcccgcagggtggtctggctgagtctgcggggtcgcctggggcgcgtcgggtggcgagcgcggagctgggagcgcgccgtttcctggagccgcacccccgtcggaaggcgggcggggctccggcgcggggcgggggccggggcaggagcgcgggggcggggcgacccggcttccggggcctcgcgccgcgacccgggagcgggagcgggggcgggggaggggggcgtggaaggggtgtcgcccgaccgcagtgcccgctcggtgcgcgcagaggctgcgtggagagagggcaaccagcaacttggtgccaccctagagagcgctgcccgggccgccttccttcctgcccgcagccctgggaggtacgtactactggccccctttcaacggctgggaaaactgagacccagaaaggggaagggacttgctcagagtcatactgtgaatgtggacgaggaccagctctcaactccaaggtgcagccacccacgtcttaaccagagcaggaaggcgtcagtaacctcggtggcccaacctcagaacctgactctgctgtcaagggggaagataatcccaaaccccgacaagtagctggagaatcataactgacctccaaccaagtgtgactttgggcaaagcgctaacactctgagcctcagtttcaacgtctattaaatggggataattgtagttccgccttttagggaatccctgagaggatgaacctcagaaggcatttagcagaaagcctggctgattttgccatgcctccttattaaatgggatgcgctataatggatggggaaaacgtgtcatttttgtgtatgtttactctccctccccaggaaagcctgcctggagcgttagcagctgtgaacccctagattagagcccttatcgcctacccacccgccctgcatggtaatgagcctctgcaggtgtcagctgccctggggcaataggtcagtttgttccttcccgctgctctgcaaggtgtgtaaatggacaggagcccggtgcgtgactgctacttggtttaacgggatgtctgagtgccaggactgccatctgggctgcatctccaggaggcaaatggctgcagcagggcgcggggatgtgctgttcgtccgcacacctcggtgtgcggcttcacctcttttcaggaggttgtgaggtgtcgtgtgcgcgtgtagggggctgagtacccactgtctccgaacgtgctggcttcttccggtgggcttgacaactgggtttggttctcagtcccagcggtgtgggtccccggtttcctaagaaaccttccacagataactgtaaagaccgctagtgctgtggggagagccggcggtcttcacagactgagcggggaatacgggtccctggaaccccaatcaaacttcaccgccgcggagtctcatgcttggcctccgggaaggcccgaggtgccgcgacttcactcccctcggcctctgccacccctccctcccacccgcggggcgtgaggtcccaggccgttcccggaggcgcctcccccgcccccgccggggccccttgctccggcgactccggccacccatttcctgcgccgcctcaaccccgccccgcgcggggtggaaagtttccctcctcaaggtgggcggctccttctccttccttcccggcaggcagggaaagcccgaagcgaactgggaggagggagcgggggactcggaggtcgcgggcgagagaggggaagtgactcgaccgcagtcacccggcggctgagccaggctcggccagcaggcagcgcccccagccccgccccggcgggacggcagggccttcactcggcgcggggcggggggggagggggtctcgggcgccacctgctggcagagcgcggggccgcacctgccacaaacaccgcggtcttcccgccccagagccagccaggcagagcacaacgacgctgagtgtatttatttatctacgcgccctggagaccggcccctaaatttaaatatccagcacggggccttggccctcctggccgtgggtggttattgggacgggtcctggagcccttccagggcagaggaacccagagcccggaggtgg

SEQ ID NO: 914641 - DNA, 4001 bp, Homo sapiens
gggacggaggtggagaccaagaaaaggagcgcaggaatggctcagcttcctactgcggccctgctgctgaggggagtggggctgggatctgcaggagggcttggtggttaccctggaagattctggggaggacagaagctgggggagccgacaacgcccactcttagacccccagtgggtttactctgggaaggggcagggcccttggaccagggagtggtcactgagggtctcactggggcctcggagacaaaggacggcggggcgacagccacgggagggtcaggctccgagtgaggggtgtgccccggacgcgccccccgccccctggagtgatgggtgggtacctgttgaggaaagcgttgccaaacgcgttgagcttgcggaaggggcgccgcgggtccaccacgagcgcgttgcccggcaccacgccctcagtggggccgtgcatgacggcgatgaaggagtcggtggtgggctcgggcccgatgcgcatccccgggaagtcctgctcgatcaggtgtcggatgaaggtggtcttgcccgtgctgtactgccccacgaggagcaccataggcttgttgtcgaagtcagcgtcctccagcgcgggcgagtggaactcgtggaagcggtagtgctcctccaggggtagcagcttctgcgcgtacagctgccgcagcccctcagccaccgtctggaagagctccggctccttcttgcggcgggcatccttgctgacccagctgaacatactgccggacacggggctggctgctgcggggcagagcggcggctgagagcggggcgagggtgcggagccgaggcggggccggccggggcagggaatcgggagcgacccacactgcgcaggcgcacagcccagcccgtcgaagcgccctctgccgaatgctgcgcacccctcgcggagcggcctttatagggtcggtccctcagtggcggctagcgccgccgcggcgggggcagggcggaattgggggcggtagggaggagcccctcccagccccgcccctccgactggtgccacgtcttcccctaccccgcccccattggctgattccaaatctcgcgaggctgtggtccgggtgccgtggcaaccgcacctgtttcgccccgcccctcgtagggaggctcgcgaaagtgctgcggttaggaaggcgaggagcgggcgttcggcggagacggcctctgggccgcgcgccttccggcaccgtggcccccccacacccccgcgggatggctccacgagacacccagtcaggcaccctggttccctgactacgcgccgcgcccgccgttcgccacgtgcggtcctccagctggctcggaatccccggaagcatcggagtacccccaggcggcggcacctcctcctctcagcccagcttcccagacacacactgtctttgtcccctcatcttttatctgctttgggagagggagagacaggaaagtggtagcagagcaagctgagggagtagagaatccggggcgggctggtgactggggaaagaaaaatgggcagcgagaggcctgacctcccctcaggccgacggggtgggaatgggagagggacgcaagcgagggaggacatgggtgacaccggactcgcgcgggagaagagaaggcttccccacaaaggctatagctggggcaaggcagggagggcatgaggaggaagttgaggctctctggccacttgcgtattgggaagtgaaatcggaaattccctatgtggggaagaggggaagtgtgggggcaacaatgaaatcttgtgggaatttagggggaagtttaaaaacccaaatacttccactttcctctcggggtcaccaccatttaccatcatttactgggatctgtgccctacctccccttaccagttcctggctgttccatggggctcactcccccgccatcctccccggccacacacagacccctttggctgtccaggctggtgagaatcttcagtgggtgatgtcagagctttggggactgattgttatgtaaccagtatcaagacaccaacctgtggtagcaggaccctgggggctcttaaagagatctgaattgaacctgcgactttgaaagcctcaggtccaacttcctcgcttctgggagatgtggaagcctggagggctaggggcctgtatcaggggataacttgggctggtaggctaagaggaagaggcaggaactcaaatctgagaacgggggatatctcaggggaactgagtggtggaatctagagaggacacgatgggaggtttgttcgcctaccgcttgtaagatcccttccgagggaatagatagttcccttgccctcccctcttgctccctaaccattggagagcggataagtaattccaaccctgcctgcaatcttacgccccttagtgctttgatttgattcttttcatcatagtaaagcacacaagctactgcccccccccttttttttttttttttttttttttggtgttattctcaaaagaagatactgaggctcctaggcagagctgtcaccagaggctgcatgccaattggtgacgaggagcctccggcgggcctagtccagacttcccgggtcagccttagaagccacagtgtttgcctcctactcagcactgttagggatccaccccggagatgcagtttctgggttgatctagggaagggcccagggctgaggatcctgaatgaagtagttgttcagtcgtctcaatgaggctgctccaaactggcgccccggcagcattctcattgacgcgccatggttttcaaatctccccagagccctgtgtgctgggaaaacccagccctagaaaactgaaaacaacaaaatgttcctgggttatttataaacaaaacccagaccctgtcgttatgtatggccacttgactttctccaaagatcttaaaggactgaaagaagggatctctgtcaccctggtgaggcccacgtgaccagcaattagtttcccccaatttcatggagttggcacccagcttccaggcagcttccttatcttgtcatgccccacaccgaaaatgtcctaatttttttttcttttgtgttttctgagtagggcagtttgtttggtgggaaagttgtataaaatgtgaatgcaccctttcacttttggtttctccgctgtttcactttctgcctgtctgcctgagcccatggcagattgatggagggttcaagtatttttcttttatctcagaaactgtgccatcccccactcccagtgttttattcttcagttaataaatccattccctgcaaacccagggccttgaggtaccccctagctctcctcagaaacgccctcatccagcagaaaggggcctcacctcccctctaagtggtctgcttggtcctgtcatggcctgatctaggaaaacatctacaaggtccctagagacaacttaaaaaaaaaaggccaggtgcagtagctcatgtctgtaatcccagcactttgggaggccgatgcaagcagatcacctgagatcaagaccaccctggccaatatcacaaaaccccgtctctactaaaaatacaaaaattagccaggtatggtggcgtgtgcctgtaatcccagctactgaggaggctgaggcaggagaatcgcttgaacccgtgaggtggaggttgcagtgagccaagatcgcaccactgcattctaacctgggcaacagaaggagactccatctcaaaaaaaaaaaaaaaaagagaggtgccttttccgcttgcggtgccgtgcagtgaggagctcttatctgtgctcttggctatgccatccaagggccagctgcagtccgtgcaatccactgcaaacatggcagtggcctcatcaaggtgaatggatggcccctggagatgatggagccgagcgctgcaattcaagctgctggaactagttcctagttctgcctctgggcaaggagcaatttgctgacatgcacacgcatgt

SEQ ID NO: 914642 - DNA, 4001 bp, Homo sapiens
tgtgccctcacaaggaaagtgaagaggactccgcctcttcaggacccttagcccaaagggctgcactcaacctggccttgacagacaaacatcaacagccgtaaaacaggagggcgggctgaaatgcctggaagtgaacagaccctgctgaaggtcagctctgtgcctggagtaggcctggccaccagcttggctctagggcaagctgccctgcacagctggatggcgtctggaaaggaatgtgaccgtgcagggcggggacctggaaggcaggattcaaagattccttcagaggctcttcgctggtgcagaattatgaaaggcatgtggagtccgtgaacgtggggtggcagggaggacagggtctgtgaagtactttggtatgtcgcctgggggttgggacgggcatgtctcgagtttctctggagaaaagtgagcttgggcattgcactccttgaggggcgggagcactgtgtttcattcacagcactgagacaggcagagtcctggagctcactctcctcgcgtgcagaggccacttaactggaaaagtgaggtccaagtgggtgaaggaacctcagattctgtccctcagtgcacagaagggcttagggccagaatctcattgcagggctcccactgccaccacctcatcctgcttcctgaaacccctcagggcagcactgacctcttgagagctgccattgggagaagtgttcgaacctcaactgtcccctgcctccaaggggctgccccaaagtcagcaagccacagccgatcctcctcctccctcctacacaaaaccaccgtcccaggggaggcagagcagacccacaccgcaccagagaagggaatggctaaaagtttcattgtgttttgctattgacacttaagaagacagggaggggagggttgatttccgtgaattaggtgcatccagcctgcgggacggaggtggagaccaagaaaaggagcgcaggaatggctcagcttcctactgcggccctgctgctgaggggagtggggctgggatctgcaggagggcttggtggttaccctggaagattctggggaggacagaagctgggggagccgacaacgcccactcttagacccccagtgggtttactctgggaaggggcagggcccttggaccagggagtggtcactgagggtctcactggggcctcggagacaaaggacggcggggcgacagccacgggagggtcaggctccgagtgaggggtgtgccccggacgcgccccccgccccctggagtgatgggtgggtacctgttgaggaaagcgttgccaaacgcgttgagcttgcggaaggggcgccgcgggtccaccacgagcgcgttgcccggcaccacgccctcagtggggccgtgcatgacggcgatgaaggagtcggtggtgggctcgggcccgatgcgcatccccgggaagtcctgctcgatcaggtgtcggatgaaggtggtcttgcccgtgctgtactgccccacgaggagcaccataggcttgttgtcgaagtcagcgtcctccagcgcgggcgagtggaactcgtggaagcggtagtgctcctccaggggtagcagcttctgcgcgtacagctgccgcagcccctcagccaccgtctggaagagctccggctccttcttgcggcgggcatccttgctgacccagctgaacatactgccggacacggggctggctgctgcggggcagagcggcggctgagagcggggcgagggtgcggagccgaggcggggccggccggggcagggaatcgggagcgacccacactgcgcaggcgcacagcccagcccgtcgaagcgccctctgccgaatgctgcgcacccctcgcggagcggcctttatagggtcggtccctcagtggcggctagcgccgccgcggcgggggcagggcggaattgggggcggtagggaggagcccctcccagccccgcccctccgactggtgccacgtcttcccctaccccgcccccattggctgattccaaatctcgcgaggctgtggtccgggtgccgtggcaaccgcacctgtttcgccccgcccctcgtagggaggctcgcgaaagtgctgcggttaggaaggcgaggagcgggcgttcggcggagacggcctctgggccgcgcgccttccggcaccgtggcccccccacacccccgcgggatggctccacgagacacccagtcaggcaccctggttccctgactacgcgccgcgcccgccgttcgccacgtgcggtcctccagctggctcggaatccccggaagcatcggagtacccccaggcggcggcacctcctcctctcagcccagcttcccagacacacactgtctttgtcccctcatcttttatctgctttgggagagggagagacaggaaagtggtagcagagcaagctgagggagtagagaatccggggcgggctggtgactggggaaagaaaaatgggcagcgagaggcctgacctcccctcaggccgacggggtgggaatgggagagggacgcaagcgagggaggacatgggtgacaccggactcgcgcgggagaagagaaggcttccccacaaaggctatagctggggcaaggcagggagggcatgaggaggaagttgaggctctctggccacttgcgtattgggaagtgaaatcggaaattccctatgtggggaagaggggaagtgtgggggcaacaatgaaatcttgtgggaatttagggggaagtttaaaaacccaaatacttccactttcctctcggggtcaccaccatttaccatcatttactgggatctgtgccctacctccccttaccagttcctggctgttccatggggctcactcccccgccatcctccccggccacacacagacccctttggctgtccaggctggtgagaatcttcagtgggtgatgtcagagctttggggactgattgttatgtaaccagtatcaagacaccaacctgtggtagcaggaccctgggggctcttaaagagatctgaattgaacctgcgactttgaaagcctcaggtccaacttcctcgcttctgggagatgtggaagcctggagggctaggggcctgtatcaggggataacttgggctggtaggctaagaggaagaggcaggaactcaaatctgagaacgggggatatctcaggggaactgagtggtggaatctagagaggacacgatgggaggtttgttcgcctaccgcttgtaagatcccttccgagggaatagatagttcccttgccctcccctcttgctccctaaccattggagagcggataagtaattccaaccctgcctgcaatcttacgccccttagtgctttgatttgattcttttcatcatagtaaagcacacaagctactgcccccccccttttttttttttttttttttttttggtgttattctcaaaagaagatactgaggctcctaggcagagctgtcaccagaggctgcatgccaattggtgacgaggagcctccggcgggcctagtccagacttcccgggtcagccttagaagccacagtgtttgcctcctactcagcactgttagggatccaccccggagatgcagtttctgggttgatctagggaagggcccagggctgaggatcctgaatgaagtagttgttcagtcgtctcaatgaggctgctccaaactggcgccccggcagcattctcattgacgcgccatggttttcaaatctccccagagccctgtgtgctgggaaaacccagccctagaaaactgaaaacaacaaaatgttcctgggttatttataaacaaaacccagaccctgtcgttatgtatggccacttgactttctccaaagatcttaaaggactgaaagaagggatctctgtcaccctggtgaggcccacgtgaccagcaattagtttcccccaatttcatggagttggcacccagcttccaggcagcttccttatcttgtc

SEQ ID NO: 914643 - DNA, 4001 bp, Homo sapiens
atacaattgaatttgagccttttcataacaaacgaggcctgaatcaaacacgtcaccctacccacactaccttgagaggtcttgatgaaggctaccatcttgcgcggtcatgtaagagaacttacagcacagctgttccctcaaagtgactttcatttaaaatgcctctgtaaaatattttggaaacacggtgaagtattgtctccattacatttattattttttcaagttcaactacagacctccaaatgactcccaattcacattccatcatggtttttaaataccattagccatttgtgtgaaaatggtgttgtctacatgactccatattataagaagatggaattggtgagttatttcatcatcccagaattttaggtcacaaaaagaggaaaagtggatcctctgcaaacttcaaatgcagctattaaagtcatccttaaaatctcttaagagccttttctgatagtatctcctagccatgaaattcttcctaataacgtatcttcttcttttctgttagaaataaatttttcccctgaccccagtggaattaacacacagtcacacagaatctctaattgcccttttacacattgaaagactatcaacacatctttacctccatggctgcagaaccaactcctgaattagacttccatcagtaagttcttggaatccattcactcactttctccctgttaccaaggtgagtgcagataaccagcagagacacctgtgaacttgaacccagaagcatacactctccatcttaaaaacacacactcccaccatcctgggagcatggtaaatcagcaaagatggacggtgaaaatgtcgctttctcacctcagcctgatatttaccaacaagaagttaatttcccactgttcccagatcagtccacattggggctaacacttctccacaatgtccaagcaaaatcaaaagaatccctgtctcagaaggcatttgttgctgctgagtcacaactgcctgtctgatcatagtctcccaaaatggagtaaacaaagggttagtttgtccccttgttacacagtgaagccctttgccaaaactgattgttgtattttctggacaaaatggagtaaacaaagggttagtttgtaaacaaagggttagcttgtccccttgttatacagtgaagccctttgccaaaattgatttttgttttttctgaatttttgtttttgtagatattcagctctccccaatacctctgcctgccttggctgcctggccactttttccagtgtgattgtgtatgttcttgcctatttctagccattttccagtcctggaacatattaaaaacaaattggcctttccatgtagctcataagtcagaaaaattaccagcagaagacatctctagaaagcgagaccgtgtactctgagccctaacagctacttagccaaccacttcttctctgagctatatcagagccacctatctctagctgcctatttgttccagaagaattcaacccaggggaatggttttgccacccaggcatagggaaacgagggggcttttaaattcacagagattagaagtccagacaatgcaggaaattcacagataatatccaaagtagccaacctgccctccaaaataaaattctgatttgacccagtgaggtaagcccaggtaaggtgagcttcacttcctgccagccgtctccaagagtctgttctagtttcatctgtccagtttaaagcaggcttctctttccactcaagtgtttggattccagattcaaaagaagttttaaaaatcaggacttacctcatttacctaaagattctgggtgggaaatccaatagctgtggctgttggaggggaggcagcaggctgcaatctcaccagctcctatagggatggggcaccacgggtgttatcaagtctgagccctcatcagagtgaagataaatgcatataacaataattttaaatcattttgtaggatgttaagcaataagccaccaaccgggaattccctaagtcacttccccctcttctgattggctacccagccctttaaaaaaataaaataaaggattacaaacactggctcatttgcatttggccaactcacacgttagtgttcaaacaaaacaggtctaaccaggtaatgcctgtgtctcaagaacagagagacaacctgttaatggatgaggaattgatttggtggtgactgttcttttcagctcagaggctgtttcaggtgaaaagcaccctgctcaccaaagacaccatcgggaagagggaatgtaaaagcaaagtgagtagaagtccaaatctggaggagatgatggtatggaggggccctcttgagcacctgtctcatttattagtctgtatttagtccaccctgctttggcatcaagatcttttccctagctctataagtaccaggctctgaaggggctcccagcaagttccctctccaggcaccatgactgccttcttgacagagactcttggcaattcaatggactttgaaaagcctatctcccctggccccaggtaagagccttgagaggtttgaaagggaaggtcctgggagggagggtaccttatgaggagatgcttaggtcaagcagtcaactctcaaatatgcaagagctgattatccggttggtggattatctaggttcttcacttcctcttgacacttacatgatcttttttaaaaggtttattgacactccctataagagttagagatgagaagaccaaaatgctgaaactggaaataaaaaagcacagtttggacaagaagaaggtggaatattagggaggatctacggattcaaatacccaggcaacctctattcccttgggccaagggacatatggggagttacctgtacctgcttcactgggtcacaaatgtaccttctcccatacgggtgaatgactgctcctagcaaagaaaaataccatcccccaaccattaactttctctgttgaaccttccaggacactggcctggcatgagcaaagtgtctaagcagatttctttgactcaacgggcctcccttttgtgggagagggaagggaagttgagatttggcagagataaagattttgtgatcaaaaccaagaagttacttgtgttaaaaagaaaaaaaaaggtctgcttatggtcaaaggctgactgaatagaataaaaactggttattatattaagggggaacagtgagtgtgcagtagtattagtcttttcttacttattttttctagtttctacacaaattcagaggtttctgaaagtgtaaaagactcagtgggaaaacaagggtggacttgggaaggtcttggaagctgggcaggtcttgaagaagggcttgaggctttggtcagtgcagtttaggggagttctaataaatccctctgcctccctaacctgccccagacattcccacccttcccaactgttcaaccctgtgaacttgccaagggccctgtgaaaatgcaaatgtaaaccccgccccatatacacactgataaaaacaacaaatttcattatttcccattatcacattagccccaattagtctatcagttccagatctgagagcagggccctgagggaatggcctgctggagttttgcttgagagacaaatcaggcacaacctgaagtaactacattccacccactgcagggcatttgtgtgtagtgatggtgaaggggggtgggtggcggggcactcatgagaaaagggaagcattattgctagagcccgtgggactccagggaaacaaacttggccttctttacaccattgcctgagattaacctgagacagcagggtgggagtagaagggctagggttgtgtggtcaagagatagtgaacttcaaatgcaaccacaaaagtgatgtggctctctgacccagtcccaatcacctttaattataggccctgtaatttatagctgaagaattctggttaaatctccatttctt

SEQ ID NO: 914644 - DNA, 4001 bp, Homo sapiens
ctcccttattcatccaaccacattatccccaaactgccacagaactggctgccatgtgggcatttttacctctgaagccaaaggagcaattagtccttttaaataattacttttgtgatgacagcgatacccacaccattctcagtccttaatcaaagttaccagcaggtgaattcacagcatttgccctaaggatgttgcaacagcttactgacttcctgtttcaatatgactgtcgtttcaaaggactactcccaaataagagaaaaaaaaatccatgtacatgtgaaaggcaactgaatataatacatacaatcatttgtgtttttacaaatgaattgaattgtgaatcaagcttggggaatgtatttgattctcttgggattacatcacagataatttcatagccttataatgtgttttgaaacagacatttttcacgttcccaggggcaacatctgaggtattattgctggggtttcaagggttttcatgaccaataatgcagcactgggaggccaagtctggatccattataggtacactttattgactgtaagccatttggaaatatacatagtatgctgatctttatcagtcttggtgtcagacccaggctaggcagcacatactgacagtggcaggcactcaagttgatcaaaagacaagcttgcctaagatgacccccagggcctttatcaaacccatcagatatgattaagaatagggcaagcttcagattgtaaaacatcacagaggcttttgaggcctcaaaagaaactttgactctcctcttcttccaaacatttacatcctcctggttttgcttgttttctgtgggcctctgtggacaacctatcactgtattatttgccaacttgaaataaaataggtcctaatgctcagtacccccatgttgttagagtcaacaatgtttggctactgaaaccccagatctctaaactaaaatctgcatttctgagaacctcccttaacgaagtcttgaacactctcgccattgagattttctggtctatatagacttacccacttgcctcccttccctttcccaccacaagatgatcaactccaggagataccagccttgaaagaaatgtccataaatgcaagcaagtccttataaagttagagacaaaagattcaatgtagagaattcaacctctaatccatctgcagataacctactattatattatttgccaacttgagggaattgcttagttctattaataccaaatggtcaaattcaacaataattggatactcaaaagtatgagttctgaagtccgaacagacaaatctggccccagaatatagcgcttgcagaggatctctctgatggttacttgcatcaggagcatctcaaggctggccaagccaccctaaccccatcccacctccatctcagtccttcaaaagattacttaattaccctggacttaagccctcatacagaagacaattagtctctcagctttcagcagaaagaaactattaccaagaaatgcttatccggccattacaatattgtctcagaccctctgtaattcatacatatttaccaagtgtctactagatgctgggcactttgctaggtgctggcgatacaatagttaacaaaacatagacgctgccctaccctgatggactattcacaaggacacggcttccaaaataatagtggctccttccaaagtcatctgagctcattccccacctcctgttgtgaatggaatggggcaagagcagagagagccgggcaaccctctctggcatttgagaatgaccaaccttgaaaagaatttcagctaggcttaaaagcaggaccaatcctcttctctccggcaaccccatgcccttgccttcacagaaaactctgactaggacgtggagttggcagagaggataatgcttctgagtttcacaaagcagcctgagccaaaaccaatctccactcagggcagaataaagcagtgggttgtctggatggctgaatgtctctctctgagacaatggtgtgtttatgtgtaggagggtcaggagcaggttgttaacataaaacccaccgtaaacagagctgttaattcagttgctggcaggggcttctgttatcttctgaatacctcccagagggtataagccctaccttttcatttgagttggcagcagagttatttttttgcacctgttgctctgctccgataacaacgcagttaagcattgatttgtaggaaaataaacagaaaaaagcaaagaaaggcatctgcccaaacagcctgagctggtttgactgagtgttcatgccaatttgtttttcctataaaaaccaaagaaaaacctgcgttttcagtttggatgctacattttcactccctcaatataaaagggggtatcaaataggccagagggagatggcaaggctgagaagccagaagacgttgtacttttccattggctggttctgtgagggcactcaggggtgtccatggtctgcaaagtgacatggccagcctccagccagcccaggttcagatcatgaatcagattaacaagggcagagaaaagactgctgggatacgatcgaaaccaaaaccacactcttctaaatggttgacttccaaaagtcaatacagtttagggagtaggtgtagtctctaggttacctcctaaagtggaggctcagtgtacccagatctcagtcaagcctctcccccagacatcctacatccagccctgggcaaaaagcataatttgaaaacccctggttcccggaccacagttttcccatcgcataaatgaggctagccacacctacctcaaaatcgggctgtgtagacccactcatctcctgccaagagatttgaggcctcaggtcccaggtggaaagggcctgagatgtcctagatgtgatttctgtcctaatccaagcatcatcacatgctcacttctcattaatttgtcaatgtcacatgataagctaagtccaaaaagggccacaaggagctaaacaaatcgcccaaatggagatcatgaacaacattaattaagcaatggcatcagcactcagccttcagcacacacagtcagagggagcttttgaatatctctttttggccgggcgcagtggctcatgcttttaatcccagcactttgggagtccgaggcgggcatatcacttgaggtcaggagttcaagaccaatgtagttaatatggtgaaaccccgtctctactaaaaatatacaaattagccaggcatggtggcatgtgcctgtagtcccagctacttgggaggctgaggcaggagaatcacttgaacccaggaggtggaggttgcagtgagccatgactgtgccactgcacacccagcctgggcaaccaagtaagactccatctcaaaaataaaaataaaaataaaataatataatatctctttttaagctttgtagaagaaagcacagtcaaggcaacatgcaacatttccccagacaaacaccttgccccagtgttctccgggccgttgggggttcattactaccagaccactggcttcatgggggaggggggcttatggcagtggggcctcagaaatgttgcctctccaggagcattaagaactgggtgttccgacaggggagggatatggctgactgagcgttcccaggcattcttgttatgagcagcgtagggagtggagtgcttagaaccaaatcgggcagcagaaaaataaaagatttaacaacacccttagttgactgataaataagaccaactgtgcaggaatgtaggaagggtggaggacggtaaggggtggggattggagccagggaggggtcaggatgaactaggacaatggatttgaccatttcaagagtcaagtttcctcctaggaaaagaccaagatgttcaagtcaaggaaagagcaacagcccccatctcagaatcttgaagattatataattagaaaacaacaacaaaaact

SEQ ID NO: 914645 - DNA, 4001 bp, Homo sapiens
taattaatatactattctctcatttaatctgtggtgacttctaagatgaatagaaaacccactttcaggcattttttaagaacctgatattctaaagttctcaacactcactcaatcaagttgcagtattctcagtttaagaggtatgaccataatacaaagacagaatttcacaagcagcttgtacaaaccttaaatttcaaaatataagcacactttccccgacctttaaccacttcaccaaactgctcctcattgacccaactggactaatgccattcagaactggaagagcaggggatatggcagtaggaaggcaatttgcccaacattgtatataccctctgctccttaggtcaaatcctacacagataggctcacttcggatagaagtctctagggtaagaaacttctgttaatactcccactgtttcctcctgaaaacaaacacctcagagttccagtcgcgtaggtacagccatacagacatgttctcagggttgaggtgagggcagctgagctagataactagcaaaggctcagtgatatgcacgacactagtttgtaaagactcacagatccactcccgtaacctgccactggctcatctataaattaagggtactaaacttcttcataggtttcttgcatctaatagggcacaacagcatgaaaaaaacttaaaattctatataaacacaaccccaccaaagtgagccagcttggaggtttaaggaagcccattacttggcctggatttctcacagggaactgacagggaacctgaaacattctgtctcagtccacaacagctgtgtcatttgatccctggccagctaacacctggtttctgcatgtaccaagtggcaggacacctcctaagagtgacctatgaaggataaatcacttcacttttatacttagatcctaacatccttcctacaggaatatttggtgaattacccagtctgacaaatagctgaggcatggggaaaaataacctgccacaatttgagaacacacacacagactgaatgacacagggggaatcctacagctgagctagacagatgaagatgcatctggctcatttaacaggtgagagaacccagtctcagaagttaaatgacttgcccagactgacagcaaatgaatggcagctacagtgaacctcagaacccggtgttctaacgttacctcggtcgagacttgtttttacttaagctttgcaatgaagatttttgttttaacacgagcatcccatggacaaataacctctcaaacctggaaatacaaatgccattaaattcccaacagtcattagaagctaataagcatctgctgagacacacttttatttctaagtcactaaacccaagtctcggcaaacaggaagctgtcgtagcccactccaggtacagggaaggtaaacatcctcacttcccacggggctccacgggctgcctctgagtccacgggtccattcaggcccatctccccacagctcctaggcaattcggcagaaaactggtctccctaggcacaactgtgcacgaggtacggatcacgcgaggtgcggatcacgcacgctccgggtcacacagggagctaaagatagctgcgccgcacctggggcagcctcgcccggggatgtgcccggccccgtcccgctccctccggccccttcccataaggggtcctcgccggtagccccaccaacccacgctcgggccctgcctgccctcccggtccctgccactcagaatgggcggcgcggcggccccgaggcctagctcggctgagcccgcacctacccacagctccgccgccgcggctccggccctgcccctagcccaccgcaggccagctccgccggggcgcttccagggccggggccgctgcgcccgcactgggcatgcccgggccgcacggggccgctgggaagtcgggcgagcgcgaagaaccagccggcaccacgaggcggggcccagagccgaaggggtgggccgcgcggagcgacggagactgggaaatgtagtcagtccggggtcccgcctcgcgctgcgtgcgggatcgtccggctcccaactccgcctggcggcggagaggacccctcacccctccgcgtcgcctcctccccgtcgcctcctcgccgatcccgttctcacagatctctcctcctgttctttgccctcccccattgactccacaacgctgcttgcgtttctaaaatcctgtgaaattagtaacaggatgcctttaatcccagcattttgggaggccaaggcaggcagatcacgaggtcaggagttcaagaccagcctggccaacatagcgaaaccccatctctactaaaataacaaaaattagccaggtgtggtggtacctgcctgtggtcccagctactcaggaggctgaggcaggagaattacttgaactcaggggatgaaggttgcagtgagccgagatcacaccactgcactcctgcctgggcgactgagcaagactcagtctcaaaataataataataataataaatttaaaaaatgaaataaaataagtggctgggcacggtggctcatgcgtgtaacctcagcactttgggaagctgaggcgggcagatcacttgaggccaccctggccaagatggtgaaatcccgtctctactaaaaatacaaaaaattagctgggcatggtggcacacacctgtggtcccagctacttggtcggctaaggaatgagaatcacttcaattcaggaggcagaggttgcggtgagccgagatcgcactactgcacttcagcctgggtgacacagctagactgtctcgaaaaataaaataaaataaaacaaaacaaaacaatataaaatagaatagaataaggaatccatctactaaagcttagaaatcttgttacaaagagacctaagtggtttaatgacaaactgattattgtgctattaattataataatagctcttcctccaagctctattctttctcaagagtgtcaatttagaaaagattttagaaagaatttagtaggtatgagtttattctggcttacttcatgggaggaaatctttttttttttttttttttgagactgagtctgtctttgtctcccaggctggagtgcagtggtgcgatctcggctcactgcaagctccgccccctgggttcacgccattctcctgcctcagcctcctgagtagctgggactacaggcacctgccaccaagcatggctaatttttttgtatttttagtagagacggggtttcaccgtgttagccaggatggtctcgatctcctgacctcgtggtccgcccacctacagcctcccaaagtgctgggattacaggcgtgagccactgcgcctggccgggaggaaatcttttaaatctcaacatgtataaccacatttaaaataaaaaccaataataattaataccttgcatttttaaagagctctcacatgcttatgtatgattagatgctatttgtggacaagtagaggatattattttccaaatttcacaaatgaggaagtttgtggcagagcactttgagaagacatgacctccagttaagctgtgaaccttagtttctttttttttttttttttttttttgagacagtgtctctctatcttggctcactgcaagctccacctcccgggttcacaccattctcctgtctcagcctcccaagtagctgggactacaggtgcccgccaccacgcccggctaattttttgtatttttagtagagacggggtttcaccatgttagccaggatggtctcgatcttctgacctcgtgatccacccgccttggcctcccaaagtgctgggattacaggtgtgagccagcacgcctggcccaaaccttagtttctttaacacaggctgctgaaataaatggtatatatatgaaggtgttttttaactgtatggatatatgatttagtgaaatgataacaatactagatctagtgat

SEQ ID NO: 914646 - DNA, 4001 bp, Homo sapiens
tcaggagagaccaagaatcagtctcatcagtcagatcaaacaccctctcagacacgctgcaccctacccccaccccaggggccctccagggctgcaggggtggggagcagaacagcttgtgccccacgccactcaccctgacaatctgctgctggtcggagggcactatgtgctcccctagcacctccttcaccacatgcttcctcttggtggcctgagacatgctgaagtcgtcccacactggttaggaacgaagagactgtcaactcctcctcctgagttccttggatggcaggctcagaacccaggactgttctgaagatggggaggggccttttactgaggggtgacacggtgtcttggttaagaacatgggttctgaagtctaactgcctggattcaaatcctaccttggtttatttcctaactattcaacttctctaggtcccagaaaaataacagctaactcagcactgttacagtatggtatgaggccaccacttctcctgttggccttcttagtttctctccaacctccccttttccctagtttataagacaggagaaaagggagaaagcaaaaagttggaaagaaacagaagtaagataaatagctagacgaccttggcaccaccacctggccctggtggctaaaataataataatattattaacccctgaccaaaactactggtgttatctgtaaattctagacattgtatgagaaagcactgtaaaactttttgttctgttagctgatgtatgtagcccccagtcacgtttctcacgcttacttgatctattatgactttttcacgtagaccccttagagttgtaagcccttaaaagggctaggaatttctttttcggggagctcggctcttaagacacgagtctgccgacgctcccggccgaataaaaaaacctcttccttctttaatctggtgtctgaggagttctgtctgcgactcgtcctgctacaacagaatgggacaatacaatgcatgtcatgtaaaagtaactccggccgggcgcggtggctcacgcctgtaatcccagcactttgggaggccgaggtgggcggatcacgatgtcaggagatcgagaccatcctggctaatacggtgaaaccctctctctacaaaaatacaaaaaattagccgggcgtgatgacgagcgcctgtagtcccagctacccgggaggctgaggcaggagaatggcgtgaacccgggaggcggagcttgcagtgagccgagatcgcgccactgcactccagcctgggcgacagagcaagactccgtctcaaaaaaaaaaaaaaaaaaaaagtaactcctataatcttaagtactagtgtaatataaaactatacgcatgctccagagaagtcatcctggcaacctctctggaaggagtttgaaataaaccgtatctttctcaacacgcttgtacaccccaagtctagcatagtcacacaacagagaagttcagtctggcaacacactacagccggagacaaactaggtggccaccgtgatggttcaagccaggaactagttaattaaaggttgaggtgagcaggcttgtctgcgacatttgcatatttctgacttgcgtacttagaagacgaaggccagtacccttaagactgatggtttccgaaagaaacactgtcgtctctagttgctgtcctccttcctcctccctgtctatcccggagaaaagaccctcagagaaacacccacacttagtctctggccctcggctcccaggaacgctgccggagcaacaccgccgtctaggctggacgctgagagaggatcgtccacgactcacttcaaggctgaaccaagaaaacacagtaaaggaacttgccggcggccgcgacggtagcgtcagttagaaatcaggtctccagtgttcccagttcccaccagtccaactgcgaggagtgcgacgtgagtctgagtctgatccctccgaaaaccgtacttccggcgctgtctcggaggcctcccgtcccctcccttgtccgtcttctaactcttccccacgccaggtccgtcaagcctaagtccttgagttccgggtccgggcagcagagaaaggaagtcctctccctggaggcctatctccctcagaactgcgcgagaagcgagaccttagaaggcagggcttcccgcgaaggaccggaaaggagcgcctactaaggacgccgtcgaggtccggggcgcctcaactctatagctctaactggctagaagtgcccaacgtggaatgtttcttttttaaaggcggctcttgaagcgacccggaagcggaagtggaagaaagttctagtggcttgaggtatccgcaggagcggccgggtggcgggaggaaccgttacgggaactgaagttgcgggtgagcgccagccgcggagcagggccctgattggaggccagaggggttgcggggagaaggggaggagaggggtcgcaggcgctgtggcgggccctgggggagagcttggccgcgctgcggggagggggcggggtgcagcgcgtgggagccgggccgcgggaaggggcgggccgcagcggcgcgcggtgggggcggagctggggcgcggcgtgaaccccgcgggcggggagcgggtgtgcgcagcgctaggtgtgcgcttcgccctgtaggtagagagaccctttggttagctttccacgccaagtggccgttccaggcaggcagtgtcgtcttggttcagccaaggtcacagagggagtgatagcttccgcgcagccctggctacggactctgggcatctttccactgccccgcttgcgccacctgttaggcaggatcgtttttcctctggggcaagatcaaaatccaggtcctgcaggaagaaactcctcttaaaaatagtagggaagagtctccctggaactgttttctcctttcaggatgagggggatcgagcaagccactgtaacccctggcttggcttcctcttactatgagattgctcgtgggcccttagaagttccaggtcttcagccctaatctgccttttttttgggattcctagattaagcctgatcaagatgacaacctcccaaaagcaccgagacttcgtggcagagcccatgggggagaagccagtggggagcctggctgggattggtgaagtcctgggcaagaagctggaggaaaggggttttgacaaggtgtggggtggctgcgtgtacctagtgcaagcggggggtggaagggaagtgattccatctgctgggggatggacagtaaggtataatctgaagaggctgccagagcctgggcacctggtggagaggagaggggggcaaaacccgcgctgcttcctgggcttgtgtgctctgaatggcacaggaatggctgtcttgctcttatctctcactgagcactgagcagcacgctccttccttttccctgttttgcaggcctatgttgtccttggccagtttctggtgctaaagaaagatgaagacctcttccgggaatggctgaaagacacttgtggcgccaacgccaagcagtcccgggactgcttcggatgccttcgagagtggtgcgacgccttcttgtgatgctctctgggaagctctcaatccccagccctcatccagagtttgcagccgagtagggactcctcccctgtcctctacgaaggaaaagattgctattgtcgtactcacctccgacgtactccggggtcttttgggagttttctcccctaaccatttcaacttttttttggattctcgctcttgcatgcctcccccgtcctttttcccttgccagttccctggtgacagttaccagctttcctgaatggattcccggccccatccctcacccccaccctcactttcaatccgtttgataccatttggctccttttttggcagaacagtcactgtccttgtaaagttttttagatcaataaagtcagtggctttcatgactgggctttgtgcactga

SEQ ID NO: 914647 - DNA, 4001 bp, Homo sapiens
catgggtaatgaattagtttctttaaatagctttagcgagcttggaaaattagaaagtgcagccaaaagagtaagtatttgctgagtgtcaagtcagtgatgcaaaaataatttattacagaagctcagagcagggcacagttacagaacaccatcatgctgtggaaggttaagaatggagtgagggtccgggtatgggatggaggaccggcacttaatgctgttgctgggaacgtggaaggtaggtagagcttaaacaaatgaaggacagcaggaaaagcacttgtggcaaagagaacgcaaaagcttggtctgagaaaagacaagcaatgttcagaagatatgaatttaagtttctgtaaaatgctataccgtcaaagatagataaaggagagaaaatgtgtgtctgtatgcattggggtggtccaggcctgatgtgaatggcaactaacagctgtacctaatgtgtgccagcatagtcagaagtttttaatttagctctcacaaagactaagtctaaagtagctcctgacagaacagattttaggtaatctgccccaagtcacatggcaaatgttttgtgaggtctgcttacaaatcttgtctgctttgcaatataccaactgtcttctatggtgtaagaactagtagatgttcaagagtatgaaagagaaagaatgcttgtaaataaagtggattcacaaagctatttaaaatctggcactaagatggaatggaaacgaatttcatgggaccagcatagtctccagaaaggaatttattatcaacaatccctctttagtgcttttccattttacaaactactttaacataaaatatctattccccaaatttggaacacaggcagagaatgggtcatttttcgacctgaaggttaagggcagaaatataaacagataatacaactgtttgcgtccaaatgcaaaatgggggaacagggtttctcacattaggtactaatattaggggacactgagggacacagatcaggctcagacgtttaggacagcagaacactataaaatcccaagcgggttccaaccaaaccggtttacttgttgggaggaatgtttttttacaaacgtccccactcctttgacaactggttagaaaactttgtcaatacctggaaaacgatgacatttagtcagtggataagggagaaatatgtggtcactggtatagggagtcaagggttcctgacttcccactcggcgtgtgaactcatttttggtagatgcagcccatcatacttgccataaactgctgtttatgtaaaatgtaaaccactggcataaatgtaaaccactggcataaaatattcagtaaatgacacaactactccttgtgtattttatgtcgcttaaagtgacagcaatccggcaggagagagaggagagatgcaagtgcttgagaagataagtcacagcaaaaggtaggatgcagatatagattaagaggtcattggggatgggaggaaaggacggtaggacaccaggaattaaagaattaatgagttaggggagtgagataaatgagaagtgggaggaagaaaagaatgttaactttctctgaccactcacccaacagggtcccgataactcgggcagcaccctcgttgcgtctctcgtagctgtccacaatggaggccaaaatgactgggtgcagcctgaccacgcggccgccggggaagggccctggaagagcaggaccaggcagagcgggcgctggggtctgcgctggagcttgcgctgaggccggggtctggccaggagccgcagttgcagccgctgctgccgcagggtctgaggatgaggctggagccgcagcgggaaccggagccgcagccggtgctggcgttggcgctggaactgaggctggggccgccgccgggactggggttggcgtggccggaggagcacttactggtaccgccggtgtggccatcttgtcgagaaagaaggaggcggaagcggaaatgacagcattcatgaatatcaggagcttgataggctgaatatacaccacgtgagctagagctttttgctgattggttactggtgatacttctcggagcactgaaatagtcccgccgttggtaatttcttctggaatttgtgcgctctgcttttggcccgaggagcactcaggaaaccctgggctaagtagttccgggtaaaacttgggacggcgttcgaagagaaacactttgtgcagctgccgccaggtggaaccagaaagcagcgcggaggtcgaaattcgtgttttagacttaaatgagataatggatgtcaaagtgcctttaaaaaggattttaaggccaggcgcggtggctcacgcctgtaatctcagcacttcgggagaccgaggcggaaggatcgtttgagcccagaagctcgaggctgcaatgggcgagaaggagaacttagctggatttctcctgctgctttgagaagagactggagggtgaggggaggtgaggagagggaggcgagagagggaaaagcagggagacctgctgggaggccactaggtaatctaagtgagagatgatggtggctgggaccaggctggtagcagtagaagttctgagaagtgggaagattatggatatattttgaaggtagtttcaatagggtttcctgagaaattgtatatgaggtgtgaaagagaggagtcaaggaggactgcaattttttttttttttttttgtactgagcgattagtaggatgaagtcaccatcaattgagatagcaaaagctgtaggtagagcaggttttggggaaaagatcctgatttcatttctgaatgtgtcacctttgagatgtccattacacattcaagtggagttgtaataaggtgtataaactagtctgtactttaggagaggattatatgaggtattgccttgtaaagctcttagcacatgcctgatatacagtagttattaagtcatagctattatcactatgtgatggagggagctctgaccataacccactgtgtaacttggggcaatctacaagttttttctgagcctcaatttccttcttggtataatggggtgataacatctgcttgtaaagacaaaacaaaacaccaaaaaaactgtcaactcccttaattaggtcaagtcctagtgtccagctggcaagtggataggtgaggttgaacttcttatccctgattctgtgcccaagagttgatttctccttggagaaatcttccattattagaattcacatgacgctgctcccctgtaaatgctctgtgtagacatgcattctttctttcaccaaaacaaaggtgaacagccaaacagaagaagattgaaaagtaactcttggatttgatgacctggagtctttagcaaccctagtagagcaacgtcagtgggactgagggtggggtgggcacagaaactagaaatctggtgtgagagaatggccagtctgaactgaaagcagcaagtgccagcttttctttcaggaagttttctgggaaggaaaggagacatttaaggaaatagccagggaaacagcaggattgagaggcagccaatttaggatggcagtgtttcaagtatattttaaactgaggataagaatatagacgagagagaaatattaaatatacaagtgtgaaaaaatatctaatgaaacgggcaaaaggtggacccacactgagaagcctagatggtcttgcacaggctgagaggcatgctggagagactgcccagggccctggcctcccttttgggtgcttagtaggggtctgcctgagtcaaggtcagtccattgagatcatctcatgggaaaaaggccagaggacagaacccagttgaagaagtgttgctgcccccaactgaccatgcacacctttgagacctcctatctatgtgttaatctgggttggtgtggacactttgccttcaataactttgcctttatattgatgtcttaaagacatttctctctgg

SEQ ID NO: 914648 - DNA, 4001 bp, Homo sapiens
cggtactatcctttcaggtaacaagaacacagtaacttcatagaagagttggtattataagcaaaattaaaaaaagaaaacaaactgtcaccatgtcagagaaaacaaaaatacctccagaaatcatgcttcatgcttctctatggaggaaacagatacacagcaaactttttctaagaactattgaaccacgtttgctgtttttctgtcatcctcactgccacaagtggttgtggaagcagcataagcaaaggaaaacaaaaaaagataaagaattccatttaactctaatcaagctgagaatttcaccaaagttaaactaatcctgagcaatttcatatttccctgaaaggactgtctacagcgatactgatgttacaagaacagaagcagagcctgagaaaagacactttaagatacgatcaatgacaagaacttcctccattcactttgtatgttaaaaaaaaaaaaattccaaacactttctcagttaacctaacagccaactgttggtaacatgcttccatttctaatcaggtatctttttgtctttcatatcttcctatctgtgcttaacctccccatccttgaccttttctccgccttttgcattttcccttcttactttgctcttcagagcatcggaactgcattcctaccatggggcggggggaggagagagggggaactcactcccgcaattctgtaagttgtcttagacaagtaaacttccatgcgaagtttatgatatccaatcatttggaagttacttccgtgttagtggagtaacagaaataaaacgacaaagttaggacttcacagaagaattttcagcaatacaaaattaacttaaagaatacgatgtcgtgttcaactcctaccaaataaggttaaacttttgttatggggaaaatgagaaccatcagccctgtataccaaagagcaaacgccaaacgggaaatttaaaaatatcaggatggtccatcaggtgtatgcctcacagaatttaagagctgaactgataccatacttccggggtacagaacaactctcaccctcatacaagtaggaatagaaagcaagtgtaaaatacgggtcgtcttcgcctgtgatcgcacagtaatacgggcgttttgatctttttttttttttttttttttgagagggactctcgctctgtcgcccaggctggagtgcagtggcgcgatcttggctcactgcaaactccgcctcgcgggttcaagcgattctcttgcctcagcctcggcagtagctgggactacaggcgcgtgccaccgcgcccgggtaatttttttgtatttttaatagagacagggtttcaccgtgttagccaggatggtctcgatctcctgacctcgtgatctgcccgcctcggcgtcccaaagtgctgggattaaaggcgtgagccaccgcgcccggcccggcattttgatctttagcacaaaattacttttccctaccctgcttatgctaactacagattcaccacctcccactccgaatgtggctgcatttgacggacggaagcagacatcattcctcatcagtctaaaagtactatgtcgtcagaaatgagtcccgacgccgaccagggagctggcggtgaagcgtcgggccccgcgctgggaccgccggccggcgagctggtgcgaatcgaggccaggaacgcgcgccccagccaccggcctccccattctcgcgtgtagaacagctgcgggtgtcagccccggccgcccggcccaggctcggcagcggtcccttgcgctactaggacatcccccaccccaccgtggcggcacccgtagaccgaagcacacctgatcttcttcactgatgtcgatgaaggccgggacgctcatggtgcaggcccgggcacagcggacactccactcgcaagaccacgccgaccggaaaagggaactgggccgcgcgacgctgctggcgcaactgcttccgggtcaccctgagcggcgacctgttggggcggggccttgagagccaatcctatcgcgcgctctcgccgcggaatgcagcagggcgtggcagacgcgctcgggctggcctagtgggtgggacttactgggcctccactcagcgacgcttgtcgcggcctccagttttcaggcccgtgtagctaactgcattgatgttgcctcccgctggcgcctccctaagtccaccttcccttgaaatgttaagcttgttgggtcttaccaagtatggatgggtttgtgtagacctgaaactctcctgtactgctgttgggaacataaaatggtgcagtcactttgcagaggagcggcagtttctgaaaaagttcagtatccacccagcatatgacccagctattcttctacccaaactgtatgtccgtacaaagacttgtacaagaatgttcattgccgcttttaaaaaatagcagctttggctgggcgcagtggatctcacgcctgtaatcccagcactgtgggaggccgaggtgggcggatcacttggggtcaggaactggagaccagcctgggcaacatggcaaaaccccgtctctactaaaaatacaaaaattaccggggcatagtggtgcgcgcctgtaatcccagctactcgggaggctgaggcaggagaatcacttcaacctgggagaaggaggttgcagtaagcccagatcatgccactgcattccagcctgggcgacagagcgagactccgtctcataaaataaatacacaattcagtagtttttagtattttcagagttgcacaaccatcactactatttaattttagaacattttcatcacctacaaaagaaactacccatcagcaatcactccccagacccccggccccacctctctccagcccctggcaaacactacattttgtctctatgaatttgccttttctggacatttcatgtaagtggaatcacaaaatacacggtggcctaagtcagacttacttcatttagcataatgttttcaaggttcgtccatgtatccctcctatattcctatttattgcttataatattgcattgttatggatataccacattgtgttgatttgttcatcagttggtggacacttgggttgtctccattttttggctattatgaataatgtttccatgaacgttagtgcacaagattttgtgtgtacgtatatttctcttaggtatgtacctatgagaggaatcagtggcttatttagtaaatttatgtttagctttttcaggagacagtttccaaaaagttaacactttattttcaatagccaaaaaaaaggaaacaacccaaatgttcatcaatagatgaatgaagtggatcaaaaaattgttatacatctgcttaatggaatactgctgtgcaacaaaaaaggatgaattattgatacatgcaaaaacacagatgaatcttttttttttttcagtctcttcagcctgggtgacaaagtgagtgagactccatctcttaaaataaaagcttgattttttttctttagttgacaatcccaaaataattcaaaataattttgttcagttaatcatcatactgtatgattccatttatataaaactctagaaagtagaaactataatgacagcattatagattgctgttgcctgggggcagggattgggtaaggcggggggaaagatggatacagaggggcttgaggaagtttttgggggttatggatgtgttcattattttgactgtgattgtgtcatgattgtatacatatataacatttttcaaagtgtgcagttcaaaaatgtgcagtttattgataccacaattatacttcaatataaaataaatgccaagcaaaggaaaaaaacaaggttgaggggatagaggacacaaaacatctggctagactaaatttgaaaggattcattcttgcatggaatagccttaacaatgtggaaagtgaaactgaaggcagggaacctgtgtcatgttcaccctgcatttccg

SEQ ID NO: 914649 - DNA, 4001 bp, Homo sapiens
tattatgctacaaatgaagactgaactcggacccaaaggaaaggcaaataattgattttatttattcttcagatggcagttcttagaaggctgtcaatgaaaacttaagaacttttcaaatgaaaattgcagcccattaagtcggacttatttgctgtgttaactactttttgagactggccttttcaaaaggattccccaaaataaatctacaagtacctgaaacgagaagcacccccttctgcaatcgcactctccactttggcggcttgacaacgaagaatcttcaaaagaataatattaatagatggggtggggaggggaggggacaggagaaatgaaatacctggaacgagaaagagcaccaaaattagacactgctaacatacagatctataagccttcattcaattacaacgtatttcagatcctggcactgtcactgcattgcagatctgtaagactaacctaaaatgtactcaaaacactgacaattacattttgtttagccacctggaaattccccggtgttcaaggatgcaaagagacttcgtagaacacaagagcattttaaacggctcagaacgaatcttttgaaaaagccacattctactatctttaaaactgagcactgagatcaatagaaaagtctaactacagacacgagcaacatcacgtggaaaatgtctgccctaggaatttttactgccttgacgaggccagcgactagatgaggtctctccgaaagctcttcagcagttttcccctgtccaccctttcgcctcctccccgtggagagctcgtggaaagacgcgcgagagggggccgggtgtacaggactagcacttgcaggcggaagaccagggccacaacatggcagcaggaacctccgccccgtttttcccttcctgggaacaaaagagcggagcattcctcccacccaggcgcaagttagggaagtgcttccgacaacctccccgcgaggcccgggtcgctcgacggggaggagcagctgaggccacccccgccagcccggcgcccagctctttgttctccaagcaggaaggcggcctcctgcccacccgccgcctccaagcgggccccctcctgcaccataaatccccccgggactgacaaccgcctcgccacggcctcctctgctgacaaaaggggcagaaatcatcactctctctttcctccccgacgaagggcagcccctgccgactccaggtcctacacacctccccgccgggaggccaggctccgggacgcctgcggttccctggtcccgcgccaacggcctggccttccctgccggcccgcgtgcctcccgccacggcgctagcggtccgagccacgctccctcgccgtccgagcacagccgtgcctcggtccgccacggcctcgtccctgcaggcgtcggccatccggccatgaccgcacggcggcctggccaacactgacgttttccttctactccgtcagcaacaggaagagagaacaaaagccaagactttccaggtatctgaagcgcagaggaaatgctaaaaaagggtcgccccacccggctccgcctgcggccgccattttgtaccactcgagaagaagcgaccagggacggcggccattttagagcgctccactcggcggcggcagcggctcaactcaccttcaccgagaactcagcagctgccaccgcagctgcctcctcaggatccggtcgtcggggatagggaagggaggggaaaggggaacggaaaacaaaaaaaagggggagggaagggggaggaaggagtcggggacggcctcaaactcagctcagaggagtcgctgctgcagccgccactcggtacccgctgccacctccatagagctccgactcactgctggcgctaaggcgtgtctgaagccgaacttatcactcttggggcagccgaacccaccagagtctccccgaatggctccttcgccgcccaatcagcggcccggttgccgtctgccaccaatccgcgcagggcagcgaggaggagccacagggctgagctcggttgcggcgcagccccgccgcagtgcgcaaagccatattcgcgaagtctctgaggctgagccagtggcgtaaggggcgccgagcgctgtcgagatgagggttgcgtgcgtaaagccggagagcccttttgagtctgcgttggcgtggctgctgcttcttgctccagtccctttgttcactgagtccatatgccatgctccagttgtatcatccccttttccctcgacctcgttttctcaccgggaatatgggaagaaaacgcacccttacctcccccgaaccctgtgcgtggcgagtgagcattgcttttcttggcgccccttggagctgtggctgccctcgcgtgcctggcctctcccggggctgagcccttcgggttgaggcctggagcccccgggcgcagcgccgggacactacccggctccaggtcctcggcttcggcagccttagggaacccagaaagtagtggggaggaggcgagacgtgcgcccggatgccaaaggggagcttcattcagctccttattggcccaccccctgcagagtgaatgagaaagtgatgaaaggaaggggttgattttcttcgaaccgcacagaagaagctgcttttcccataggaatgtccggctggcggtcaccgaggaaaacaccctgtgtgtcagacttccgcgggtgtttggaggatttcgaattgctagctcctgtttttttttgttttttgtttgtttaagtgcacgttaaacattgtcagttgtgtattttcattttatttaaggttcaccataagaaataggattaagcttttcaaagccggcaagttgaactatttatacttaccaggtaatgtattgatgagtaccttattccatcgtttgcgacattgtagctatactaaaatggagtcatacttccataaacttaaacaacaaaaatgtccccatctccattttaacatgtagtacttttacagtgtatagtcaaaggcaagaatgtgtgtgttttaacatgaatgacttttaaagtgttcagtaagaggcaggattttcaaagacccaaacttaacctttgatgtgtcaaaacagctcttggtattagagcacctggtccttaatacaattttccggaaaattgcagtttttcctacgacatttaaatgtaatagaaggctgtggtgtggctctgaaggtttttaacacaattccaacatctgtagatctttgctatagaatagtcaccattccctactttactgttactacacttattgctattacatcaattttacttgaactttaaaacttggaagagatattctaaaaaaaaaaaaaaactattttggggtggtggtggtggtgcaagttttgttttaaatacaagaggtttcactttgtatttctttggacccttctagcttcatgataacacgagaataatgtttctttataatttctgtagggctttaaggtttggaaaaatgcattagtatatgtgatatttttacataactggtttacattccatttatctgataatgaacgaatacattagtttactaagaagagtagtattcaaaaactattgtctagacttcaaagagaatattcacctagccgtaaaagtcggatgttcttataattaagacacttaaaattcagtaattaaaaatttaaaaaaggttttacttaatattttatttaatctttgctaattgggaacccttttggtatgggctttgcagatatgagtttatgtgagaaattgacctggaagggaataacctaaggtagaaaaagtaaaaatattgataaaacaatctttcaattacctttctctcacttaaatagaaagatttgaagttgaaatcgtacctgcaaagcccattgcagaagggttcacaattagcaaagattaaataaaaacattaagtaaaacctttagaaaaaaaaatttttttt

SEQ ID NO: 914650 - DNA, 4001 bp, Homo sapiens
gcaggaatccatttctgagcgttttgccctggggttttccccaggaactcgctgattaataaaaatcagcaaaaacacttattgtcacacaccaaatgttaaacatcataaattctcttacatagaaaaaagtaatttaggctttctcgacttcccctccaagaaagccaactctggaaattagtgcttctggaacagtagtgtgcatcagaatcacctgaagggcttgttaatacagattgctgggcccacccagtttctgctttcactggtttggggtggggcctaagaatttgcatgtctagtaaatattcccagtatcaacgctgtggaaccacattttgaaaattaacattttttttaagagatggggtcttgctgtcttgcccaggctgatctcaaactcttgggttcaagcgaccctcccacctttgcctcccaaagttgttgttgggattacaggtgtgagccactgtaccggctgccaataaacactttctaatgttttattgaccatgttgagtgcgtactactttactaataacaatcagtaggaataatagctactgatttcagaaaaacacattagtaaaaataacccaaagaataaggaaaaaaataacagcttgagagtctcaactcacttagaaaatttggctaaggaataatcaggaactgatattctgtatttaggatacccaacagaaaccacgccccttaagattaggagtcttgatggctattgccttaattataccgtcacatgggaaagacttttaatctgttaaataaagctcactgtttttttacatgtttaccacacctgttgccagcagtcttgggatagtgctgaggtgcacccctacttcctcctccgcccgaagaagcactatttaaaagaaaaaaattgtttactgtatcccaactatgtctcactcaaaaagaataagcatctattttgtgttttgctttgcttgtagagatgggggtctcgctattttgcccagactggagccaggcctgtattttagtgcttgtatattatgctacaaatgaagactgaactcggacccaaaggaaaggcaaataattgattttatttattcttcagatggcagttcttagaaggctgtcaatgaaaacttaagaacttttcaaatgaaaattgcagcccattaagtcggacttatttgctgtgttaactactttttgagactggccttttcaaaaggattccccaaaataaatctacaagtacctgaaacgagaagcacccccttctgcaatcgcactctccactttggcggcttgacaacgaagaatcttcaaaagaataatattaatagatggggtggggaggggaggggacaggagaaatgaaatacctggaacgagaaagagcaccaaaattagacactgctaacatacagatctataagccttcattcaattacaacgtatttcagatcctggcactgtcactgcattgcagatctgtaagactaacctaaaatgtactcaaaacactgacaattacattttgtttagccacctggaaattccccggtgttcaaggatgcaaagagacttcgtagaacacaagagcattttaaacggctcagaacgaatcttttgaaaaagccacattctactatctttaaaactgagcactgagatcaatagaaaagtctaactacagacacgagcaacatcacgtggaaaatgtctgccctaggaatttttactgccttgacgaggccagcgactagatgaggtctctccgaaagctcttcagcagttttcccctgtccaccctttcgcctcctccccgtggagagctcgtggaaagacgcgcgagagggggccgggtgtacaggactagcacttgcaggcggaagaccagggccacaacatggcagcaggaacctccgccccgtttttcccttcctgggaacaaaagagcggagcattcctcccacccaggcgcaagttagggaagtgcttccgacaacctccccgcgaggcccgggtcgctcgacggggaggagcagctgaggccacccccgccagcccggcgcccagctctttgttctccaagcaggaaggcggcctcctgcccacccgccgcctccaagcgggccccctcctgcaccataaatccccccgggactgacaaccgcctcgccacggcctcctctgctgacaaaaggggcagaaatcatcactctctctttcctccccgacgaagggcagcccctgccgactccaggtcctacacacctccccgccgggaggccaggctccgggacgcctgcggttccctggtcccgcgccaacggcctggccttccctgccggcccgcgtgcctcccgccacggcgctagcggtccgagccacgctccctcgccgtccgagcacagccgtgcctcggtccgccacggcctcgtccctgcaggcgtcggccatccggccatgaccgcacggcggcctggccaacactgacgttttccttctactccgtcagcaacaggaagagagaacaaaagccaagactttccaggtatctgaagcgcagaggaaatgctaaaaaagggtcgccccacccggctccgcctgcggccgccattttgtaccactcgagaagaagcgaccagggacggcggccattttagagcgctccactcggcggcggcagcggctcaactcaccttcaccgagaactcagcagctgccaccgcagctgcctcctcaggatccggtcgtcggggatagggaagggaggggaaaggggaacggaaaacaaaaaaaagggggagggaagggggaggaaggagtcggggacggcctcaaactcagctcagaggagtcgctgctgcagccgccactcggtacccgctgccacctccatagagctccgactcactgctggcgctaaggcgtgtctgaagccgaacttatcactcttggggcagccgaacccaccagagtctccccgaatggctccttcgccgcccaatcagcggcccggttgccgtctgccaccaatccgcgcagggcagcgaggaggagccacagggctgagctcggttgcggcgcagccccgccgcagtgcgcaaagccatattcgcgaagtctctgaggctgagccagtggcgtaaggggcgccgagcgctgtcgagatgagggttgcgtgcgtaaagccggagagcccttttgagtctgcgttggcgtggctgctgcttcttgctccagtccctttgttcactgagtccatatgccatgctccagttgtatcatccccttttccctcgacctcgttttctcaccgggaatatgggaagaaaacgcacccttacctcccccgaaccctgtgcgtggcgagtgagcattgcttttcttggcgccccttggagctgtggctgccctcgcgtgcctggcctctcccggggctgagcccttcgggttgaggcctggagcccccgggcgcagcgccgggacactacccggctccaggtcctcggcttcggcagccttagggaacccagaaagtagtggggaggaggcgagacgtgcgcccggatgccaaaggggagcttcattcagctccttattggcccaccccctgcagagtgaatgagaaagtgatgaaaggaaggggttgattttcttcgaaccgcacagaagaagctgcttttcccataggaatgtccggctggcggtcaccgaggaaaacaccctgtgtgtcagacttccgcgggtgtttggaggatttcgaattgctagctcctgtttttttttgttttttgtttgtttaagtgcacgttaaacattgtcagttgtgtattttcattttatttaaggttcaccataagaaataggattaagcttttcaaagccggcaagttgaactatttatacttaccaggtaatgtattgatgagtaccttattccatcgtttgcgacattgtagctatactaaaatggagtcatacttccataa

SEQ ID NO: 914651 - DNA, 4001 bp, Homo sapiens
tggccagtttgccagaggaggaaaattccttcctgactctggtggtgatcatcaacttcactctgggcatgtgaccaaaaattggcccaattaagcatctacacattggctgtttacgggccaaatcatcactgggcagaactaggccatagggtgcaaaatatagaaaaaagtggccaagattgggcttcctcaaccccaccctctgagtggtatcattgggaagaaaatcggttttccttccttaaagcctcagtgatacccaaatgtccactccgtcccaagacttgtgagcaagggagggtcaatttcccagcccttggacctccctaagaaggggcccactgaggagaacccagtggagtatttcaacacttactgctaaagaaagattgagggttgggtgcttgagggtttgttcttctgagaggaaccctagcaactgtgagaaccaatttgctgacctcttgtcaagtgattcctcatttttctttagctcgcttagggagtttgcgtgtttgtttgtttgtagctgtttttctgaaggtgcagcgaagatccaaaaaggtatgccatgtagtttgctgtaggcttcgatgcaaagcttaccagttttggattacatatatcaggggttaaatcctacctctgctgctgcgaacgtggggcacatttcttactacccagactgctgaaattcttaagctttttttcatatagatgtggtatataaatattcatgcccctcttcgaactacggtttcctcatctctaaaatggggatttttttttttttaaatcatgcaatccgatatatgcaaaggacggggcataatacatatattcaatcctgttttagagggaaaaatcagccatcaacaatgtatctaaaaatttgccactctggtgacttctgaaaaagggagatgaccaaactgaaaactccggcccgagaataccttagattatgaaaaacagtattgcagagaacacgaagacaacagaatcaagcgttcactcggatgggcaaaccacccctttccctgggtctctggactagactgaaccacagagctgcctccctaagtcatctagcctttctggcctcagtttcctcatctgtaacatgaagcgattgcacctagtgatgtctgacacactttcgggcgtacaaaaggcatccacacgcaggcccggcttcagcctgaggagggagcttgtgctacctgtcgctgtcagcagggggcaaccccacagaaaccccacacactgcagagtctgacaaggcctgagaacacagtggaaaaacgctaaccattgcttttctggaagcattctcttctggggagatgtcagagggcaaatgggtttcttttaaaactgttttgtacaaattcctgaaaatgccccaaactataataagggagttctctgtatcgagggggtgggggacagtgggcaggccggtggggaaaggaattcagtcaggggagaagggtaggtggggggctttccttgaagctgaatatttttctgagtaaaatccagcttcccttcctaaagaagctttagggaggatagagaactgagcgcctgggcgcgttctcttaattccccttggttcagctaagggatccagagggagtggtggctgtgaggagggctggtggccacacggcctgcggaggcaagcaggtctctctgaggcaagccgtcacatccgtgtcaaacagctcccggaggccctgggactgcacccagcgcaggtgccggccctggagctggagatggacgagcagacccaggccccaggccgagcctctgagccctgacaccccttacgattcatccaaaaaagcaaagaaaaggcgcttacgtgagggcagcggtggctaggtccaaagaggaggctttcaaggcaagagaaggcaggcgctcccagcaccagcgtgcagtggaaataaagacacctgtagccttgtgatataagtgacacctacagacaggtccgtttggtttttcaggtttacgcacagcccctttgatgacggtgacatacagtgtgacacggctccttggagggggggaaatggttctcatatgcagaaagtttacctttatcctgcttttgtgcgcagctcacccctgccctgcaaccccccactcccagcccaggggactcagtaaacaagcagaaaattcttgtccctgggagctgtgcggggatcgtgcgtttggtgaggaattttcctctgtgcaagctggaggggaaacacagagattccaccctggtgccggtctgcgctgcctctctcccaggctggctgagcccagtgcttttgtaagatcatgtctttctccgtttttcccatgtggtgagaaggaagagcattataggcccagtgttaagacctcaggttttgcagctagttgcctttagattcaaattcagtgtccatcatttcctagctgtgctacctagaaaaatgtagctaacatctctgggcttcatgagtgtaatgtaagtgatggggcctctcctcatgtggatgccagctctcaggtgtctcgctgagaactgcccgctttttagtacttcttcgtgacaacagaaactctgcctaatttaggctgcaaagcacagtgtcccaggtcatctatgagacaggtatttataaccctgtgcctttttgcattctgcttctagccatcttgggcagccgagatgttgtattcaaatggcagactccaagctttaaagcgaaagcaaggactggtttgttatgttttcttgggatcaccgggcatggttacaaacacacaaatacaaatacgcatatagtctgcagaaacaaaaggcagttcgtgagaggattcggggtgtcatcatggaaaaattgttgaaggaagataggtgactgcctagacccctatcttggctgggtaacctggacttctctgggcttcatttttccccagtggcaaaaggaggaagtgggattgaaatagtgatttttttcaaactgtgacttgaggaaccccaggggctccctggagcccttacaaggacttttgcgggtgagaggatgggagtggagtagagtgggttaggctctagaccaccccgttccttcctgactcaataagagcatctcagcttttatataaatcttccgggtaagatttcatttgaacaaaagaatctgcccttagaaagggtttgcaagtaactggattacatggtctttgggcctctttcaagctttaaaattctgtacttctcttcctctttggtttctaggggactgtgcactgtgatagtcccacacactgtgttttccattgttgggcactggcctatcttgtcattgatttctgaaatgttaccagtgtttctttctgaacatatacattcttctcagtggagaggtttttagggaaaacatgttattctgatactgtttttagaaagagtcttttgggctgggcgcagtggctcatgcctgtaatcccagcactttgggaggccgaggcaagcagatcatgaggtcaggagttcaagaccagcctggccaacctggtgaaaccccatctctattaaaaatacaaaaattagctgggcgtggtggtgcacatctgtaatcccagctactcaggaggctgaggcaggagaatcgcttgaacccaggaggcggaggttgcagtgagccgagataacgccattgcgctccagccgaggcaacagagtgagactccatctcaaaaaaaaaaaagagtcttttggagaaattatattttttctatactcttttggctcaattttttccccaggggctgtggctgcccaactgactcaattatttgagtataaaagtcttctgacaatggatgtacaagaccatgaactctgtttgtctcacggtcccaaatgaataatatagcatttctgggtgcccgtgtgtgaaattgcaggcttctggatcagtggataaaagggatga

SEQ ID NO: 914652 - DNA, 4001 bp, Homo sapiens
gaggatggcaggcctgtgatatgaccttctttgggttgggagaaaggagaggtgaattccacacggaagaaaacagaaaacagtccccaggtcttcagtgtcaaataaggaatccatcaaatacaaaacacgacagtgggaatgagatcttcctcatctatgcctcactaattgctctcaaaagtcattgggtattaacaaaaaaaaaggtcatttggtaaattgaatggcattatataaaaactagaaatattttttgatcaatagtatttttacctcttttaatattgttattctttctcctctttataccggcctactcacttgatctgtaatctctctagtgctatacacaatgctgtatctgattccctttggtaattccttctaaggcaaattatatccattaagtttttgtaaagggccttctcaggtgtacagcatgctatttttcttctgtaattatttcttgcttttggaaaaaatatcttttataaaagcagaaaaaggtgtttttttttttttttcctgttacagcaggagtgggtgttattaactctgggctctccacaaaagaccttggctacttagccagcatgcagtaggtgtgagagttcaagaataatggctgctttgtattcagtagcctctcttctctaggccctctaaggtccttgcaataattgaacattttagctcttaaggacttctttagtggaggtagagcaggataggtgtgaaaaggcagatgtccagagccccctttctcagaagtaacactgaggcccagggatatgtgaacacaggcctgaggttaggccaggcctgctcaaggggggtgatattgcccccctctttagggaacaaagatgagttcttggggatcaaaaaactgagttattaattacagtgttttatcatgctccaaaggtctacagtagatgtatagtttatctctggtactcacatttctggtggggagatgattaagaaaaaatgacctaaaaagtgtccttaggagaagtgataaaaaaaaggtggagaagcgctgtgatagatccacctagtgtcagcgccagtacagacagggatctgctgggaggtctcttggcctgctgttctggacatacttttcattttgtgagggactagctggctcatcatggaaggagccctgggcctggagttatgattctgcctcttgcccctctccaaatctcagttcttcaactactaaacaagaacacagataaaacagcccccaaggtctgccctaactctgtgactttctgcagacacccacctgattgagccaacacatccaaacctgggcactcacacacatatgcatacacattgattatatttgcatttttttggtcaagcaagtccaccaaattggaggaaaatccaaccactacacacagactgaacttttagtgctgaaaaagctccctgatttcctcttctcccttttctcctgtgcccactgccttctaccccagttggaggtagatacctcaggacaactggatattctttgcccagcctagctgggtaccttaaacactctggaccctcactcactgcccaccgatagatccgtggaagctggaatcagtttcccccaaatgtagtcatcattctagctgcctagtaagtaggaaaagctcaagaatgattaacacaaggtggtggaatcaggtgggctcacttcacacatgagaaagttggctgcaggtacctgtgggagtgaggcagagatggcatggaagctgaggtccccagatgcctccagtggcttctgaacccttctcagagctggctcacacaccaaatgcacacagagagggtccaccgagttggagggacaggcctgtgggcttctcagtgtcacacaaatcagaggcagcaataacaggtgtggctcccatggcctgagcaacccggcacccctgctcagcctcccagagagaggggaaggagcaaaccactcagccttggccagtttgccagaggaggaaaattccttcctgactctggtggtgatcatcaacttcactctgggcatgtgaccaaaaattggcccaattaagcatctacacattggctgtttacgggccaaatcatcactgggcagaactaggccatagggtgcaaaatatagaaaaaagtggccaagattgggcttcctcaaccccaccctctgagtggtatcattgggaagaaaatcggttttccttccttaaagcctcagtgatacccaaatgtccactccgtcccaagacttgtgagcaagggagggtcaatttcccagcccttggacctccctaagaaggggcccactgaggagaacccagtggagtatttcaacacttactgctaaagaaagattgagggttgggtgcttgagggtttgttcttctgagaggaaccctagcaactgtgagaaccaatttgctgacctcttgtcaagtgattcctcatttttctttagctcgcttagggagtttgcgtgtttgtttgtttgtagctgtttttctgaaggtgcagcgaagatccaaaaaggtatgccatgtagtttgctgtaggcttcgatgcaaagcttaccagttttggattacatatatcaggggttaaatcctacctctgctgctgcgaacgtggggcacatttcttactacccagactgctgaaattcttaagctttttttcatatagatgtggtatataaatattcatgcccctcttcgaactacggtttcctcatctctaaaatggggatttttttttttttaaatcatgcaatccgatatatgcaaaggacggggcataatacatatattcaatcctgttttagagggaaaaatcagccatcaacaatgtatctaaaaatttgccactctggtgacttctgaaaaagggagatgaccaaactgaaaactccggcccgagaataccttagattatgaaaaacagtattgcagagaacacgaagacaacagaatcaagcgttcactcggatgggcaaaccacccctttccctgggtctctggactagactgaaccacagagctgcctccctaagtcatctagcctttctggcctcagtttcctcatctgtaacatgaagcgattgcacctagtgatgtctgacacactttcgggcgtacaaaaggcatccacacgcaggcccggcttcagcctgaggagggagcttgtgctacctgtcgctgtcagcagggggcaaccccacagaaaccccacacactgcagagtctgacaaggcctgagaacacagtggaaaaacgctaaccattgcttttctggaagcattctcttctggggagatgtcagagggcaaatgggtttcttttaaaactgttttgtacaaattcctgaaaatgccccaaactataataagggagttctctgtatcgagggggtgggggacagtgggcaggccggtggggaaaggaattcagtcaggggagaagggtaggtggggggctttccttgaagctgaatatttttctgagtaaaatccagcttcccttcctaaagaagctttagggaggatagagaactgagcgcctgggcgcgttctcttaattccccttggttcagctaagggatccagagggagtggtggctgtgaggagggctggtggccacacggcctgcggaggcaagcaggtctctctgaggcaagccgtcacatccgtgtcaaacagctcccggaggccctgggactgcacccagcgcaggtgccggccctggagctggagatggacgagcagacccaggccccaggccgagcctctgagccctgacaccccttacgattcatccaaaaaagcaaagaaaaggcgcttacgtgagggcagcggtggctaggtccaaagaggaggctttcaaggcaagagaaggcaggcgctcccagcaccagcgtgcagtggaaataaagacacctgtagccttgtgatataagtgacacctac

SEQ ID NO: 914653 - DNA, 4001 bp, Homo sapiens
gccttccctaaatgtaaaacatctgtaaattgaagcacttcagcttcactgtgcatgggctggcaagattaaagagttgcttctttcagcatcctgtactggaggcttaaaattttgttccacagaggaattccttataggtctttacgaagattacgtatctatctcaccaaagctgggagaaaagcaggctttttctgcaaaagagaaccatttcgagtactgattgctgtgtgtgctggtttactggtaaatggtggtgatgcaatggaagttataacccaaagtgtaggaagacgccctacaacctgttccagtcctcaacgttccctacgttaatgggttcttctttcagtgttcttgacagtgatgtcttacagagaagacatttatttcttcttcctatgaaaaagattaagatgagagaaatacctcccaatgtagatacaagagtgtgcctttggcaaaataccaactaaactgacccccgagaaaacttctgggggagggaatgactaagtctgctgtaactacgtgttgtcataataggttaatgaattaagacatttatcccaatacaagcatactacctgctttccaccatattggcagcaccagttaaggacggttgtcaagccaccggcacaaaacgtatacattgcagagatgcagaacaatgcctggatgcctgcccaaaattggtctctccaaatgacagactcaattgatagtaccaatctacggcccactgggggttagcagcgtattttcctaggtggtgggggaaagggatgaaatgtggaaagctcagggcactgtgcagagcagaaaggctgacaacatattcattaaacttgatctgaagcaagtgagcccgtgaggtcgttcctgaaatattcataagatgtgttaccgaactcgccgcttagaggttgagcataaacactgagtcagaacagcccgtacccacacttggaaaacaaaaaaaagcacccacaacagctcaccccaccaccacactccactgctctgcttttaacagccccgtcagctgtcagctgtcactccccactcggctgtccaattctacctgcccgggaaagagatgctccaatattgaagtgcggagtttcccagcagttggaggaggcgcagctcaacagcccagccgaccgctcctcccagctcgctgcgcggaggaccccacagtccggcggccccgcagcccggctgcctagctcctccctggagaccgaagcccacaaggcaaggggttcccagggacccagaccagcccctcgccccagccaggccgcccttgtcccgccttccattttggctctgtctgggatcccttccccgagccctcggcgttaggtcgctaggcgacctacgcccgggccgagatgcaaacagcctctcgcgccgacctgcagcctctcgggtgttaattgggaggacaggatagaaggggaaatcactgtcctgggtgaccccggagcccctgcaccaaggcagagtgcactttcattcccgttccctctctgcccccgatgcttagcatttctgctgcctcccaggcacagcgcagcttgcgtgatgcctcgcgtcctcgccgcacctctctcctccccaagggcattcgcccctactccctaggctcctctggggtcgccaatcacctggactctggcggcggtaggctcagcagctcccggcgcgcggcggcgtggtcttcatctccgccttccccaggcgctccggctacgcgctccgcggcggcgagcgacgcgctcggtcccgggcgccgaggctggacaggggcggccgcggctgccgcactggctgcgggcgcggaaggggcgggggcggggcaggaatctgggtcgcgtggagcggagcaagccgggatgcacccggggcggctggcggcgaggaggcgaccgagagcagcgggggagggcgtgcagaggcttccctgggagcacgaagcgggcggctactgagcatgcccagtccgggagccgggggcgcgggcgcggtgctgggggagagagcgcggcacccagtgccggaatctggggggaaagggttaaatctgcggaccccgctgctgtgggaggtggctggtgtggcccagtttaattgctcccgggtggcctccctggaggagcccacgacaggaagatggtgaacctgagatgacctgtcaatgggattcccagacagtccgggcaaggtgtgttccccgccctctccctggataattgtccagaagtcaaactttgttttagttcagctccaacctccctcgtctcaccgagcacccagtgactcttccaatcctgatccccacccttcacctgccttcccgggactgcagaaccctatccctcaccccaaccggcagcccccgcctttcccactcctggcccagtcgggtcagattctcaaagagccagctctttaattaggtgtaattgagagatcgtgtcaatcctgcgaggtccatatctgcatttcaacaagggctttagaagcaataccgtaaccccggggttaattataacaggatgaattatagacaccctcgtccggggctgtttgggggaacattgcttcgtggggccccagaagccacttcatacagacagagagagagagagagagagagagagagagagagagagagagagagagagagagagagagagagagagagagagagagagagagagagagagagagagagagagagaaacctgtgccttccggattgcatttcatgtttgatgaagaacgttttctccatagctaatcaaaaaagtctctttaatgaggccgcatggggttggggaaagaccaaatgagcttcgaggtcggcgcttattttagtttcattcatcactccaagccggttacctgaccgtcttgtgcctctgtttcctcacctgtaaaacaaagggtggttaatacctacctctgcgggctgttgtgaggattacttgggcagctggcggcgcggagcagcctggataccaaagcatctgcctgtcccgcagtggatgttccctgaataaaagtctctgcaggttccacctccactattctgtgtttatgaaaagttgggttagtgataatccttaaatgctgaacatttatcttatttcctcttcacattaaatgaccttaaagccttgacctttctgatttttttaatcattgttaaaagcattagccactatttacttttctttcttttcagggagatatgaaggatacctccctgaataaacgtcttggaaaaagatagacctttggagggaaaagcttctcgggagagattcattagggatagattaatccacctgacaaaagaattttactccatagtcttttaaacgtaatttgcttgcatctccctgtggtccttgtttcacaactattgcatgaagtaatgtatgcctgtatggaaggaaatttacttcccatgcatactgttgactatttaagtatcagaattcaaaagataaactttttattatcccccaaacatactatttttttaataacacattgctttattcatggtgttccaccctttctgaaataccattctcaaaaaaaaaaaaaaaaaaaaagaaataccattctctctcattctatttcatgaagtgctactcactcttcaagctcaaatgtcaccttctctctgaagcctaccctgaacctcaagacagagtgaatgctgtgctctcatagcaccagtgcatactgctatcacagtactcatcacagcctatcactgtggttcaagcaatgtaaaactacttactgagcaactgttatttgcaggcgccattctacatgttaggaaaataagaacaaacaagacaaagttcctgccctcatggaacttacagtctagttgaaaaagacagaaaataaacacctaaactgtaaataatcactaaggacagaagtctagtaattctgttaat

SEQ ID NO: 914654 - DNA, 4001 bp, Homo sapiens
attaatccgaggttcaataaatggtcaaaacccctggaaagaatacgtaaaaatttcagacagcggtagcctagtgcaaagagcactaaatttgaagcctaacaatcagtacacatggtcactggttttgtgagactgttcatatcacttaatttgtttttagagctcaaacatgaaactccattctacatgtttcataatttcttgtctcagtttttttctacacattatttttcttgtattcaacaacttactgagaatctactaagtgccaggaggtacactaggaacattttgttattctaatgaggaactgaagacattataatagaaacataacctttttgtttggaaagttttagtatcaagtaaatgaagttacatatcccattgaattaaaaaatatataaggcctagaaatagctaccaaacttaaagttcaaatgtaagaggatatcaactgaggctcacaagggaaaaacggtggactatatatttgctaactagatattttgaatcacttctatttacagtaccatgcaactcaggaggaaaatatatttgaaacaattaagtgaaaaatacttaaacttatctagaaataaccggaaaatgaaatgagagaatcaagaagccatactctttctcataggttgctggtcttcttactttctctgcactaaacctatgaaaagcctactttgaggggaaaataaccgaaagaaatgtcaaacgaagtacaagaacaagcaatgagttatattttatgaaagtgtacaagatttaacagacacatatcacacactatgaaaaaagttatgtaaacacagacggggttttaatgaaacagcattcagaaattaatctagaagctttattaacacagcaaatctgtcctaccaacttaatctggtcattcctttgaatataacagttatgaaacaagcatattcttcagcaggcttctcataaaaaattccagagattttaaaggaaagcctaagaactagacttttctcgttaaaatgtgagttaaatttaaagatgtcgtatggaatgtagcagcaatcaatactgggaagcaaaatgtatatagaaaaaataaaaaatatatacacagatttaacgcagacactatctaaatatcaacgacaggctcaaaatactttataaggattatgtgtcaacataagcctttaacattcgctctcttaaagccaaaatgttttaagatttagaaccagagaacaggcagtctgacggtcaaagaggggaaatcatttttttccagcatcttctaatgaagtctgtctctcacaattataaaaacttttgcaggctggtctaaaccgtgagctgcctggagaaagcagaagggaggtatcctgaatgaaagccaaaccatctccataaattaatgtcttcccttgactagaaagcatttcagggtaaaaagcatgtacgaattcctccgtaatatgaaaaggggttggagggcagggaatgaaatagagagcgagggcactaaaacatgtttagttaacagcgctcagaagtctccacacaacccgtattcccctccatctcaatcagaccaggctattctctcctcctccgaaggtttaggggtcagaaagagatgtggggtcaaagtggcttccccgacaggtcccctccctaagtttcccctcggctgagcccagatctccgctctgaaccgacctaagagctggtctagggctgggagcccggttgataccagcagctgtccattccgcaccgacggtcgcgtgcccgcaatggacaccagtcgagggccgctgtcgttggtcacgctggctctaggacccctcctctggaaactggtgacgttgctcttgctggctgtcgccactgcagacccagtactcgcggcaacactaccgcaggttgccactgccgccatcttagagcctccagtgttaacccaataggaactctgggaacgcaaacacccgtcctatcagaaccagtgccaaactcccgcctcctcgccccaaccgcggctctcgtaaccaataggactgagacgtcagtcccgagccaaccaatcggaaggcgtattgctgaaaagtgcgccctacgaaaggacggtcgacttcggcggggcccaggtgagaaaggcccacctgtgtcctggttgagggtctccagggttctttggggcccgaggtaggtaatatcacgtaacgttcttctccttttgagtgccttcattcacattgagttaaagaaaaggttggtgaaacaataaacccttagggcttatcaagcaattgctagcacctttctccgctgtgtgtgaggatagacttttttcctgctcatttatcttctgatttctgatagaaaattcactccgccttccccacgatgtctttttcttaattttgtgttatatggaaaggatgggatctcttaccttaatgagttggttgctgagcgtctgggcttagttcgttagtgcctagtggtaggtggtttggaattaaaccttagagcgaaaactcttgaactttgaggctatctggttttcctgtgtctgacaaactatagctctctgacaagttccgataagaagcttttgttaattttaattagtgtttctggaagtcttggatgtctttcctaagcggtgtaaatgacaagtgttactctgacaaccttgttcacacatttaattgtcgtttgctgttaaagcagctgcaaataacagaaaatacttagggtttctttcccccaaaaaactgctaggaagaattagaagtatacctactttattttatgaaccctgaatcgagagtttattactaaaataccaattttatgtgtggaaaaaacatgtattttgagttgtatttttgtatttaatttttttttcaaaactgagcagggacagtgggtaactgatgtttaaaggcaatcatgattgacaaatgtctaaattgaaaaggactcccaaatcattaccgcactactgagttattgactttgacagtgatctgtgataccttttaattagagccaaacctcattgaaattcttgccatcgaattgttttaaatctcactgacctgttgaaatttttgggctgattctgtttgataaattgaaattagtattgctaaatagtgactggagtttttcatttggggaggatttttgtttgtttgcttgttttttagaatcatgtttaggaaaaaaccctgtttcacaatatatcaactggaaagctttgatcaaggttgctttcatattgaatctttaagttactcaataaatagctgttgagtgattactgtctgtttggacttaatcttgtcattttagacctatggtaataaaaatggtctcacctggaggagataaaattaacacatagaaaacaacatagtacttaaaatgaacacattaaatagcatgtgctaattttatcctgtagtaaataagcactaggaagaccaaaagaaaaagtgacaaagcagtccaatatcagatagaaacgtcttgaattttttttttcttcaacttttgttttaggttctgggcttcatgtgcaggtttgttacataggtaaacgtgtgctgtggtggtttgctgcacagatcaacccaccacctcggtattaagcccagcatccattagctattcttcctgatgctctctgtccccccacccctacaaatatttttgatgctgtgaactttttgaaatgctacatataattattattttttgacagatggcattgttttgtgtacctcatgatgctatgaagtgtatgtacattccggaatcgttaaatctagctaattagcaatgcattacctcacatagttatcatttttgtggtaagagtacataacatctacactgtttacatttttttaaagaatacaatatatgattattaactatagtcagcttgctataaattcatgttatataatagatttcttgaa

SEQ ID NO: 914655 - DNA, 4001 bp, Homo sapiens
ttcctgttgggcaatcaggtccccccaccccaaccagggatgtgaggtgagggatatggaaagtcgagagcctgcgcctggggcggggtgggttgaggggaagcctcacccacctctctgtgctcccggaccgcactaacaggttggcggaggagattgccttcctggagagcttctgccgaggccgctctgagggggatgaggaggaggaagaatttcttcgcggcctggtgggggcatagtgaaggtcattccctccaactgtactctgcaatcctaccacccctcccagcttccgccacagggccacaggacacctacgtgtcagcacgctgtgggggctgcaagggcctgaggatccccggggggccaggggagccagcaccactgctgctgctgccccctccttcagattgggtcccgctaggctcttcgctggccccctgaggggctgggggtccattgctcaggccagggggtccaggggatgacttgagctccacctctgtctccgtctgggtgcctcggctcaccaaggaaggggtgcacgtgggtggcagtcctgggggggctgcaagactgctggagagatgttgaattaacctgaagccccagaggccccaaggaggaggaaaaatggggtgtgatgacatgcatacctgtcccccggaggagctggtgtgccagagccctgcagggaggaagggggcacctgcagccgcagcaggcgaagggcttctgccagggctgcctttaccagttccatctcctgctcctgcacccgaagccgctggctcagagactggagggcctcccgagcagggccgtcacctgggaaaagggcaagaggtactcagaatgtacccatcacctgaagaaagcgtagaggggattctgtctccccacaactttacatgtgtccggtaggactgcccctttcaggcagccccaggcttgaatgctcgtccagaggggaggagacggtggtaaaggatcaagggcctccttctggcagggcaggcgagaaacctggcaaagctcccttcctgctgccgtctcagcctccgcaaagactgggagtaccatggagtaccgggggggaaatatggagtactgccgaggaacgtgggagccacagagagaggcgccgcactggtgagggcagggaccgcagccctccccacgcgcccccagcaagctcaggtctccagcgaaagctgagtaactgagccgggggaacaccaggagagagaacggggtgcgggaatggagtcatactgaggacccagagtacaagaaaagagatccagagtgacaggagagagtgtgagtggtgagcagagtcacagtgaaggtctcagggggcagtggggatcagaaggaaaaagacctgaaataccacgagaagaggcccggagtaacgcagggggcagggaaacatcgaggggcccggagttacgtggggcgtagaatgacgctggggaagcccgaagtgacagcaagacccaagcaactagggagggcgaccggaggaactgtggaggatgctcggagcccctggggcggaggagcacgcggggacgcctccagacagccgtccagctctggcataacccgacgagccgggcgctccgggaaggggcacgccgcccgccccgccccgtactcaccgggccccgcggccccgtccatccggcccccgggttgctccgagcggcggcggcggaggaggcgtctaagccgcgggggccacggccggggagaggggaaggggaagcaccccggggcgcgcgcgaagggcgccgtaccaccaccccgagggggcgctgtcgggcgcggggaaggggcctggagggggcgctgtgggcccggggccgcagtctccagacccccccgggccctcggactctcccggggccgctctcggctcccgggggtggggtggcagggccgtccggtgccacagcgccgcagcacaaacaggcgccggacgcggagccgccaggaagcgcgggagggggggcgggcccgagggggggccgggccgcttggtaacccctccctgtccgggcctcgccgctcagtacgggggcggggctagccggctgaccccctggcctactcccggcctccggctccaggcccttcccggatccccgcccccggattcccaggggacggggaagggagcgcccgccccgatatctccgccccccagcccctaacccctcagggttgagcggaccaaccccaccacttccgcgaggggcaggggcggggtcacaaaacgggccctcggcctaggggcggagtttctcgtaaggggcaaggccaaggcatcttgtattggggctgacaggggggcgggttattagggctgaggatgggaggatgctcagggtattggggtcagggtggcattagcccagctcaagccgggccgggctgactcagcatcctgccccagccagcttccatccctgacacctctgcattcccttgggcagagatgggagatggcgccggtgttgcccctggtgctgcccctgcagccccgcatccgcctggcacaagggctctggctcctctcctggctgctggcgctggctggtggcgtcatcctcctctgtagtgggcacctcctggtccagctaaggcaccttggcaccttcctggctccctcctgtcagttccctgtcctgccccaggctgccctggcagcgggcgcggtggctctgggcacaggactagtgggtgtaggagccagccgggcaagtctgaatgcagctctataccctccctggcgaggggtcctgggcccgctgctggtggctggcacggctggtgggggggggctcctggtcgtcggcctcgggctagccctggctttgcctgggagtctggatgaggcgctggaggagggcctggtgactgccttggctcactacaaggacacagaggtgcctgggcactgtcaggccaaaaggctggtggatgagctgcaactgaggtaccactgctgcgggcgccacgggtacaaggattggtttggggtccagtgggtcagcagccgttacctggatcccggtgaccgggatgtggctgagtgagtgatttgcgtctcccttcctcctcctcctcctccctggacaggctccctcctgctgccttgaatccccacctcgctcagaggggcaataagtagaacatagtggctgagagactggttacagctctgccatttattagctgtgaaacccagggcatgttaccaaaccaccctgggcccattccttcacctgtaaaatggaaataatagtacttatctgatagagttgttgtgaagatgtgaattatgcttggctggcacatagtacagcagtcagtaaatgttttactattctttttcccttctgaacacctgtgcccttcagtccctcccccaggcctctatctccagacatcctaacccctctgtccctccctttgcagccggatccagagcaatgtagaaggcctatacctgactgatggggtccctttctcctgttgcaacccccactcaccccggccttgcctgcaaaaccgtctttcagactcctacgcccaccccctgttcgatccccgacaacccaaccaaaacctctgggcccaagggtgccatgaggtgctgctggagcacttgcaggacttggcaggcacactgggtagcatgctggctgtcaccttcctactgcaggtgagtcagcaaagcatctgacacctcctcccacccgggactcctccctgcctccaaccctgggcctcttggaaccgctgactctccctgactctttccccttgcttcccccacaggctctggtgctccttggcctgcggtacctgcaaacagcactggaggggcttggaggggtcattgatgcgggaggagagacccagggctatctctttcccagtgggctgaaagatatgctgaaaacagcatggctacagggaggggt

SEQ ID NO: 914656 - DNA, 4001 bp, Homo sapiens
tctccacccagcaaactccacctgcagatcaggtagcctttgttccagaactgcactcagatctcttggtcccaaatatctggcacacagcaggagtcactaaatgtgttctgaatttaactgaaatttgtttagcatccattcccatgatttcctcagacgtatgttctgtctccccaagctgtccatgagatcaaggggaaagaactagctcatttgttttcttcgcaggcacacaatcacaatgcaagatgagaggtggggaacaccctgtgagctctaggggtgcagctggtggaaaactaattttggatttaaatgtgtcttgtgtgtgcaactgacaacgtctttttcacatgcctgatctcgacaagtgttatcaacagttgaggtaggtggaaggatgtgaggaagataagaaaactaggtgcagattgtttgagacctggccaagacctcagagctagaaatatctgaatgagattacaacccacaggctctgaataaagcacctgaaagccagcctcctgtccactggtgtggtcctgggcagctgtggccgtcaggaaagggagagcgttgggtcagttcttcccccagcagcctgggcaggggtgggaggctggtgagagggcaaaggggagtctggcagggtgttctagagaggaggccaactgaggagaggtattaagagcaggccagcaggttcggaagactctgagggcttctcaagtgtttggtcacctttaccagacgggacagaacaccatgagaggtgacacgatttcctagtggtatgataatatagatatgaggagtcaggaaaaactggcttatctttccatcagttggaggtagtcaatgtttccctatcatttttaactaccccattgcgtttctaaaaatctgtatctttatttcattgttctaattcaacacaaccgcagatcgaatttactcaacgccgtggtagaggaaggattttcaggctaggatgagctctgcagaagagaagctttacttagtagaaaaggcagtgaatttctagacagagacctgccccatcttactaactgggtagtcttccatatgtctcttcaccccctgggtttatctcctcttctgtaaaatggggatgaaaatgcccacctacccacctccaaatgagtgctatggcaataagttgcacgaaggcctgtgagcgcccagcctaggctttctgcggatctgaacggtctccagggtctctgtatcaagctcttcaccattcaggaatgaaacactgcggatgtctgctcagaaatgcagggagaacctcctcccacaggggacctcccgccctgcagctcatgaagtgaaggctcgcagatcgccaggctcttattgtagctcgacaggggcgaggcaggctaactccggggacgcaacagggtggacctggaacccgggtttcttggcccaaggcaccgaaggcgtagggattgctgttcccggcccgcccctcgcggtagctgcaactgggggcatgtccagcggcacggtctccggcgcccgcagcccggctcgggaaccacttcgcttacctgcggctccaccagccatcgctgctcggcgccgccgggcgcagggcgcggggcgcggaacgcggagtacacggggatgcggtcccgggtgctgtagagggtggcgaagcgctcagcaccctccgcgcgctgacagatcttcacgtgggaatcggccgccagccccgcaggcggggtcccggcgtagaagaacttgtcacattcgccaaagccggcttcctcctcgcccacgagccggccttccagcagcccagccagggcgaagaggctgcccagcgcgagccagcgcgcggtgcccatggcggcctctgcgagcgcggcggggccgagcggctgggctgccgcggcgcgagctctgcaggctgggcggggagcgcactacgcagccgagcagggtagggaagggaagtcgcaacctaggcgcggcgctctgcggagccgggcggggcggcccgggcggcgggggcgggtccgcgtcgggaggccgcgcctccctccctgaagatggctgcagaggcccagggccgcgctccgcgatgctgacaacgtaccctgggctgcgcccgggactggagacgcgggtcacctgcctccgcgccgcctggtctcagcagtccgggggacgcgcgctaccaagagtggagaatccgagtggggcgggcctagtcccggggctgggaagagatagtcgcatggactgggcgccaagaagcctgctgatcgcgcgcgccccacggccgccctggtgatgcagaggggtggcgtgagatgctcgtggagctgcggctggttcggagtggatgggcagagttcccctctgaaatttcatgaagatgcgtctcccactctccaccgaagtactcaacgaccagcacacgcatacaattttgatggagttttttgttttttgttatgtttttttagctcaccagaaactcagagagtaaagaaatactgttaaaggaagttcctaaactaggcagacagtataaccctgtgtggttttcttggtgcaagtgttagaaacaaaaccgataccaagcaaggaaggaggccagccaacgtcattggtcaacaggttggccaattctttccttcatttatccctctgaatgcctaggtgccagcctgagataggcactggattaccacaggggtaaacaagagcagggctcctgcggtcacaaagacagcctagtgggaaagtttgtcattaaccgaggaaacatgctattaaagggataactaaaaactgaacacagatctgtgagaccctgacagctacaggggttcaggatgtaatccgggaaggtttgcctgaagaagtggcatctgagctgagacctggaggatgacattaactaggcaaggaggaaaaccatgtgctaagtggtctcccacagaagggaacatgatgtattggaggaatttaaggaaggctagtgtgggtaaagcgcggagaaccgcgtgggggatgatgggaagtggggctaaaggaggaggcaggggtcatattactcaggttattataggccagaggccttcaaacactttttgagaaggcccataatgagaaaagtttgatgaaataattcttatgcttatgattggcattgcaatttcatatttctgttctacttcacttttttaaaaaagtgctggtgttgacccactaaattgtttctatgagccactaatggctcatgacctgcagtttggaaaaaatattgtaaatcatgttgaggattttcatcttttaaaggtggtgactcgattctttttgctatcagggaagagactggtagattgaagtggcacagaataaatgggtggctcacacctgtaaccccagcactttgggaggctgaggcaggcggatcacctgaggtcgggagtttgagaccagcctggccaacttggtgaaacccgtctctactaaaaacacaaaaaaattagctgggtgtggtggcgggcacctgtaatcccagctgcttgggaggctgaggcaggagaatcgcttgaacccaggaggcggaggttgcagtgagccaaaattgtgccactgcattccagcctgggcaacagagccagactttgtctcaaaaaagaaaaggaaaagaaaagaaaaacaccccataattgccacaatccagataagagatggtagcttggaccaggatggtaggatggtggcagcagagatagggtcaaggcagctacccagggccagggcctgtgctcatcttacgatgtcatctgtttccccagtgtgccactacagggactgagaccagagcctgttgattctggcctaagctggcacagccagtgagtcctaagacagatttgaaacaggtctctctgcttcccaagcctggccttttcttttaactcacagcgcatctgtaaggtgagccc

SEQ ID NO: 914657 - DNA, 4001 bp, Homo sapiens
tgttggtatggagggtcaagggagtggctcggagcacccgggactttctggtttgaccaggtctggcctagtgggagggtctgggaggcccgggggcactgccgctgacatgaggggctgggtgcaccagggggtatggccacttcctccatccatctatccgtggagaatgtctggaatgttcacgggctcagtggcgagcctgagtgtttgcttaatgggattcctggcgggctccaccaagggcgccaggcacgtgtgtccaggcacacacctgggcgagacaccaacgcacccttgcagactcaggcctgggggcacgcaaacatggagggctgtgacacgcgacccccctggggaaggccaggttcctggccttcggttgcctgcagggcatcggggacctcaggcccaggcagggccgggcagcagtggggtgggtccaggtgtggtgtctgggtctgaagcacatgggtatggggctgcctcctgccctgtgggagccccgcccccctggggaggcttctttggcccactggtggtggggacgaagccctggaggcccaggctgcactttgtactgtggtcattttcccggtgtgaagtgaggcagagcggggtgcccggtcagtcgggctgtggaggggaggaggtcccagcagggcaggagggtagagggacgggctccaagttcaagttccagctccacatgctgagtgaccttggggaggggtcagctgagtcacaggggctccaggctgccctcataggcgctgggtggggccctggaatggggaggcccctcaggccctggccctgtccttgtttggaagctatggcttgagggaggaagggataagctggggaagctgagggtgggaaaggagaccgaggcaggcggagaaggcccggtgggagagctatgccaacaaggcctgggtgctaagcaggcccgggagaggctgggacccaggaggggccgcgaggggaggaggggccgcgaggggaggggccgccgccagctgggcctgcctcccagcacagccgacccaggactgagcacggggtgggtgggggcagaggtccgggcatgcccggccctgcctccccctcccctgccaccagggacaccccgcagcaaggggcaacgccaggcagctggacgcagggaccaggaatctaggatggctgaagttcgcgtgcccacaggctcctgccagcccaccctcctgcctctcctggcagggcctctgcagcccctgtcccagcctcccctcctccctgaaactcccacccccaaccctgacctggagactgacccagctggtgcttcccggccactggtttccttctgggctccgacacccaggaagtgcctcctggctccggcccacagggagtgggtgtgcagtgctacctccacggtcaggccctcgggagggtcctgctgctcacagaaccgggagaagcctccctaccaccagcgctctccggacgcagggattgcccccaccaagccccagagctgggagtgggcaggacggggcaggtgagtcacccatcgctggcttaaaaatatccttgctcgccggccgccgcccaggaccgacgggggcaggccgggctgcagcaggacccgtccaggagaggtggggactcgaccaggcccccagccccttgccccgcgccctcggcccggccgccctccaagtgccccgcgccctgcgacgccgcgttcgtcccggtgtcctgaaccagaagccccgcgtcccatcgccaccgggtaaactgaggcccgggcgggcgcgctcccccgtgtccgcagcgctcacctgcctccggcgccccgcgctcggcctgtcccctcggcgctcgccggtgcgtccgtctgttcgcgcctcggccggggcgccaggtctcccgcgggcgggtgggacgctcggcggggccgggccggggcggggccgggagaggaggaacctgagcgacaggttgcggagtcacccgagagcgggcgggcgcgcgggggaggagggcgtgggatggaggcgcccccgccggcctcggacccagctccgccccgccccctgccccgcctgggctccagccccagccctctgcgtcctccccaacacccgcctggtgtgcccctccgcgggcctagcccctagagctggggcgctggggacaggcggggcgcagggccgcctccgcgggatgagcagggcgaggcctcgagctcttccttgggcagggcctagctgcgccccagcaggccgggggacgggggaacgctgccaatgggacttcgggggcagcgctggcgcattgctggggagggctccagccctggggaggtcagagcctccgccgggccaggtgcacccctcaggtgccccaggcatggggcagagtcacttcccttaccgggcccaccgcaggcccaggggcagaggcttcggtgagtgggtgggtgtcaggcaggacccagccatgcccaccccaggcctggagccctgagttcacagtgcagctgctcctccaggcccccctttctgcccagcctgggcactgagggatggggtgtcaggggaggtggggacacctcaggccctctcaggatgcctctctccttgcactgccccgtggtcaggcccaggccccacctctgcccaccacagtgggactgtctggttccgtcctcatctgcccggcttccaggatggcccttctccccagctgctgtgaccgctcagaacagggccagggtgcagtggacacagcgggtagcaccggctgccacagcagtcaactggacgaggacgaggtgaaggggcacagggcgccccaggcccatgcagggacccaaggctccggctgccggtcctgggtaggggtgggaatgagcgtggccaagagtctgggtccccgggctatggtcccagaggggcagggctagcgtgtttaccctgggctggccggagcacttcctggggaggcgccataggtgagctcggtggagggctggcaggaagtggccctcctccttcgggcccagtgcctgcccctgagcccaggcaagacctggcttcctggtttacagcctttgccgtttgatctccaggaacctgccgtgatcctgctccatgcatgagcttgccctgacccagagctcagggtcacacacgccaacccctcggtgcacccgtgccctcacccttcctggaggcagagctgggagtggccaagtgggaaacaggcgctggagaggacagctggggggtggggtccctctccactcctaaacgggtgcctgtcaacacgattttgagtgcggagcctgccctcaggagacagtccaggctggcctctcgggccccatccactccgggtcacctggagccatggcgttccctgtggaacaggtgaccactgcctttgtgtgctcgctgagactggaggtatcaggatccattaaccatgaaggcaacaggtctccagcttcagggagggggtccttccctggtctgcatggtttgtgggctgggtcctccagatggcaggtgtgcccagctggtcttctgcgagtgcaggcgctggtgagggaggtggcccgaggcgctcaggcgctggtgtgtgaagtgggtcctcagggctgtcctgcagctcaccgtggccactgggggccacagacaggtcaaaggaagtcggcccaggacaactgggtgctcccaccgcttccacgaagacaggcaggaaagactgtccaggtgccacagccacagccaccccagccgagggagccccagtggaggcccaggacagtcccgcagcctcctgccctcaggagtccaccgagcggaaggcgcccggcagccagggcccgagggcgaggccagccaggaactgaccagctggcaagtggggtgtgctctcttgcagggcaggagaactggagatggggtgggggaggtggccataattaggagaattcagggagg

SEQ ID NO: 914658 - DNA, 4001 bp, Homo sapiens
acactgggacagcccaagaaagggacccttccggcccacagccctctccgaggccagagtgagggagccggcaggggccgaaggagagcgaaatgggcccgctccccggggctatttttagtctccctctttctctgagaaactccccccgcgggcttctcacgccccaggggcagcagcactgagccgccgaggagcctactgagccggagagcctcctccagagcccagaagagcggagccgggcgcctgcacgttgcaccggggtcaccagtgccatttaaccctcgagtggctggcgggaactgggcaaccccccagggggaccgattggaacttttgagtccaggtcttcagtctgacaaactgaggctcaaagctggggtaggacaaagggttgcagatgagcagcaggtgaagcctgggacactcaggcagtcaacttgaactgtcctccctggcttcagagattcccccagcccccaccccccacaaggaagggggatagagttggggtggaatgcagaaggaacagagctgaagttgaagttgggaaaggcgggatgagaagtctgagggatcctggagcaggcccaccaagcccagagggacagaaggctacttgtggccttggtgtggcctggggggctgtacttgagactcattttgtccaaggactataatattgcatgccccgacacctgtggggcacagaacatgctaaaggggacactggtgatcctcatctctgtccccatcattgtagaatttcactctacagcttcccaggccttacttgtcctgacatcctccaacctgagaaatgagttaaagtcaatatagctaaacccacccttcactcccattcgagatccttgaagggagatggcaagaaagctgagggacagcaagtgaaatagtttaaaagggcctagtcctgccgggtcctctcccagatggagttctgagccaccccagcttcagctgaagccagcgcccctggaggcctacaacacttcccaaacacttgctccaaggaggttcccttcctctctgacccttggccaccctcctcccaatttcccctcttccctttggctctggaaaccaataagggtggtgggccttgggggggtggggtggtcacaattctgtttctctgtgcgtttgaacccctcccccatttcctgtgtcccaaatgacctcacggtcgtccttttggggcacctcccttgattcccagggcaggaagcaggagggggcaagagagagcatctgcgctggggaattgacacgaagtgcgtgtgtcaagcctggggaccaggggtatttccccgggggatcttcctcatcagcttgtatgtggggtcggggatgagagggggctagagttaagtccttaagctctttagccagtgtctcatctagcggctcagctcatccggctctgctgggtggggggtggggagtggacagggtgaggaatggttccgataactcaccccagaggtatccaggtcttccgagagatgcccttacctccccccgccatccgcccccacacccaaactgggggctgtccccgacaaagcgagaagtcagcgccagccagtgatgccctggagtgggattaggaggtcaggggaggagggcgagtcgtgggacccagttccgcagcagtggccaaagttctccctcagggtcgaactcaccccatcccgcatcccaagtcccctccaggtccgggtttcactcaccgagggcactcagccccaggaacaaaaaccgcagcaagttggtcaccaggggccccgggagggaaatcatggccctccctggccgggacggagtcaggggcgccagccgcgggacgcacggacctgcaggtgccgaggctgcgcgacggccggagcgtgcgcgggagccgagccgctgacacccagggcggctccagcccaagtctgcgcgcctgtgtgccggtggcggggtggggaccgacggcgacagcggggcggggcattcgagggggcggagaggtcgccgtcctcccgggcggggcgcgcggggtccgccgcccgggggcgcccccagcgcgcggacggcgggaccctgcggcctcctccaggtctggacgcagggaggggtgaggtaagctctgatgccccacgagccagccaggtacgagtagagggggaagaggaggctccagaactatcctgagccgtaaccttcccttccgccggggtgggataggaagggtgaccaggaagggtgggaaatttggggactatccgaagtcagaaccacccgtaacacctgacatgtaaacgctcctgggctctggctccaaacttgggggtgccgcatccccggcccaatcagggcggtcttcctgaaggaggaagaggggagcagcgttttccagctgcagggagaggccggagcgccggccgcgcgggctccctggcacagcgggaatctgtggctttcctggaggcgggggctgcgcggccaccggagcgcggcagcgagggcgacggcagaggtcgcgcgggagcccagggcgccccgggacgcgccagcggggaatcttcacccgcgggcaggaaaaagcgctccgcgagttcagcagaccccagcccaggctggaggattaccccggcctgtgcctcatactccgagcagggaaggttggcacaaggtagtcccgggagctgagcaggaaactgaggcaacgtgcgtgctgctcccagcttagcccctgaaatgagcggcgtacgggcctgatgctgactggggaggaggggcggctgcgggaaggaagacaggacagtccctccgtttcttctttatcccccaaatcttcagtgcctcccatccccgcagcgaaaggctcaggcgcgctctgatcctttaattcccgagactagatcttggtcgctgtgaattgaattttacgccccccttcccgcgccattcggtcaaaaggcacctctgcgccctctggcggccgccgctcccttacagaaaggcacgcacctgttcttgcttttctgtccaacagccaaaaaaaaaaaaaaaaaaaaaaaaaaaaaatgcttcaaacatcccagcacagctcaaccacccagcaaaggtcagtgagggaagaaagcataacaacgaattcctgacgctgcccgctctgcgggcagagctgtctgggaagaaaagcagccaggcctgcgggattccatttactgcacatagttttgctgttttaacagagtgtagtccctgggcccacacttcacacaagatctttttctatacagtgccccatatgccctctcagctgcttctttctagtgtgacctgcctggctcctcttcaaatacctgccatgcagtggctttgagaaatgcctatgcaaacacaaaactgctcatgcaaaccctagaatctagtacttggcagctcagtggaggcacagacaacaggaagagatacctgccagtctcacactcttgtgtagggagctacaaacttggacttggccaagcagattgtgtggtggggttgggggctgttggtttggttttcctattccatcacactcaaatttttcttggctttagtctgcattgcaaaccatctcttgtaaacacccctcctttgtttccagacaagtcaccccaaataagtaactccttccaagagaggaagtacaaagtcttttggttctaacccagaaacaccaagtatctaatcacacaggctgtgcttatcctgatcaagtgctacataaggtgtagcctcaacattcattccctgtagctaacttttccttcagaattcagatcccaaatgacttgtgacatgggaagtaaagctgcaaccaatgatttgtagtcagtgaatgtctccatgtgacacaggggcagtctcttcaagattctttgaccgtaaagaattgtcctcactgtctcctgtctcctatttcagctatttctttcttctga

SEQ ID NO: 914659 - DNA, 4001 bp, Homo sapiens
tgttagtctttttaaagttgggtgctaaactatgatgtagcccctctcaagtactgataaaaatctgccttgttttgggaggccgaggcaggtggatcatttgtggtcaggaattccagaccagcctggccgacatggtgaaacgtcgtctctactaaaaatacaaaaattagctgggcgtggtggtgcacacctgcagtctcagctactcaggaggctgaggcaggagaatctcttgaacccaggggcaaaggttgcagtgagcagagattgtgccactgcactctagcctgaacaacagagtgagactctgtctcaaaaaaaaaaaaattaaaatctgccttgtgttggtgctgctttgggaaaattaacaaaaaggggacatgttctatgctggggagaggtcagaagctgccagaaacaagaacaaagcttaggaacagacagaggctgccttggactctttcagagccactgtagaaggtgctgggcctagagtacccaggtggtaccctgaactcactcacatccactgcaatgcatcagcacacccggtgcttttaccatacttctcagggaaagagtgtctctgggaggtagagggactggaaacaccagattgttagcctcaagcggtgccacagccatcagggggcctattgcacccagcagtgtacccagagggtgcagggcaaaggacaggggagtgggctgggggctcaccctggatggtcctcttgaagaaggctttgcaggcctcacaggatgccacaccatagtggtagccggaggccacgtccccacagaccaggcagaggcgcttgggcagggagctgagcaccagcttcccaccgccctgctcgccaggcccagccccctccccatcctcctcttccttgtggcctgggaggcagcgagtgggagctggaccaggggccagggccacaggaggctcggtctctgtctccgaggaaccctttggactgtcagggctggccggctctgccttgatgtagagaggctcaatgcccaccacctggctggacatggcgctggtcacctgcacggagagacccataggttcgcaggaaagcactggtatgggggatgggagacaccctgccacacgggttgcccaacctcgggcctagggccaggcttccaagcccagcaagtggggaagaaggggggcagagtccaaggaaggactgcccaggaacactgccccctcctagctgttgccatggaaacagagtcttcagggccagtaactgacagcaggtctcccccttgggaacctgggggaggcttagaaagcccctactcccacccaggccagggagcagggtaaccgtagcccccaggcaaccttcaaccccacctggaatccctagccaggagcaggatacttcccagttttctccagatgttggggggacctctgagaccctgccctcatctgggtattctgcattggagagcagacccaaggccagtggacgtgctcacaccgagttcacacactccactcaccggggtgctcaggagccccacaagcccacgcaggctcgctctctgctgagggctttcacacttgcaccggccttcccaaacccgtgctcactcctgctcacacttgtgctcacacacttctcctggagcgcacaccccatccacgaactcagtcaaggctcatgatcacacacactctcactaggtctccccacatccacacgcacaggcacggactcatgaaaacacctccagagcttttcacacctgacacgcggctgccctcctgccccagcatgccggtcccaggcacacggcgggcgccgctccacctcctcgcgaccagcctgcaggtccactcttatactcccgctgtcgcagaggccgccacctcccggggcgccgcgtcccgcccccaacctgcgcacacctttgggaagttgcctaaagttgctacgcctccccctccccgcccgcgggagacctctaccaggttatcaggaagtaagtggggagagccaaggaggaggaagttctcccctgccggtgcgatgacctttgacccagagaggagggtggccccaggccccttcgagcgcccccacgtggtcttcagagccccttcccagacatagagccctccccgtcttccaccccggccagccccagggacttcggcaaatgcgggattgaaccctgccccggagcgggctggatcggaggcccaaccctgacccgagtcaggacccgcagccagagccagatcctgccccaggccggcccaccaggactcggacgccggatcccgcctgaaccctgaccagtccgaccctcgactgggtcccaaccgtggcccggactggccccagagtcggaccccgcctgcagcccgccccgcccgcctccctgccgcgctcgcacatggcccccgcgccccgcccgcccacccccgcggcagcgctcccctccgcccccggacctggggctccggcagcgcggtcgggcaggcatgggggccgagcggcccggagtgccggagtgagccgggggccgcgggcggcccctcctccgccgcctcctcgggccgcgccgccccaccgcgccgcgtcccctcactcggcggcgccgccggctgcttgtaggacacaaaaggacatcgcggccgcttcctactccgcttcctccagctgacagcgggggtggggccggccgtgcgcatgcaaagcagggggcggggcccggggtcctatgctaatcagaccagcggggcgggcggcgcctgcgcgcccggacgagtcggggcggagccggcagcgccagtgggcgggccttcgtgcaggtcccgccccgcagcccgccgagccactgcggcgcacatgcgtacgcggcccctgggaggggcggggccggagacgcggagggcggggacaatagagccgagagcaagtggggccagaagcgctctttcgtaacggaggaggcggggcttgctgcgcgcgagaggagtgggcgaggcggtgcaggctgcagtcgcggagccaagagaccacttacagatgaaaacgcaagggcgggacgagcggagaggctggacctgctacctatgcttgaggggcggagcctagcgcgccgtcgcgaggagggaggtgctgccccgttccccctacccccttcccccaaagcgacaccaactgagcactcgaaccgtagacccagtagccccacagagctgcggaactcggggtgggtgaagccgacttaaaacatgcaataagtcctggattgcgagtcccggaaggtagggccgatagggcccggacggagaaagctcaaggtcactgcggtgaccgaatgaaggtcactgcggtgaccgaatgaaggtcacggggaagggcggggccacgtgcgtccgcctcacgcgggctgtcctgcactgactcacggaccatgcatcgactcttttatttctttaggactcaaattccactcggatggggtcaggcttgggtctggggaccgggctggcacggggctggttcgggtcgctgctcgagcccaaggtggcgtttttaattcacgtacagcctcttgctccggcgcttcttgagcccttcgatgtatcgctgcagctccttagtcaggaagtggtccctgccgatccctaactggtagcctaggaggagggcagagctcggctcagggcagtgagcaaccgaaaggtctccccaccagggggcgccgcatgtgtgattcgaggaaccgcagatgattcgaggtagcagtagcgcagggcactcaggtctgtgttagcctggggaactttgcatctctaagggtgctgagtgttaaggtggaggatggatgaggtcaaggctagggaagaggttgcaggcctgaactagggcggtggtagcgagcagtttgcccaccttctggaccagccacccactctaagccatcagctggccctttatcaccgctgggctttc

SEQ ID NO: 914660 - DNA, 4001 bp, Homo sapiens
caggggagtgggctgggggctcaccctggatggtcctcttgaagaaggctttgcaggcctcacaggatgccacaccatagtggtagccggaggccacgtccccacagaccaggcagaggcgcttgggcagggagctgagcaccagcttcccaccgccctgctcgccaggcccagccccctccccatcctcctcttccttgtggcctgggaggcagcgagtgggagctggaccaggggccagggccacaggaggctcggtctctgtctccgaggaaccctttggactgtcagggctggccggctctgccttgatgtagagaggctcaatgcccaccacctggctggacatggcgctggtcacctgcacggagagacccataggttcgcaggaaagcactggtatgggggatgggagacaccctgccacacgggttgcccaacctcgggcctagggccaggcttccaagcccagcaagtggggaagaaggggggcagagtccaaggaaggactgcccaggaacactgccccctcctagctgttgccatggaaacagagtcttcagggccagtaactgacagcaggtctcccccttgggaacctgggggaggcttagaaagcccctactcccacccaggccagggagcagggtaaccgtagcccccaggcaaccttcaaccccacctggaatccctagccaggagcaggatacttcccagttttctccagatgttggggggacctctgagaccctgccctcatctgggtattctgcattggagagcagacccaaggccagtggacgtgctcacaccgagttcacacactccactcaccggggtgctcaggagccccacaagcccacgcaggctcgctctctgctgagggctttcacacttgcaccggccttcccaaacccgtgctcactcctgctcacacttgtgctcacacacttctcctggagcgcacaccccatccacgaactcagtcaaggctcatgatcacacacactctcactaggtctccccacatccacacgcacaggcacggactcatgaaaacacctccagagcttttcacacctgacacgcggctgccctcctgccccagcatgccggtcccaggcacacggcgggcgccgctccacctcctcgcgaccagcctgcaggtccactcttatactcccgctgtcgcagaggccgccacctcccggggcgccgcgtcccgcccccaacctgcgcacacctttgggaagttgcctaaagttgctacgcctccccctccccgcccgcgggagacctctaccaggttatcaggaagtaagtggggagagccaaggaggaggaagttctcccctgccggtgcgatgacctttgacccagagaggagggtggccccaggccccttcgagcgcccccacgtggtcttcagagccccttcccagacatagagccctccccgtcttccaccccggccagccccagggacttcggcaaatgcgggattgaaccctgccccggagcgggctggatcggaggcccaaccctgacccgagtcaggacccgcagccagagccagatcctgccccaggccggcccaccaggactcggacgccggatcccgcctgaaccctgaccagtccgaccctcgactgggtcccaaccgtggcccggactggccccagagtcggaccccgcctgcagcccgccccgcccgcctccctgccgcgctcgcacatggcccccgcgccccgcccgcccacccccgcggcagcgctcccctccgcccccggacctggggctccggcagcgcggtcgggcaggcatgggggccgagcggcccggagtgccggagtgagccgggggccgcgggcggcccctcctccgccgcctcctcgggccgcgccgccccaccgcgccgcgtcccctcactcggcggcgccgccggctgcttgtaggacacaaaaggacatcgcggccgcttcctactccgcttcctccagctgacagcgggggtggggccggccgtgcgcatgcaaagcagggggcggggcccggggtcctatgctaatcagaccagcggggcgggcggcgcctgcgcgcccggacgagtcggggcggagccggcagcgccagtgggcgggccttcgtgcaggtcccgccccgcagcccgccgagccactgcggcgcacatgcgtacgcggcccctgggaggggcggggccggagacgcggagggcggggacaatagagccgagagcaagtggggccagaagcgctctttcgtaacggaggaggcggggcttgctgcgcgcgagaggagtgggcgaggcggtgcaggctgcagtcgcggagccaagagaccacttacagatgaaaacgcaagggcgggacgagcggagaggctggacctgctacctatgcttgaggggcggagcctagcgcgccgtcgcgaggagggaggtgctgccccgttccccctacccccttcccccaaagcgacaccaactgagcactcgaaccgtagacccagtagccccacagagctgcggaactcggggtgggtgaagccgacttaaaacatgcaataagtcctggattgcgagtcccggaaggtagggccgatagggcccggacggagaaagctcaaggtcactgcggtgaccgaatgaaggtcactgcggtgaccgaatgaaggtcacggggaagggcggggccacgtgcgtccgcctcacgcgggctgtcctgcactgactcacggaccatgcatcgactcttttatttctttaggactcaaattccactcggatggggtcaggcttgggtctggggaccgggctggcacggggctggttcgggtcgctgctcgagcccaaggtggcgtttttaattcacgtacagcctcttgctccggcgcttcttgagcccttcgatgtatcgctgcagctccttagtcaggaagtggtccctgccgatccctaactggtagcctaggaggagggcagagctcggctcagggcagtgagcaaccgaaaggtctccccaccagggggcgccgcatgtgtgattcgaggaaccgcagatgattcgaggtagcagtagcgcagggcactcaggtctgtgttagcctggggaactttgcatctctaagggtgctgagtgttaaggtggaggatggatgaggtcaaggctagggaagaggttgcaggcctgaactagggcggtggtagcgagcagtttgcccaccttctggaccagccacccactctaagccatcagctggccctttatcaccgctgggctttcctaccacagcagcaaaagttcacccacataatccactgtccaaaggctcctcacaactccccaaccagaggcagtcgaggccacaccaaggcggtcatcccactgtgcaggtggagaaacagccacagaaaagcctccctcagctggagaggggctgcactcagcctggagcccaggcctctgcccatcaccacatgtcccccactgggtcttcctgtgcccagtccctcagcttttaacttttatggggcccttggaatacttgtgagtgccaagggcatctgacaagacataaggcaccctgaaaccccacccccctgggccccagccctgcaaaatccaccagaatctgtcgtgggagttcttgggggttggcggggagcttactccggagggctttggtgaggatttccagagcttcattctccatgagttccatcaggggcagtggcagctggagaagcagcaagaggcttaggcgtccaggtacttcatctctgcccacagctgaaatgcccccacctcctccctgtggcccccaaacccccaaccagcctgcctgcccctccaccctgccaaccacccccaactttcatatcctatcaacccccaatttgcctatcccctaccccaccgaaacgcccagtctccccagcccctccaaccctgctctgctgctctgcccagtaggctcgatgg

SEQ ID NO: 914661 - DNA, 4001 bp, Homo sapiens
gattatttgtttgcagtgttttgccttctgcctcaccctcccctaggtgagaggacctgcacccacacacccagtttgttgaagtattacttcagacagtccttgacctcactggcactctgatttttcatagccctatgctgtttacttctattctctcatatttgtaaaccaggcggggcgcaaatgattgctcaccttttagagatgaagggaagaaggcacagacacgttcaatccctgttctctgttacaaagctaatcactgacataatccaagtgcacagccactttcccttctccgacccagcgctggttcaagttctgaccccacttgcctttgaactccattatcgtccgggaccggccactggcccaagtcggtgctctggccacagactgccagatgccaaaggatcccacccctctaccagcttcccccaggctctgcctcaggacatcctttcacagccagcaactagcacctccgtgtaaggagcctgccgggcaaagatgccccctccataattaggctctcggcttggcttcccacatcctcagcagcggaaccaggacggaagaggctgcatggatgcctgaactgtttgttatttcactattgagttggcaaggatggaagtagttgatttacaattagaagcagcatgcttcttcaaatattaatattaataactgcactactgaacacatgaaaagaccttttcatcttcaaagcactttgcagacattaacccattagctctcccttccctccattcaggaacaacaggtgagcaagactctcaacagcagcagtggccaccctgcagcccttgtgcacagcccacggcccctgaagaaaaagcgttttctctttggataaaaataggccaccaaacccaaaaccacaactgatgaaagagttatagtatcagtaattttacaaatcaaatggagctgatggagttatcattttagaattggtatttcctgctgtttaacaaatacttttttctcagttgcatggcagtggtctaaagtaagaaggaaaatggacttgagattaaaaacaaaaacttacccaaaaggtgataaagaaatcctgcaatagaatgcattgatttcagtgacccagcacccttttaagtttgcctgaagaaaatactactttaaaagttggtaacagagacctttaacggtgggtgaggagtcacatacaaagtgtcacggccagataaaatcaccggatgcagaggaattgccatcgacatctcctgccactgagtccagctctaccgtggggacaagaaatacctccctaactctgagacaaccgcggcccacacccacaccatgtctcaacaacagacttaggaacttgtagatctttggacaactgcaggtcagtcccaagacagagaaaaacaccaaacaggctagtttggctagcaagattcaaacctgtagcaatttcctctctattaaaagcaattcattaaactactagcaggagaaaaaagtaaaacaatagatttactaggagtgaaagagaataaaaagaaatttatatatttaactacagctttatttctttggaagtgctccaatttgcaaaaaaaaaaaaaaaaaatcagggtttctgacaagtaatctacgggtatctaaaacgtgcatggttttacttttgtgaagcagggaacatttttaaaaacatagtcttgctttcagactattctgacgaggttaggaagtatttttgaaaattgttaaacaattaaatgggaatatagaaagacgtgaaaagagaaagagaaaactcacttgtatcctgaatctccctaccgacttactctttaattccacagaaatttttttaaagcaggaaaaggaaaatggactgaaaagttttaggcagaaactgacacacacctcacttactactttgccggagagcagatcctgagtgagcttccctcaaagtctgtggtctctttccaactacctgcgggaatcctctgctccgtagcttaagaggatgcaaagaccataatgtttctaatagagctgcctccttaaattggggggtgtggtcaagccagggaaagctggaaaaaaggcagtcttcctcttgcccctggcaccaggacagcagccactggcacaggcacagcagtctaggtggaaagcactgttgattgacagtggtggcaccaaatcacacattatttcgtattcttcaaattgtgcttcagctgaatataactcagccttggagagtaacagggagggagatgagcaaaagggaactagttcagtgggataacactgtatctcacctcatcatttgctgatgcatttactctctgctgaatatgtaaatattcatgcttcatgttccttgactttctcaatggagcccccattaacctaggcaaggtctcaggtgagggaaagggattgctttagaaacacaggacgtccaccacccagtcacctgctcaggcttcccgtttctctctaataacttgatatgaaatgtgatattttctaaagaaaagaaaataattttgtggaagagagctgactggatatggacttgggatttctgaaaagtaaagctaaaaatccccttttcatataagtctggttttaggcaatctctaaaataaggatacttttagcagccctgactcatggtccgtggtgcaggaataaaagggcagaagtgttcatacatttctcatttagggaaaatgtaaacaatatgaaaatcttacatctgtcctaagtgaaaatacacagcatcttttattcacatattcaggactatggtaagaatgttacagcataatctcatttctatgaatggagttattacaattttttttgagaagtcagtatttggctgcttaatctaagacttttatcctaaaagattccatcttctttgagtaggaggtgggagttaagatttgtcatagttggcttctttctctttttaataaagatacaaacttagaaaatccttgaaaatctaataactgtcatttggagccatatcatcatcagccttcattgtataaagctggcaatgcagttaagatgacattgtaagtaaagcaagattttactgctcatcttctgcctttgcacattaacttggaagtaaggaagaggtaatgctattggttcactttagtttaataaattgcctgtgccaggcactgttctaggcactagaaagatagcaagtttgcattgtagtgaggagacagacacataaatcaacgatctccccccaaaaatgtaatacatgctacaaaagaagtctatgaagagagctagggaagcttcagcctgcccctgtaacccagtcaatttcagcacactgccccatttaaagagcccacggtcaattataccaatcataactaattacaactgtattcactatgtttgcaggataattgaaaaaaacaaagttgagaagacttggattcttgctctataagggtgtacagtgtggctgtcaaggggttctgaagtctggagttgtctatgctgagtttatatagaaagcaactcttcaggaccttagctccctcctctgacacggccttttacggtgtggaagaacataaactagaaatcttaatagtgcaaaataagccaccactgtcataaattgcctagagaatgcccaggaaaacagtaagttttgttttaaacagtattttcaaaaatataacattagatgggtatccacatataagagcatgacattggactcctaccttacaccatactcaaaaattaacaaaaatctatcaaagatctgaacataagaatgaaaattataaaattcttagaaaaaatcaaagaagaaaacttcatgacattggatttagcaatgatttcctgggatatgacagcttatcccaggaaaaaaaacttgggcaacaaaagaaaaaatagataagttggactttatcaaagtttta

SEQ ID NO: 914662 - DNA, 4001 bp, Homo sapiens
cccaggatgaaagatcccttgtaggtatgtggactgacatatcgacacgatatttcccagatgaccaaatctgtctcttcccccataaacacccataacaacacatataaacaagctgttcttaaggaaaggacctattagttgagtttatatctttgatgtgaactatcttttcacttctatatatggtttcaatcaactgacaaacagaactcattctagcttcctcgaacccccaaacacaaccatcatagaaacagcatttctgaattgtaggcctaagtgccttaaatgtctccatggttccagctgcgctctcagcattgctcccaccaccatcatccttgcgaggagacaaaatctcagccttctgtgcacagcagccctggagctgaatgtcaggggacccagagggaggggacgtgacctacatgtctttattaatatttctgaaggacctcagaatgacaaaacatcagtatggttgtgctgaaagtttaagcagcgtaagaaagggttaaagtaagcaataaattatggcagaggcaaagaagtgttaaccacagggggcagcaactaaacttattgataatcagatacaacagaggagcctgttcttgaaattaattattttccagggtgcactgccttctccctagatctttctatatactttcacctccaaaatcactcatctctaaggatagctggcagtgccttatcctaaaagaaagcatctttccctctcaaactacatttgtttcagaaattctgtaaggccagactctcttaagttgcttagcaccaatatttgtgtcaaagacaaaaaaaaaaaaaattacttcctatccttctcttcttcaaatgcatataaatgaaagagttggacaacaccatgtaccaaagacacaaagtcacatttgggtgtttgatgctttccttccaacggacctttggtaccagaagaaaaatttatggcagattagaaacatgggtaaagtaagtaacctacatgaatagggtcggacgtttctcaaagttaagaggataatttcaattctcctccgatctccttaccctcaacccagaaaagaggggcaaggcatgtgacagggacgcttggggaggcaagaccttatttgaaaatctgcctgaaggccaacccgttagactgcccggggccctccacccagcctcagttctatgggggacgtggagtcaggcgatgatgtcctctgaggcagcgtccatctccccttaacattaaggaataaggccagagggttctcgctcatttgggaaaataaaaaaagcaggaatggggcgctggaaattctataagcttttccccaccactcacaaaaacacagctgtgaaaataaataccaccccccaaaccaagggtctagggccaccaacagtcctcctcctcctcctcctcctccttctcctcctcgtcctccagatccagctgccaacagcatcccccgctcctgaagaaatgcaccgcccagaagggaacggcgaaagggggaagaagtccaggggacccccggcctctggccgagagcttgggtgggggcctcggccgtcgccactcacccggggaggggaaaagctccagatcgactttttccgtcttgatgatggtgagagtcggcttgagatcgacggccgccttcatggtgccaggagtgggggacgtacgggatggtagcaagtttgcagttactgttgtttttctttttaatgaggattagtaacagggggaaggggacgggggaaatccgactttcttcccaaaaatctcaaattcccgctgcctttctttcccccgcgcccggacggtgcgcgcccggcactccaggggaagttggcactttgcggcgaagtgagcgcgctcgggtcccagcctcgcccgcgccgcgcccgctcctcctgcccggccctcgcccgctccctcctctccgccggcggctgcctcgttcgctctcgatctcccggccgctctccctccctctcgccctcccgcgctctcccctcctctttagggcgtttctcgcggcgccgcgtctcggccgctgggtccgcgcgccctgggccgggcgatgtccgcttgggggagcgaggggcggggcgtcggggcagggcggggagccgggggcggggccgagcaccgcggccaatctccgcccgcggcccaaagcgaaaggaagggctggcgagcgcggggccgggccgcgaccgcggaggagcagtgcgtggagccccgggcctcggagcccaggcaggggcgggaagggccgggagcgggtgtgcaggctgggtgcacaggccgcctccaccgtttcgggaaagtccgtctgattctccacgcattcttgagggcttggtcacccgctctcgccccctcccagtagcagcatagttttccaagtgcgtgtacatcattcattcacaaagactgacacacaggacgtgaggcatgtggatgaaggcgagcgtgcaggcaggcgcaggggattcgtgagcccgtgtcctcaaagggctttaggagtattggactccagccggatcttgagtcagggcgtgtgtttctgaaggaggcttcagtttttcagagcccacccatgtaatgctcctgcgttggcaggggagtccagaacgggaccccaaactagaacccagccatgagcttccgtaagcttccaatttacctccagcagtggttgggttgaaggggaagttatgatttatttctaattattctgttcctctaattatgtcaccattggccaaagctttgtctttcctttcacagactctcctcttttagataaaactaacaaccctcccacgaccgccaccaaaaaagtgatgcagaggctctgtggttttgaatttctggagtacatcattggcagccatgacagaatcacaatgcacagtttctgttccatttgggaacccccaacactagagataaaacaaaatgaacccgaataattcatggtttgccactaatacattggttgtaatagagatagtttgtcctaattaacaaatcaaccagtacatgtatatatctaaatacatagctagaaccaggcactgagctccatctttgattaacagaaagattaaacataaatcttcctgagcaatctcagagaaagctatttttaatgtttcctgatttctaagcacatttgaactcccagcatttgactgtaactgtaacctctgcctctggtaagttttgacacacaggcttaccttcatctaatcccagttttgtgcccttgaagccttagtaatttgcagatttcccacagcaaatcggggaggaagccaggaacagaaaaatctgtggctcctggtctaaactccagattaaatccctccttagtgaccagaggaaaatatttgtatgtgatagtcctaatttttgaaagaacaaagactgttgcaatccagctgtgtttccacaaggtatgagaaaacaatgctggcctccagatgacaagaacagacccttctggtcctgggaaaagcctagagaaacagctgatgaatgaattgtacatttacacgtccaaatgaaccacaaaaaaaaaaaggttcttgaatcaattctgccttactcactatgaattcatcaggagaagaagtgaacaaatctagagttgctttggggaattttgttttgttgatgttgtattgagaaaatgttggcattttttaatccaagtgtgagtacttctctattttcaaatgcagattcctcagagcaactcctttctctcttccccagtttgctcctcaactttcttccccagactagcctaaacactgctgctaacatccacccaaattagatactaaaaaagcccaccatgattaaactgtaaacactttccactctagcaatgaggaaaattattctttctaattcttccatagtgacaactcagatagtcaatcatccgtttcctaatcca

SEQ ID NO: 914663 - DNA, 4001 bp, Homo sapiens
atgagtgccatgaaattagaaaatgtgttttgaccttccttctaatgcccagcccaatggctttgtgtagatacacgtgctttgtgtagatctatgtggagatccagttccctctaaagtcaactgcagtgggcatcgtgagttgcaatagagaaaacacaataaggcaagcaagcatcaggtcaaaaataaaaagtcaagataacatcttaaatgaaagcttctctccttgttattttctaactctcccctcaatttccccaaatatacaatggatcacttaagaagccccatcctcttcagagacaagaaacatttccaataacacacactgagaataaccgcagtttcttagtgcctttggaatatgcactgaaattccgtgcagttctgaaattcttcttctgaaagttgggtgtgccttgtgcggtgcatgtgcatatgtgtaggtacattatgcacgtgggtgtgtgtgggtgtggcatactgttctcctgaaggcacactttctacactgttcaggggaggggaatgataaagccactttttctcaaggcagatggtatgaaatccatattccccaacctcaaatattccttcatccctcaaagagtcatgtttaggggagaagggtgaagtcagggcattgggcttagtgtattctaattctttctacaaagaccaactagattttccaatttgaagagggtccctggagggtttcttttgtcggcggtgggggacaggcaattctagaaagaattgggaacctggaactcgcattagcaagcagttgatcataaaacaaaatgacttgctaaattccaatcaatggcacacagtgtggtctgagagtgatgtcctgaattcccttccacagttatctagagaaggacttagatggatatattccaatattggcgagagagtccctttaattcattccagcacttatcccacacttccccagcagaaaaactggttaatgtacatcctgggtaattatctgtgtctctggatttcattctttagtaactaatccctcacctacaacagtgtatagtaaggtcaaggatgaaatttctcagaaactcgctccccacagcaccacgcacaagaagacccacccattccagccaaccccgtgtgtccaagtcccattcgcccacataagcctctatttgacaaattcctcgagctcctacccttggggtggggacctttcgcctcccgtgaggtgccggctctcccgtgcttcgctgactgcccgcattgggtggggagattcgcctctggtgccgagggaaaactgcgttaggcgagggtggaagctctgtcggacccgtgcgagcacgtgggtgcgcgcgggccgcggagtgagcagcagccaggattcctctccagatcgcgcccccgccgcatttcattgcctgaaacggcccacgccccgcgatggcccagcagacacccggcacagcacagcgtcactgcgcggcccccgcagcgcacggacccccccaccctgcccgaccccagacccgcagccgagcccgtctggtatgtggtgggtggagagggtaccaactaagcatcccaaagtccttcagggagcaactccgcgcagttttctcttcccgacccgcagcctccgcagcagccgctcggagcacccccgggcaggtgccccgcgcgagctcagcgccttccccgcggatccccggcccctgcgggacccaggcccaggacaaaagaaatgaatttgctctgtacctgatcctgtccttctcggccctctgtaactcctcattcctttccagcacctgaaggatcttcctggcctcttcgtcatttaagaaactgaaatcaaacgccggaggaactttcgtcattttctttactgtgtgtgagttacacttaagctccttggcgcctcctgttaggaaggcatttttcaacctgtacaagaccagtttcacgaacttgatcccacagccaataataagtccgcccctttgaaagtctaaaaccacaaacctagggaacgcccacacctgaagggctcatattgacaataccttaatgacatgtttctctcaacctgtccaaccgagatgcaaagtgaacggctaaagggagagagggaaccaatcccgttccaagggggcgggccctcccttgtcccctccctcgtcccctccctcgtctcgtcccgtccctcgtcccctccctcgtcccctccggtcaccctccccgccccctatctgagttgttaagcaaacaagcctacataattctgcctcttaagtgaggcaaggctaagtgttggcgccaaagtatttgcttttgctgttgctgtttgctcgcagaacttgagcttgattagtaaaggagtgaaaaaggagattcatgactaatcctccctttcaataattaagagcccatagaaaatagaattgcaagtagggtttgtaactggcaaaagggttacttatctgaaagaccaggaagaactaaactcaattacactactgactgtggatgaacctggctgaagggcggaaattagtgtatccttggaaacgaattatttgccaagcctctcatcccacagacacccccacctccactgtcccacaaaagtcattcttagactttagaaacaaacaaacaaacaaacaaaaccgtttatggtattttaggagaagacagcccagaagcaaaggactgtagaaaacacctgttagaagttttctgtaagattttattatcatcttaataaactcagagaagtaatacacatgccatttaaaaatacctaatcctctggtgaaagcaaatggtaatcctatgaagccacagaaatagctttcctagaaagtcaattgttccacaatgcaatgaagaataatagaaacttataaagatattcacatatatactttttttttaattatcaaggcttttacagaaaacatgtttttatcttggcttcacttcctacccaaaaataactctgtcagattgactttcctgccccatagccttaatttggtcattttgaagatggtggtgatgattactaacatataaaatgtacttctacatatatcatttcttttcatggcacataaacccaattaaaattttgtatctgtacaagaacatgatatcaaaaattgccacttgtgttttgttctctgggctaccccatttgatcatcattatttaaaacatgcctaggcagctagccattcagataactttctgtgggtgtctgttatttgtgtgaaccaggaaccaattttgttcacccatggtgtacacaatacagaactcctttataaatagtgtctgtattaatgatcctgttttgggagtatgtcttgtatatggtgtccagtttttctagtgtgttcatttattcagcatacacatgggacttttcaatatggtcactggtgggattttacactgtttccagtatatcagtgaactgatttcaaccaacgtatcctggtgcctattacatgaaggcatcacacactgtgaacaacacagtccttgtctttagaaagtttgtaatccagtgggagagatacacaaatagaaagatgactatgtaaaaaagaacataatagaggaataaagaaaattccatgagcacacagaaaagttagtgccaactgagtggatggagagaggatacggtatttaggttgctgcatgaagagtcagatttcaagaggaagaaatagggggtggtgggaggagatgtgtgagtctattctaggcaaggggatcagcgtgctgaatagcagaagtacagtctaggaatcttctcatattccctcaacctctttaatggccagactgaacaaaagcttggaagctagaaaacactggagcatgttcatggattgttaagtgatctgttttggcagagcatgtagtctccacaggggtaaaatcttcctctttttatgtagaaagcacaaatctac

SEQ ID NO: 914664 - DNA, 4001 bp, Homo sapiens
tgtccagtgagactgctccctaccaccaagaagttaaaatccccggaagatgacagactgaaaggaatcttctactaatgaaggtttattccatacaataccataacctggatcaaaacaagaatttcagccctacaaactttatcaccttgaaacacatcaaacctgcccctgcaaaacactggaatcatctggctagctgtcaagcactgagtcactggaaaagtcttttaaccccaacctattgtgaggatgagatgcattttctgttcctggaattatttattcctaaaatttgcctgaataatctttccttggtgcttcaggttatagccaatccacttagtccaatgttttcagtcacagtctcttgtcgtttcaacctttttatttttattttatttatttatttatttatttatttatttatttattttttgagatggagtcttgctctgtcactcaggctggagtgcagtggcacaatctcaactcactacaacctcagcctcccaagtagctgggattacaagcgtgtgctaccacacccagctaatttttttgtatttttagtagagacaagttttcatcatgttggccagctggtcttgaactcctggcctcaagtgatccacccacctcggcctcccaaagtgttgggattacaggcgtgagccaccgcgcctggcctcttcttaacctttttagaaagggccttacagctgaactcctggggccactgccacactggatcttaacccaaccattccgaaaaacagaggaaccaaatataagcaaaagcaaaaaaagccacaattcattgccttacttgataggattctttataattaaagttatgttatggctaaatgcccctaaaaattattttcaattaaaaacaatgcccttttaatcatgggaattataccataagacaatgtgtgtcattacataattaatatgtaaatcttactaagcacttactacatgccagggtctgttttaagcactttatagtgttaacttatttaatcttcataacagcactataagccaagctattattaccctcattttacagatggggatagtacaacagaaagtttaagtacctggcccaatattacacaactggaaatgccaaagctaggattcacagcatggcagtctggccccaaaactgattatccattcataccctcacatgcaaccaggaagtcggggaaagtgaatgatggaaactgaatcatctattttattacagtgaatagcctttgagttctgaaagttacaaactaagtccagttaaagtacatagagcacttacctgacttacaagaagttaagacttacaagaatttaaatgtacatatttcaagaccatatcttcacataaataagtcaagaacctttctagattagcattgcccaatcagtaacaccaagcaattctttgattctcaaaattgtgtgtttagatctggttcccaccgaatgtaacaaagccccaaacacctctggacttcaagttgaagcccagagccagtgtgcttctggccacctagtcccgagactaacatgcccctggccccggcccgacacacccccgggccacctagtccctggcctaacatgccaccagcaatctagtccgcagtctaacatactcctgccccgtcctgacaggcccccggccacccagtcccctgcctaacacgcccccagccacctagtgcctggcccaacatgaccccggccacccagtccccggcctaacacgcccccggccatctagttcccggtcacccagtccccggcctaacacgcccccgaccacccagtccccggcataacatgcccctggccccttccctacctcgtcccacggcttctggcaccgcaagggatgccgcaggccaccaccggaccctgaggcgcaggacatccccctgggaggaatcagatccctgtggctggcgggaaggtggcagcaggaagggaggggtcacggcggagggcggagggcgggtcgcaggaggaaaggaaggagcggactgggggcgaaggttggctaggagaacaggtgggtaccaagatgctgaaagcgcggccgccgccggaggagaaggagaagcaggagtggaaatcggagcgctccaaaagcgggcagtcattgtcacagccccggcggggctgggggtggcctctcgcagcccacgggcctccacggagcctccgcgcggccgcgctccctcggcccttgtcccgacccagcagcggcccccggaggcccgagccctcgcttcagcgcccgcccggccgccgccctggagagccgcgcttacctcggccacggctgcctcccgctcggccccgagcttggtcaccggctcatgccgcggggcgcgggccacctccgcccaggtcggatcggtccgaatcgccagccgccactgccagggccgagtctgggctggcgagcagcgagcgaggggccggtaaccgggatccgggccgtctgacaccgagcgcactgcgcatgcgggagctgccgggccgcgcctcctgctggacaggaggagtccgagcaccgctgcagtgttttcccaggcaggcgcgctcaggctccgcagtgaaatgctcagacagcctcattcataattaaagaatccttaaacccaaacgagacaccacgcgttgcttataaaactaacaaatatgtagacgttttattataatcagttctggtgagcgtataacattcctggagggcaatttggtactatccatcaaacggaaaatgctggtacccttcattccaacaagctctctgtacggagtttgccctatggatattctcaacaatgtttgtcaaaaagttccatgacagcattctttctaatcatagcgaaatgctagacacaatcgaaataaattatggaatttgattgatttgagtaatgtgagatagtgcaatatatttgggtaaggaaatatctccaagatattagttaagatcaaagcgtagtccaaaacagcgggcaagtcacttttaggtaaactatgcatatgcaaaaacaagagggagaaatatataaagtaggtgcttatattcaggcatgtgtataacttttttctggaaggaatgcaagaagaaatgaacagcttcaggtggagtagttgtcgaggcggaaatggaagcatttatggcgaggaaaggtggctcacgcctgtaattccagcatttggggaggcctaaacgagaggatcgcttgagcccaagagtttgagaccagcctgggcagcagagcaagaccccatctctacaaaaaataaaaagttaactaggcatcgtagcacacgcttgtagtcccaactacttaggaggcagaggcaggaagattgcttgagcccaggaggtcaaggctgcagtgggccgtggtcgtgccactgcactccagcctgggtgatagagcaagaccctgtctccaaaaaaaaaaaaaaaaaacgcatttttgttttgtatctttctctattatttacatgatttagccctatccatgcacactaaaaccgctgtcataaagcagtaagtggaaactaaaaaattaaattaaaattcagagcgatgttattgagaggttaatgaaatgacccctgggcctgcgatgttggtttggtagagttgtgggtctggctacaggatccaaatcccttctggtcccagatgtactttggcgccatctggtggaagttgtcactgatagcttaaatattcaaagtgatgattctgagactagatacctacagaggcttccggcagcaacctcgattccagggatatttttgtgagttaatgcctgcttgtcacagatctagggagattgggatgaggacattctggggatgggacactcatgttctgcttccccacatccaagggggcattgctctgctttccaaatcaaatcccccctgcaaatgatacaaaatgtagcaca

SEQ ID NO: 914665 - DNA, 4001 bp, Homo sapiens
ccaaagtgttgggattacaggcgtgagccaccgcgcctggcctcttcttaacctttttagaaagggccttacagctgaactcctggggccactgccacactggatcttaacccaaccattccgaaaaacagaggaaccaaatataagcaaaagcaaaaaaagccacaattcattgccttacttgataggattctttataattaaagttatgttatggctaaatgcccctaaaaattattttcaattaaaaacaatgcccttttaatcatgggaattataccataagacaatgtgtgtcattacataattaatatgtaaatcttactaagcacttactacatgccagggtctgttttaagcactttatagtgttaacttatttaatcttcataacagcactataagccaagctattattaccctcattttacagatggggatagtacaacagaaagtttaagtacctggcccaatattacacaactggaaatgccaaagctaggattcacagcatggcagtctggccccaaaactgattatccattcataccctcacatgcaaccaggaagtcggggaaagtgaatgatggaaactgaatcatctattttattacagtgaatagcctttgagttctgaaagttacaaactaagtccagttaaagtacatagagcacttacctgacttacaagaagttaagacttacaagaatttaaatgtacatatttcaagaccatatcttcacataaataagtcaagaacctttctagattagcattgcccaatcagtaacaccaagcaattctttgattctcaaaattgtgtgtttagatctggttcccaccgaatgtaacaaagccccaaacacctctggacttcaagttgaagcccagagccagtgtgcttctggccacctagtcccgagactaacatgcccctggccccggcccgacacacccccgggccacctagtccctggcctaacatgccaccagcaatctagtccgcagtctaacatactcctgccccgtcctgacaggcccccggccacccagtcccctgcctaacacgcccccagccacctagtgcctggcccaacatgaccccggccacccagtccccggcctaacacgcccccggccatctagttcccggtcacccagtccccggcctaacacgcccccgaccacccagtccccggcataacatgcccctggccccttccctacctcgtcccacggcttctggcaccgcaagggatgccgcaggccaccaccggaccctgaggcgcaggacatccccctgggaggaatcagatccctgtggctggcgggaaggtggcagcaggaagggaggggtcacggcggagggcggagggcgggtcgcaggaggaaaggaaggagcggactgggggcgaaggttggctaggagaacaggtgggtaccaagatgctgaaagcgcggccgccgccggaggagaaggagaagcaggagtggaaatcggagcgctccaaaagcgggcagtcattgtcacagccccggcggggctgggggtggcctctcgcagcccacgggcctccacggagcctccgcgcggccgcgctccctcggcccttgtcccgacccagcagcggcccccggaggcccgagccctcgcttcagcgcccgcccggccgccgccctggagagccgcgcttacctcggccacggctgcctcccgctcggccccgagcttggtcaccggctcatgccgcggggcgcgggccacctccgcccaggtcggatcggtccgaatcgccagccgccactgccagggccgagtctgggctggcgagcagcgagcgaggggccggtaaccgggatccgggccgtctgacaccgagcgcactgcgcatgcgggagctgccgggccgcgcctcctgctggacaggaggagtccgagcaccgctgcagtgttttcccaggcaggcgcgctcaggctccgcagtgaaatgctcagacagcctcattcataattaaagaatccttaaacccaaacgagacaccacgcgttgcttataaaactaacaaatatgtagacgttttattataatcagttctggtgagcgtataacattcctggagggcaatttggtactatccatcaaacggaaaatgctggtacccttcattccaacaagctctctgtacggagtttgccctatggatattctcaacaatgtttgtcaaaaagttccatgacagcattctttctaatcatagcgaaatgctagacacaatcgaaataaattatggaatttgattgatttgagtaatgtgagatagtgcaatatatttgggtaaggaaatatctccaagatattagttaagatcaaagcgtagtccaaaacagcgggcaagtcacttttaggtaaactatgcatatgcaaaaacaagagggagaaatatataaagtaggtgcttatattcaggcatgtgtataacttttttctggaaggaatgcaagaagaaatgaacagcttcaggtggagtagttgtcgaggcggaaatggaagcatttatggcgaggaaaggtggctcacgcctgtaattccagcatttggggaggcctaaacgagaggatcgcttgagcccaagagtttgagaccagcctgggcagcagagcaagaccccatctctacaaaaaataaaaagttaactaggcatcgtagcacacgcttgtagtcccaactacttaggaggcagaggcaggaagattgcttgagcccaggaggtcaaggctgcagtgggccgtggtcgtgccactgcactccagcctgggtgatagagcaagaccctgtctccaaaaaaaaaaaaaaaaaacgcatttttgttttgtatctttctctattatttacatgatttagccctatccatgcacactaaaaccgctgtcataaagcagtaagtggaaactaaaaaattaaattaaaattcagagcgatgttattgagaggttaatgaaatgacccctgggcctgcgatgttggtttggtagagttgtgggtctggctacaggatccaaatcccttctggtcccagatgtactttggcgccatctggtggaagttgtcactgatagcttaaatattcaaagtgatgattctgagactagatacctacagaggcttccggcagcaacctcgattccagggatatttttgtgagttaatgcctgcttgtcacagatctagggagattgggatgaggacattctggggatgggacactcatgttctgcttccccacatccaagggggcattgctctgctttccaaatcaaatcccccctgcaaatgatacaaaatgtagcacacacccaccccatttgagaactggatgggtggagagcagtgacaatcaccactggaactgtatccaaatttatcttatcccagggaatattgttttcactttttgaaataagtcaacaatagctatctggtctggaagattgtggcctctttttttcttctccatatttatctgtattttaaacatgtatgtttttaattaatcctttgttcttttataaaatgagaatttgccgtgttaaagaactgtgtgaggcacagcctcacacaatgctgcctatcttcttcattttttataaccttaaacttgcctaatgcctggcatatagttaattgctcaataaatagttgttgaatggagaaaggatgcctagacactgggaggagctaactagaaataagacaataagattattcaaaggagaaggtaaaaagtggcatagaagcatataaacaaaatgctacagaattcaaaaaaaaaaaagaggtgacatccagttggaaaaatctaggaagagttcaatcaacagttgatatctttgtttatcctggaggacacttagtattttgacaagcagagaggtgaaaagggcattcaaggcagagaaagaaagtcatgagcatgtgttaaagaaggaaaagcagctggg

SEQ ID NO: 914666 - DNA, 4001 bp, Homo sapiens
cgagcacctgtaatcccagctacttgggaggttgaggcagagaattgcttgaacccgggaggcggagtttacagtgagccaagatcgtgccactgcactccagcctgggcaacagagcgagactctgtctcaaaaaaaaaaacattaattcattagtccattcattcattcattcgttcgcatgccagacacagagccaggtacaaagagacatcttgaccccaggaatgggagcaatgtcagatgctggggactgcctcggcctccaccagccacactccaaacccacccctgagctcttctcccaggctcccctccatgtcctgctccccaaacccgtgtcagttgctcaccttccagacatgcagcaagcttatctcgaggcgtcctcgctgtctcacaagctggaaaagacccaggtgtttacctttgggattggggtatggccaggatgagctggagtcagggtggatgggatgttggtgagaaacagaaagatggatgaacagatgggagggaccaaggaaggagtggggaaggggtggatgggtggatggctaggtgcagcagaagattctctgggtagaattctctcactggggtccccaggcctcccttcctggggcaaatccttcccggtgctcacctgtgtacttggcccagaacacatcctgaaaaacaagggctgggagtgaggctacggcagctcctgttttgtgttgttttagtaaatgttatgtctcctcctcacactttcctttaccctggtcacgcagggggcaggctctggggaggtttgtggcagagtttcctacttttgtttccaaaaggagaagaatatttgaggataggggagttcctccaacacacacaccgagactgaaagaggctgggggagatgggaggagagggggcagtgggaccctggcagagccctacagacaggaaaggcgacacagagctccaggaacactgagtcttgagcccgggggcttgtggtggcctccccagagtcccacccctcaagggtggtgtgggagtctgccgctgaggaggccatgtggacacagagctccagggcaggtggatgtctgaagactgtggaggcctccccatgtcatggagctgcacagggacacagtccaggcacagagacccccaggaaaggctgaggccgctcctcttgccagccctgtgaggaggggctcagagttgaaatgaggctgtgagcagcgaaggggctgtggcgttcctcgcttgcttctctgtggaagtgtctagagttgggcccggtctgaggccccggcaccgtccgagcagcccaggctcaccgtagccgtggaggactccagagcctcgaaggcctcctcgtagctgcacgtctcctccacgcactctcgctccaggttgcccttgcgcacctcctccaagaaggtgttggctcgccggacccgctggagcagcgaccgtgcttgctgaggagccaggaacactgtaaggcggtgggggggtcatgggacagcggcctcaggaacaggcagtcttggccattctgggggcatgaagcaagcccaccctcccctgctggcttctgagagaggctgtctgggctggtggaagtgcctggaaggctgctaaatgtggccccctgtgcccctcctacactgccccttgcccccagcctgctccctatattggaagagagaagcagccattctctttccagccctgagctcctgacttcttccctaagctggccgcctggggctgagacctacttaggggccagctctgtgtgctctgtccagccaggagaccccagcccatgggcccacaccccagtcctccagcctgttccagcctgcaagcactcccttaccatgctggctgtgcacaaggctacacagggcagccagggccaggcagccaggcagctgcaagcctcggacgtgcgccatagtgtgtcagctcctgggtcactgaggaattgtctgtcctgacccctctgggttaatgttgaactaacatgaagaaatcagcggagagggtgaggtcagagggtcagggccgtggggacgggtgggtagatagtcctcctgtccatctccaccatctgggaggacaggtcctcctgggagcagggatggatggtctaggaggagtcacaaaaaaggtcactgtcacccccatctcccaccctccccctctgagatttagcccattctggccagtggggctatgagactttcctggagctccttcgaatcctaacatatagcggtggttgcttgtcatctctgtgtgcctcagtttcctcatctatacaatgggaataatactttgttgtgaggactaaaggagattaggaatggaatgtccatggaatatcgtaagttcttaatcagatctgcacatataggccaatgtgggggtttgtataatcataatacacagatatcaaaaatagagacaaagataaaaggtgtggcctgatggaagttgcccctcgccatgggatgcaccagggataggaacagccaacatttgccccagcttctcagccactggaggaggggcccatttctcctccttcctgtccagggtgcctggaggtgtgtttgtgtgtggcagctgcctgggaggagtcaggtccagggactcttgggcctttagtctatcttctgtcacctcccaggacctgcgcctgtcccggaacaggggctactgaaatccctgggtctccactgaggggccctccttctccctggctgcctgccccatggcaggcctagagaggcttctggtcctaccctaccctccgccctactcctgtccctcccccatttcctgtttgcagtacccaaggcaaatattagtctaagtaggacagagggacaaagagcaggaacacggggaggcacaagttctcgcctcgcctcacctgtcctttgggcctggctgtttggggtctggaccaggtcatgtgtgggaacagggagtgttggcagaaaaactggggaccaggactcccgcaaacaccttaattcctgggaggcccatttcttatatattttcatatatatatttttaggccaggcatagtggctcacacttgtaatcccaacactttgggaggccgacatggcaggatcgcttgaggccaggagtttgagaccagcctgggcaacatagcaagaccctcatctctaccaaaaaaaaattaaaaattagctgggaatggtggtgcatgcctgcagtctgagctactgaggaggctgaggcaggaggatcacttgagcccaggagttccaggctgcagtgagctatgattgcaccactgtactccagcctgggtaacagagtaagatcctgtttctttctttctttctttctttcttttttttttttttttttgagacggagtctcgccctgtcacccaggctggagtgcagtggaacaatctcggctcactgcaatttccatctccctgttcaagtgattctcctgactcagtatcccaagtagctggaattacaggcgtgtgccaccacacctggctaatttttgtatttttagtagagatggggtttcgccacattgaccaggatggtctcgaactcctgacctcaggtgatccgcccacctccacctcggcctcccaagtgctgggattacaggcgtgagccaccatgcctggcctgaatgagacctgttcctagaaaaataaaataaaataaaataaaattgaataaataaaataaaattataatatatattttgggtttttgttgttttgtttttgagatggaggctggagtgcaatagcgtgaactcggctcactgcaacctctacctcctaggttcaagcgattctcctgcctcagcctcccgaatagctggaactacaggcacccgccatcatgcctggctaatttttgtatttttgtagagacagagtttcaccatgttgcccaggctggacgtgaactcctgacctcag

SEQ ID NO: 914667 - DNA, 4001 bp, Homo sapiens
tggcaggtgtaccagctcccgcagctctgacagccctgtgggctgggcactgtgttaccatgactgtacagatgaggaaattgaggcacagggaagctaatggacattcctgagatcgtgtagctagacgatggcagagccatgttctgaaaccctaagagtgtggtgccagagtcgacccttaaccgctatgctgaacttctggggaggaaggcagagtcgcccgctaccaacctgtccatacccaccgctcaccttctggtgtacttttcccagcacacagtaactacatgacgatataaataaaaccaagcacacatacatctcaaatgtcagctatgtttcgtagaccgcctttaaaatgcaatttatcagtgtttttccagacattaaatatccataaaacccgatttttctacgtcctgttttgtttgttcagtactgattttttttaaaatctggacttgactgctctcaggcagagagctgttctgtccatcctgtccccaacaggcaccagtctttacagagtgaaacccatggtgacacatttaggccctatctgattggtgactgaatggctgattccaagctacagcttgaagcctctgagaggcgtccccagagcactcccaagcctctcccgactctgagaacaaggggggtagggctgagaaactctgctgtactcagggtttcttttttatcctggaagctgctgcaatccacaggcgagggtggagagggagtgaccgagagcaggacaggaagccactccacaatgaacttgaccagagaggcagtgtagtggctaacactacccatccggaggccggactgcttggctcaagcctagctccgtcagttatcggctgcgcatttcgacaaagccacttaacctgtgagccacagtcctgtcctctgtaaaatgggaacagtgatagctaacagtatctaagccacagggctactgcgaaaattgtatttggcagttacaagggtaagcggcacactgtaagcccctgggtaggagttactgaatgctagtattactctcagacagccgtgaaaagcatattccgagacagaaaggaaatgatgcgaggcaggctcacccaacctctgcccctcccccacaccttctctgactcatcttttcttcagtgagttttctaatttacccgggcagaagtgggtggaggaaaaaggactgtgcgtgtccacgccctgcaacctcgaataagttaacttttctgcgtttctggctctcccatctgcaaaaccagggctgtacggagaaaacccacgcaaatcaaacccggcaaaggggaggcgcctggaggccaaccggaggagcctcgcagcacctacagccgggcgaccaggccctggctcccccggcccggccccgcgcccaccttcttccccaggcgcggccccggccgccgcccccgcctcgaagtcgtcgacgcgccgcagcaggtcgtggcgccgcagggaggcgagcagctcgcgcaggagctcggtgtgcccgggctccaggtcgttctgctccagcagcatggagaagaggtctaggccgctctgcacgcgctccagcttgcgcttgcccacgcgcccgaggcataggaacttgagctcggtcagctcgctgctcgacaggctggacgacaccgagtgcagcagcaccaggaacgggtccatggcggggtctgcaagcggccggggctgcggcccggccctccgtgcgccctctgtcctcggctcgctggccctggccaggtctcgccgcttgcccagcggcccaaggattccacccccgaacctgcactccggtgcctgattcactacaggaaatcgacaagagcgcgttttcgaccgttatctcgcgaaaactaagggacccgcgcatgcgtccctagcgaagccgcagccgtttccgccctggctggcggcgccgcggacgggcgcggcttctgcgcctgcgcccggcgtatcgtctcttttccgggtgggaggtggggccttgggtgtcctgagagcctgcaggtggcccagctctctgcggtgagggcggtcgcgcctctgccgagtccacctgtttgcaaagcgcggtgcggccctactgtgtgcagggccggggcggggagggcgcagcccgaacgtcacgtgccctcacatctgttggtgaccaaggttacttatgcattaacgtttagggacaaacgtggaaaatgcattctttggtgcccctggagacatcttgtgtgtgcagaaaacactactcagaagtttatgtgcgtttaaacatgtgatttaaataatacatgatttccaaagtagcagtcgtttattcaatcaacagtattgagcgcctactgtgccaggtagtagggtctggggacaaattagtgagcgaagcgcgagggtccccgcgtgcccggagtttacatcataattacaaaagcgacacgctccagaagagaaggtcgtggcggccgtggtggctcagcctgcaatgcccgcactttgggaggctgaggcaggattgattgagacaaggggttcgagaccagcctgggtaacatagtgagaccccgtctctattaaaaaataaaaataaggaaaaataaggaaatcgtatagtatgccagaaattcagaagagccaggggaaagggagtctcttcacggggtgggcgtgtggagggtggggggcccggtggtctgatggggcctctgtaaaggcgcaggtgaaggctgggaggggccgggtacctaggtgtggggggaagagctgggcacacggagaacagaagagcagagcacaggggacggctggggttccaggagcagcaatgccgtgggtctggaggtgaggagggggtgcagattaggagagccctcaccagccaacaaggacccagctttaccacagggtggggcaggggctgatgccagctgagtttgttttcttgagatataattcacataccattcaattcacccttttaaagttatacttcagtggtttttagtgtagtcacaaggttgtgcaacccttactgctgtctaactttaggacattttcatcaccccaagaagaaacccattagcatgtactcctcccctcccccaccaaccacgaatctactttttttttctttctttctttttttttttttttttgctgttttgagacagagtctcgctctatggccaggctggagtgcagtggtgcgatctgggctcactgcaacctttacctcccgggttcaaacaattctcctgcttcagtctcctgagtagctgggattacaggtgcctgccaccatgcctagctaatttttgtattttagtagagacagggtttcaccatgttggccaggctggtcttgaactcctgacctcaagtgagcctcagcctcccaaagtgctgggattacaggcgtgagccactgtgccctgccgaatctactttttaaaatctatggatttgccaattctggacattccatgtgtacagaaccatacagtatgtggcattttgtgtctggctgttttcagcatcattttcaaggttcatccatgatgtagaacatatgagtacttcattccttttttttctttgagacagagtgtcactcttttgtccaggctggagtgcagtggcacaatctcggctcattgcagcctctgcctcccgggctcaagcgactctcgtttcttgtgccttagcctcctgactagctgggattgtaggtgtgtgccactatgccaggctaatttttgtatttttagtagagacagggctttgccatgttggccagcctggtctcaaactcctggcctcaagtgatcctcttgcctcaccctcccaaagtgttgggattacaggcgtgagccactgtgcccagcctccttcctttttatggatgcatactattccactgtctgggtgtttgggtgccacagtgtgtctatccattcatcggaggatgg

SEQ ID NO: 914668 - DNA, 4001 bp, Homo sapiens
gccccaaggcagctactttgggttgtgcaaggtaaggtccatggcgataagattcacgttggcaggtccggcagccccgggccctgtaagtgatgcggcgtgtggggcgggggccggggcggagccggcggccggtggcaccacacatacggaccaatcgccgtccccgccgcggcattcccggccccaaatcacactgcgggaagctccagcgttggtgcctgtttcgtctgcgcatgcgccgggacacgcctgcgcccttggccgcagtcagggctcccgagtggtcactctggttgacccgcgcaagctctggcctcgcccactaggctggtcgcgtcagagggtggggcgggtcttcgccccgcagcgtctaagctctgctgcgacgttatgggaacctggtgacccgcggcacactctgggacgccagggtagtggatagggacagtggagggcatcacgctgcagggcacgggatcagagggggatgcaaggggaggggacgccattctggccgccaagggggaaacgcggtgaagggaacgccccgactttcgagtccctaggactgagtccccaggactccaacccagcagagaggcgccggggccttagctctgagggctgtggtctagaaagggaagcagcaggcctggggctggggcgcgcgccgaccccgcagtgagaccaagggaagaagggacaggaccccgcgaagggcctaccgccccagagcgtaaacagcggtccgctccgcggaatagctgaagacctcgctggcctgcggctcagtggcctccccggcgattcgagaacagctctgggggtcctcgctaagtgtatgccattcccaatcccttatgtacgccagcggccgcttgccctccccggccagcgctgtcccttccgcgtcctccagtcttcacacgacgcaggggtccccaaggcagcggtctccccaagcttcccgtttcagccccatcctcgagaatgggctcctttcctgctccctctccgctcctgctggcgagtggagaccggcacctaggtccagacgcggctgcgctgcctctcctagccatcgagacaggatgtgactccctcccctggccactgaccccctccctccccaggcggcctgcatccttgctctcctccctcctagcctacccagctcggggttctgtccccgcccagagacctgaggctcggggctgcagatggaatgcacggcagggaggcgggaccctttgtttgtgtgtgcgtgttgttggcctccatccccactccccagactccacttctccaggcctctctcccgccttttcatcccgcatccgcaggacacccaatcaccgggcaacaggtatgatcaggcgcctccgggctttcctccgaattagtcggtgtttggctcggagtgcgtaactctgtctcccctgcactcagcctccggtcccgccctctcctgtgcccccgcctggctgcgctcaccgtggcatcctgcccggcgtagtggctgatgacccgggagccccctggatgccggcgggtgaactcgctgatgttgtacaccttacggtcgatcactagccaccgctcctcgcaccctgagcgctgggccacctcgtcccaggtgaagtagcgcggggtaggtccctgagccgcggtctcggcggccaccgggtcgggggccatagctggcctggcgacgccgcgcgccgggccagcaggggctgtcaggcgcgtgctcggggtccgcgggctccaggagtggatttgctggcgcgcgcccagagccagccgcctgcgcgccgggttttcagcaccgcagggcagaccggcgggcctcgcagcgcgcgttcccattggccgagcctcgtggcgcggggagcgagatcccgtcccccggtgggtcttgggcaactcacagctgggctgccaacacgcgccccctcgcgggctccctaaaggcgtcgccgccggattcgacttcctgacgtcaggcgggcatcgcggcgttggctcccagggggcgccgcggtaggaacagcggttctagtgcaggccctgggtgcggggccgcgctgcaggagtgaatggactgaggggccagggctgcggggtggccgcaggaagggtgggcggggccggggttgaggtttttccgtgcacgaggctgcccgggcggtcgcggacatcatctttaggctgtggatgccttggccggggtctccagacgctgaccctccagggttggaaactactgcctgcttgccacgtcgtgccgccaattgtgctgcccgaagtagcagcctgagagcccttgaaagttgcagttatcttgtgaacagcatatttacggtctcttgggcttggtggtggttgggggagggctgttaatgctttaatttgttcaatgaaacatttaaaatgccccacaatttttataaccctgtttgcctctttttgtttttatttttattgtattttggaaaaattcactgggatccttgagtgatgatcctagcgtctcctgacccttaggtgtttcacctgaaaagcctgggtcttcaagctgaggcatttctgttctagcctggaggcgcctaggagccctgggagactttttaagcagagagatttggcatttagatctctgggttttagaggagtgggaacgcacctaaaagtggggttgccagttacaaagctgttgcagtcctgaagagacccagagtttaggtccaaaattttatttattcaacaaacactttataaagcacttactgtgtgccaggcactgttcttagcgttttgcaaaccttaactcatttaattctcctaacaaccctatgaggttggaacaattaacctaatttacagtgaagaaactgagcccgggggaggttattttgtcacacagcttgtaagtggagggctgagatttgaccctggcctgtgctctgaactctcaggctctgccatatttctcattacactggtatttgggcacttcaaagggaaaggaaacataactgtcccaagcactgagctagattctgagcacgtaggagtcaggagagggtgatacagaatagactaggtgaaatatggctagatttctggtagaaaaggattaattcattccatccaaattcttcattttatagataagaaaattgaggttcgaaatggggaaggggcttaccaagttcccatagggaagtttagatgtcctgacttccaggtaagatgccaggctattggaccctgctcaggaatgatggtccacacagctgcacctctgtacagccaatattccttttttaaaaaccttgcccaacaacttggcagtgtctaatgcgagctacaaaacattttctattctttgatcaagcagtttcactcttggtaaagtaggggagactgtgcaaagatgcagaaatagccaatttaatagcaaaaactggaaataaacccgagtcctgacaataagaaaatcgccaagcttattgggatctgttaacacaatgaagaattaaagaatgattttaaatggctagaatgtgaactatattgatagatatagaatccttccccgtgaaataagcagaacccaaagtagtatgggttcgctgattacaactatataagaaattcatgggtattaaataacagaagagaggtcctttacataaaccatttttcctatgtgactgtgcagtgggataaaagctctcatactgctggtagaagtgtaagttgattaaactggaaaaaatagtttgacaacttatatagaaatttaagattttttttttttttgagatggagtctcgctctgtcgcccaggctggagtgcagtggcctgatctcagcttgctgcaagctccacctcccaggttcatggcattctcctgccttagcctcccaagtagctgggactacaggtgcccgccaccacgcccagctaattttgtttttgtatttttagt

SEQ ID NO: 914669 - DNA, 4001 bp, Homo sapiens
ttaatccttttctaccagaaatctagccatatttcacctagtctattctgtatcaccctctcctgactcctacgtgctcagaatctagctcagtgcttgggacagttatgtttcctttccctttgaagtgcccaaataccagtgtaatgagaaatatggcagagcctgagagttcagagcacaggccagggtcaaatctcagccctccacttacaagctgtgtgacaaaataacctcccccgggctcagtttcttcactgtaaattaggttaattgttccaacctcatagggttgttaggagaattaaatgagttaaggtttgcaaaacgctaagaacagtgcctggcacacagtaagtgctttataaagtgtttgttgaataaataaaattttggacctaaactctgggtctcttcaggactgcaacagctttgtaactggcaaccccacttttaggtgcgttcccactcctctaaaacccagagatctaaatgccaaatctctctgcttaaaaagtctcccagggctcctaggcgcctccaggctagaacagaaatgcctcagcttgaagacccaggcttttcaggtgaaacacctaagggtcaggagacgctaggatcatcactcaaggatcccagtgaatttttccaaaatacaataaaaataaaaacaaaaagaggcaaacagggttataaaaattgtggggcattttaaatgtttcattgaacaaattaaagcattaacagccctcccccaaccaccaccaagcccaagagaccgtaaatatgctgttcacaagataactgcaactttcaagggctctcaggctgctacttcgggcagcacaattggcggcacgacgtggcaagcaggcagtagtttccaaccctggagggtcagcgtctggagaccccggccaaggcatccacagcctaaagatgatgtccgcgaccgcccgggcagcctcgtgcacggaaaaacctcaaccccggccccgcccacccttcctgcggccaccccgcagccctggcccctcagtccattcactcctgcagcgcggccccgcacccagggcctgcactagaaccgctgttcctaccgcggcgccccctgggagccaacgccgcgatgcccgcctgacgtcaggaagtcgaatccggcggcgacgcctttagggagcccgcgagggggcgcgtgttggcagcccagctgtgagttgcccaagacccaccgggggacgggatctcgctccccgcgccacgaggctcggccaatgggaacgcgcgctgcgaggcccgccggtctgccctgcggtgctgaaaacccggcgcgcaggcggctggctctgggcgcgcgccagcaaatccactcctggagcccgcggaccccgagcacgcgcctgacagcccctgctggcccggcgcgcggcgtcgccaggccagctatggcccccgacccggtggccgccgagaccgcggctcagggacctaccccgcgctacttcacctgggacgaggtggcccagcgctcagggtgcgaggagcggtggctagtgatcgaccgtaaggtgtacaacatcagcgagttcacccgccggcatccagggggctcccgggtcatcagccactacgccgggcaggatgccacggtgagcgcagccaggcgggggcacaggagagggcgggaccggaggctgagtgcaggggagacagagttacgcactccgagccaaacaccgactaattcggaggaaagcccggaggcgcctgatcatacctgttgcccggtgattgggtgtcctgcggatgcgggatgaaaaggcgggagagaggcctggagaagtggagtctggggagtggggatggaggccaacaacacgcacacacaaacaaagggtcccgcctccctgccgtgcattccatctgcagccccgagcctcaggtctctgggcggggacagaaccccgagctgggtaggctaggagggaggagagcaaggatgcaggccgcctggggagggagggggtcagtggccaggggagggagtcacatcctgtctcgatggctaggagaggcagcgcagccgcgtctggacctaggtgccggtctccactcgccagcaggagcggagagggagcaggaaaggagcccattctcgaggatggggctgaaacgggaagcttggggagaccgctgccttggggacccctgcgtcgtgtgaagactggaggacgcggaagggacagcgctggccggggagggcaagcggccgctggcgtacataagggattgggaatggcatacacttagcgaggacccccagagctgttctcgaatcgccggggaggccactgagccgcaggccagcgaggtcttcagctattccgcggagcggaccgctgtttacgctctggggcggtaggcccttcgcggggtcctgtcccttcttcccttggtctcactgcggggtcggcgcgcgccccagccccaggcctgctgcttccctttctagaccacagccctcagagctaaggccccggcgcctctctgctgggttggagtcctggggactcagtcctagggactcgaaagtcggggcgttcccttcaccgcgtttcccccttggcggccagaatggcgtcccctccccttgcatccccctctgatcccgtgccctgcagcgtgatgccctccactgtccctatccactaccctggcgtcccagagtgtgccgcgggtcaccaggttcccataacgtcgcagcagagcttagacgctgcggggcgaagacccgccccaccctctgacgcgaccagcctagtgggcgaggccagagcttgcgcgggtcaaccagagtgaccactcgggagccctgactgcggccaagggcgcaggcgtgtcccggcgcatgcgcagacgaaacaggcaccaacgctggagcttcccgcagtgtgatttggggccgggaatgccgcggcggggacggcgattggtccgtatgtgtggtgccaccggccgccggctccgccccggcccccgccccacacgccgcatcacttacagggcccggggctgccggacctgccaacgtgaatcttatcgccatggaccttaccttgcacaacccaaagtagctgccttggggcagggggtggccagagtgcttagggaaatgtggagccctacccagaacaacggtggagggaaagggaagaaacgcagaagtgccccagttcggacgtagggaagtcttcctcttcgtggtttttggagaaccctagctaagagaggaaagggacttattgaaagacccgcaagaagggacggaagtctcatagccctgagaggtgaagccagctggagttgatgggtcgaatggggacctagagaacttttctgtatctagaggtttgtaaaatgcaccaatcagtgctctgtaaaaacgcaccaattggcgctctgtagctagctagaggtttgtaaaatgagccaatcagcaggacgtgggcagggacaactaagacaataaaagctggccaccccagccagctgctgcaacccgctccagttcccttacaggctgtggaagcattgttcttttgctcgtcacactaaaccttgctgctgctcattctttgggtctgcaaagagtgttattcctttaagagctataacagcgggaaggtccacggctccattcttgaagtcagtgagaccatacccgccggaaggaaccaacgcccgacacagccccacccatctctcctgtttctcacctatactgaaattcttgggcaaaagctgtctgtggacacacccaggggaaaggccagcccaggcaggtgtttcttagtggttcccctcagccaatgcttcccattccttgatgcatccttctaactagagcagatactcggtgatcttaaactgtggacacctgggagcaccctcaaaaggcagctgggcctagggagatggcctgtgcttctgtgtcaggagtt

SEQ ID NO: 914670 - DNA, 4001 bp, Homo sapiens
gggcaaggtttttaaaaaaggaatattggctgtacagaggtgcagctgtgtggaccatcattcctgagcagggtccaatagcctggcatcttacctggaagtcaggacatctaaacttccctatgggaacttggtaagccccttccccatttcgaacctcaattttcttatctataaaatgaagaatttggatggaatgaattaatccttttctaccagaaatctagccatatttcacctagtctattctgtatcaccctctcctgactcctacgtgctcagaatctagctcagtgcttgggacagttatgtttcctttccctttgaagtgcccaaataccagtgtaatgagaaatatggcagagcctgagagttcagagcacaggccagggtcaaatctcagccctccacttacaagctgtgtgacaaaataacctcccccgggctcagtttcttcactgtaaattaggttaattgttccaacctcatagggttgttaggagaattaaatgagttaaggtttgcaaaacgctaagaacagtgcctggcacacagtaagtgctttataaagtgtttgttgaataaataaaattttggacctaaactctgggtctcttcaggactgcaacagctttgtaactggcaaccccacttttaggtgcgttcccactcctctaaaacccagagatctaaatgccaaatctctctgcttaaaaagtctcccagggctcctaggcgcctccaggctagaacagaaatgcctcagcttgaagacccaggcttttcaggtgaaacacctaagggtcaggagacgctaggatcatcactcaaggatcccagtgaatttttccaaaatacaataaaaataaaaacaaaaagaggcaaacagggttataaaaattgtggggcattttaaatgtttcattgaacaaattaaagcattaacagccctcccccaaccaccaccaagcccaagagaccgtaaatatgctgttcacaagataactgcaactttcaagggctctcaggctgctacttcgggcagcacaattggcggcacgacgtggcaagcaggcagtagtttccaaccctggagggtcagcgtctggagaccccggccaaggcatccacagcctaaagatgatgtccgcgaccgcccgggcagcctcgtgcacggaaaaacctcaaccccggccccgcccacccttcctgcggccaccccgcagccctggcccctcagtccattcactcctgcagcgcggccccgcacccagggcctgcactagaaccgctgttcctaccgcggcgccccctgggagccaacgccgcgatgcccgcctgacgtcaggaagtcgaatccggcggcgacgcctttagggagcccgcgagggggcgcgtgttggcagcccagctgtgagttgcccaagacccaccgggggacgggatctcgctccccgcgccacgaggctcggccaatgggaacgcgcgctgcgaggcccgccggtctgccctgcggtgctgaaaacccggcgcgcaggcggctggctctgggcgcgcgccagcaaatccactcctggagcccgcggaccccgagcacgcgcctgacagcccctgctggcccggcgcgcggcgtcgccaggccagctatggcccccgacccggtggccgccgagaccgcggctcagggacctaccccgcgctacttcacctgggacgaggtggcccagcgctcagggtgcgaggagcggtggctagtgatcgaccgtaaggtgtacaacatcagcgagttcacccgccggcatccagggggctcccgggtcatcagccactacgccgggcaggatgccacggtgagcgcagccaggcgggggcacaggagagggcgggaccggaggctgagtgcaggggagacagagttacgcactccgagccaaacaccgactaattcggaggaaagcccggaggcgcctgatcatacctgttgcccggtgattgggtgtcctgcggatgcgggatgaaaaggcgggagagaggcctggagaagtggagtctggggagtggggatggaggccaacaacacgcacacacaaacaaagggtcccgcctccctgccgtgcattccatctgcagccccgagcctcaggtctctgggcggggacagaaccccgagctgggtaggctaggagggaggagagcaaggatgcaggccgcctggggagggagggggtcagtggccaggggagggagtcacatcctgtctcgatggctaggagaggcagcgcagccgcgtctggacctaggtgccggtctccactcgccagcaggagcggagagggagcaggaaaggagcccattctcgaggatggggctgaaacgggaagcttggggagaccgctgccttggggacccctgcgtcgtgtgaagactggaggacgcggaagggacagcgctggccggggagggcaagcggccgctggcgtacataagggattgggaatggcatacacttagcgaggacccccagagctgttctcgaatcgccggggaggccactgagccgcaggccagcgaggtcttcagctattccgcggagcggaccgctgtttacgctctggggcggtaggcccttcgcggggtcctgtcccttcttcccttggtctcactgcggggtcggcgcgcgccccagccccaggcctgctgcttccctttctagaccacagccctcagagctaaggccccggcgcctctctgctgggttggagtcctggggactcagtcctagggactcgaaagtcggggcgttcccttcaccgcgtttcccccttggcggccagaatggcgtcccctccccttgcatccccctctgatcccgtgccctgcagcgtgatgccctccactgtccctatccactaccctggcgtcccagagtgtgccgcgggtcaccaggttcccataacgtcgcagcagagcttagacgctgcggggcgaagacccgccccaccctctgacgcgaccagcctagtgggcgaggccagagcttgcgcgggtcaaccagagtgaccactcgggagccctgactgcggccaagggcgcaggcgtgtcccggcgcatgcgcagacgaaacaggcaccaacgctggagcttcccgcagtgtgatttggggccgggaatgccgcggcggggacggcgattggtccgtatgtgtggtgccaccggccgccggctccgccccggcccccgccccacacgccgcatcacttacagggcccggggctgccggacctgccaacgtgaatcttatcgccatggaccttaccttgcacaacccaaagtagctgccttggggcagggggtggccagagtgcttagggaaatgtggagccctacccagaacaacggtggagggaaagggaagaaacgcagaagtgccccagttcggacgtagggaagtcttcctcttcgtggtttttggagaaccctagctaagagaggaaagggacttattgaaagacccgcaagaagggacggaagtctcatagccctgagaggtgaagccagctggagttgatgggtcgaatggggacctagagaacttttctgtatctagaggtttgtaaaatgcaccaatcagtgctctgtaaaaacgcaccaattggcgctctgtagctagctagaggtttgtaaaatgagccaatcagcaggacgtgggcagggacaactaagacaataaaagctggccaccccagccagctgctgcaacccgctccagttcccttacaggctgtggaagcattgttcttttgctcgtcacactaaaccttgctgctgctcattctttgggtctgcaaagagtgttattcctttaagagctataacagcgggaaggtccacggctccattcttgaagtcagtgagaccatacccgccggaaggaaccaacgcccgacacagccccacccatctctcctgtttctcacctatactgaaattcttgggcaaaa

SEQ ID NO: 914671 - DNA, 4001 bp, Homo sapiens
aaacccactgggcttaagcaatgtccacaagcaagtaaaacaggatgggactgaaagctgtagggaatttcagtatcgctgaccttcccaatcttagataagccctggccctgctggcccacaccacctgtccattgtccagcttgggttatggtggcctggtctggccttcccctaggcctgtctccatgagatgcaagaggtggggaagttaagggtcgggcctacacagcttagagagcaaaagcccaccaacagttgggcatcctagacctccaggtggaatgatctacgtcaagttcatccctcctttctgcctctctcctattcactttccccaatttctgtatcccatcagaccttttttctctgcatccaattcactaccaccaccaaaagccgccctttcttccctccttgcctctgttcttttccttctggcccattcgaatccatgggataccagctgcatccttaaataaatgccaggatttcagactggggtccccggtgcgggtagctggtgcggggtaatcactgagccacgcatttggtgggggtaaggtgggcagcaatggctccagagaggcccacaacctttaggagtgcaagatgagggaagggtgttcttggcaggatttaaaaagagagagccattgagttgaacgcccgagagtaacctcgagtgcagacggacctgttgccaagccagtctagtgctgctaaatccaccggctcaaggcctcactcgacctgggctttgcaaaccccaggccgttctccttccaccaatcccggacgccggtccccaagaaggccggctcgagcttggggtgagtctagataatccctggagcgtgggaacccgagctgctgggcggtttttcccaggtggccattgaggaacttcttagacaagagtcccagcaggagcgatctccggccggggacgagctttccttctcgccacccagtctggatggagagtgcgggacaagcgcggagtcccacacctggctgcctgcgctcccgctcctttcagcggcgcgcaggggcggccatcttccccgctgggggcgccaaagccgtctggcccgagcgcccctcttggggagtccctgcctccagacaaaccccgaggaaggggaggacgcgtgggtcccggcgcgcgcggtagatgcttgccctgttctccaccgctgggactttcaccgcagcgccgcctccccgggtcccagatccggtctccaccccagtcggcccagaggaggaggaggattggggagggggtacgagtgcaatagatgcactttccttccctacaggacgtcccaagctccattcagcgccggaggtctgtttggcccacggggagccagggatcctgactccgcctgcagcagagaagggtggctggggcgcccccagacccttaccgttgcatcttctccagcgtagtgcccgatgacccgctggccccccgggtgctggatggaccatttggtgatgttgtaaaccttgcggtcaatgaccagccacctgtcggtgcgcaggttatgcttctgaatctcctcccagctgaaggtgggcaccgacacctcgcgctcggcggccccctcgccctggttccctcccttccccatgctgcctgccgactgtgacgccccgtgcactgcggcctccccgcgccggctgctcgctgcacagacggctgcctcccagccggtgtgtgcagcccgggccctcttcgctttcggcttttgtcttctcctactcctcccaccgcgccccctcccccagccttctcgcctgcgctcgggagtgtccctgccttcctggcggaggatccctggcttcccagtgcccccaagcggtccccttcctccgcccctccctcagccctcccgctatggacttttgcctccagtaaaaactccccgggagctcagggcctcgacacctcctctgcccgcccctccggctccccccgcctcgggttccacatcctcccgcgttccccgccgcccgagtttccacagcgatcagcagagcgcctgcaccaatccggtcgcgtcgccccgcctgccattggcccaggaggatctttcgaaggccagcgggctggagcggcgggtccccggctcccccgccctcccgcgtggagtcgagccctgctgcgaggcaggctacgtgtccgacctcctccctcccccactctccggccccgggcgccggaggagatcctagaggagatcccggtgggggcaacgaatgggctccgcgcgctccggggcgcgtgcgcgcacgcccggcgctctgggggtttgcacctgatgccgacacaaagccggcgcggccaccagggtgccagcaagcggccgggcgggtggaccggcgggctgcggggcactcaactccagggccggcttggctaggtgacgcccttccttggcgcgcggcagtcgagactccagtatcccacattgtccgcgccatccacattctggcgcctttctgcaacctccctagagacacaagccggccttggattagagggctttgaaccctctagtcagacaatcttagaaaagaattgcggaacctctgctctgctttcttggtctgggcgccatggctgcggtgagggggaagggaggggaaggcagaggaagggggcgatgaggaactggcgcggtccttgccctggtctcagtaagctcagtctctttgggaatcgtggaagcagacacatcattgggcagtgatgttgtgcagactccagcaaataaagactgccgtatcgaagggataggaggagggttaggtcttttaggcgtggggcaagagacaggcccctcagaccccagctggatggggcggcttagtgccgggcgtcctgggggaaatgggcctgactgcatccggagggctaacgggacacgtgggaagtaaggatgaacagagagggtggggtgcacgaggcttgggaatcactagaggagttatagggccctcagatttcaatgggatttacaggtgcctgtgtgctagcacaccctaatcattagattctcatcacaggctgagaggtaaacaggacgcatattattacatctcacttgaaaatggagagcctgagattgagagagatggtcaaacgggccctgcccaatctaaatttcacagcaatgcaggggtggtggggggatcactctgcccaactggtggggttgtacttgggggggcagatgggctccctttcctcacattcacacagtccccaacctctcccatcacatttcatgctggtgtcagccctgagcatccttcattcactccacagactgcagacataaagacagtaaggcctctctgtctttgagtgtgagcagacatcccaaacaaaagccttctgtacaaaataagaggatgaagcaagacctccagagagtatggtggccttgaggactgtcaaacgttgacggaaatggaaccaagaaaattattttctcagaaatggattaacataccatatagataactttaatgaacatttgtaaagggtgtggagctcggagcagggagtgatagctgaaaggcagaaccagggagtatctcacagaggctttgaaggttcaggccctaaaagggagcacgtatgggtggcctgtgtagggtggctgagaagcgtggaccggccagggcctggggtccccagcggctcccagcacagtaccagccagggtaggtcctgaaaaaacataaaaacatgtgttgaagacacaaatgaatgaatgaagttcaaagaatggctccaatgaggccggcggtagatggggctcaaattgagaaaagccccagcagcctcagtaaggggtaggaagggaggactttaccatggaggaggcttggacatccgtaaagcaggtgtactgtgatcagatccatggtgtagaaagataactccagaggctggggctggactgggatgtacgggagaa

SEQ ID NO: 914672 - DNA, 4001 bp, Homo sapiens
ctgaggcaggagaatcgcttgaacctgggaggcggaggttgcagtgagccaagatggcgccattgcactccagtctgggtggcagagcaagactctgtctccggcggttggtggggagtaaagttttctgtatccatactgtcctctaggttacaaaagactagagcaggccgggagtggtggctcatgcctgtaatcccagaactttcggaggctgaggcaggaggaatgcttgaacccaggactttgagaccagcccgagcaacatagtgagaccctgtctctatttttaaacaaataataataaataaaatagatacttttttagaaaaagaccagagcaggcatccacaagactccttgaagggaggccagggctcagcaaggcctttggggagaagccgtgcccctcacctcgccacgccctggcagaaaggcaggcacacacaccacactcacccagacatgcaaacacctgcacgctcaaatactgcccccaggctgcttcatcccacggctgtgctgtcccctcgggccagcgtctggcgcctgaacagccacggacaaggcgttctcttttttttttttttctttttttagaatttcaggaggattcttattctcactcctcagcttcatggggtggaaggggaaaagaggggctttcttcctcaaagagtccagtgaagattgtccaacatgctggagatggcaatcggcagagagcaggtggccctgtcaagagggacgccgacagtcctgggactggacagaacctccgctgctgcccaaaaagccagcattcaggattcatgtcctcgggtcttgaagaccttcctgatacccagtgtggccaacctagaaatttggagggtcaaggacagggcatcgtggccccaacccctattatgcaggtgggtaactaaggaaaaggggctggtcgggctgctccaccactggactccagccagacagtaccctggggccaggctacatccctgcctgtctagacaggggctgggattgggaagttggggtccccaggggccagcctgttcctggggtgactgtgcttccaggagaggcccacccagcctggctggcaaagccctcccacgtgcagctgctagcccggagaggtgagtcactgtccctgagccctttacagaagctcttgggaaagccacagacctcaggccggcccagcccccagcctctaatggcatgtccttaccggcccctggggaccctgccctgccctacccctagcactcagcaagcacccagcatggggacccagaactgaaacagggacctgggagcaacagggcagcccctcacccagggcaggctctgcagcatgacacacccacctctgaggccccctcctcccccgcagacctgctccgtggacagctgcgggtcctccacgcagggaactgccctccctaccccacatctggccctggctagtccaccccaactctgggtcccggcgtggaggtcaaaggtcagcgaggggagggaggatgctaaggccccacaggtggagcgggacatcacgcccacgaccgagctccaggctccacccgccggtgggtggcttccttatggcttccttaccgtggcgtcctcagcgccgtggtggccgatgaggcggctgccccctgggtgccgctgtgcccagcggctgatgtcgtagacgcggcgctcgatgaccagccacttgtcgccgggctggtcgtgcgcgcggatctgctcccagcagaaggtgggcagcggcgcccccggctgcgcgggtccctcccgcggtcccggctccccgacgccgcccatgctgcacgcacgagtcctggggatcccaggcggtggccgaggtccgagcaagaccccgagggaagcgaagagcgctcccgggcgccgcctccgccgccgcccgctgctccggccccgccctgccgccgcggccgccgtacgagcgagcgtgcgcctcccggctcgcggcgcagggaactccccgccttataaccgcgcggacggcgcccgcctcgcctcgcctgcccccccgcccccggccaggccccggcccccaaggctggctgaccccccgcgtccgctccaatccaggcgcggggcctcggtctccattggccgccagggagggcggcgtcgaggcggcccgcccctcccgggaggacagcggccgccacccagccctgccccggggcaccgtcccgcccccttttcccgggctgccggcttccaggttcttgactccacccggagcgcggggcctggggacacaacacgcacctgttgggcgtcccgcagcgcctcgccacgccctcgggaaccggaggcggagtcccggtctgtgagcagcggggcctggggggcttccagccgcgcgtcctgcaacgtcaaatccagtgcgcccagaggggggacgctgtctcggggtgcctgtgaacagccttcaaaccatgggccccaatctctgcggggcccccaccgccgctgcagctctctcggagccctctgctgggggcgggtggcctcccctccgccctcggcgctgcagggctggggatgcccaggggtggccaagggggaggtaggggagcaggagggcactggcgcgtggaggcgggcgctgccatccatgggctgaggacacctgtgcttgttactgcttccccgcccctcttttttgttttgagacaggagtctcactctgtcgcccaggctgcagtgtagtggcatgatgtcggctcactgcagcctcaacatcctaagctcaggagatacccccacctcagtctcgggagtccccagctgggactacaggcgcgccccatcatacccggctaatttttggtgttattttatttttgtagaaatgggtcttgccatgttgcccaggctggtcttgaactcctggactcaagtgaccctcccgcctcccaaaatgctgggattacaggcatgagccactgcacccgggccccatccgctttttttaatttaaatacattcaagtccttttgaaagtgtaggtagctcccctaattgcttcggatttctttgtgataaatatacctgttcctaaaagttaagcgttcacagcagcaaggaattcaaatcaggctaaagttacttccagagcgctggtcgtcaatcttccatcagaaccacctgaaaggcttccatcagaaccacccaggagggttattcggtgggtctggtgtggaggcagagacttacatggccagttcacaggtgatgctgaccggctggttggggaaatgcacttagaaaaccctaagtatatttctctgatatgctaatattttgtcttggtctaaagaggaccagtatccccagaagggcagagggggcgagttctccctggtaccaggagctcctgcctttgcttgtcaggacatccagcaaggcccatgatgtcatcaggcaccggggctgcctgggccctctccactgaggcacccactgaccatatcctggaaccccaacctggcacatgtgtgtgggggtgcaagagcatggctggtggccctggcccaagggggctgcaggcacccctaccccgtaccatgttcacacagcacaggaatggagaaggcagattcttgaaggaatgcatcccctgcaccaaaatccactgaaggcatggacctggccctggccccaccttcagcagccctgagtggtcagatgtggccatcctaggggcttcttccttggagccagccctggcctggtctcagcccctgtgtgtgaggtggttgggggttgtgataggttagaacctccactttccccagctgcccccagaagagatggggaagatgaagggggggccacagaatcatgcaagagccgtgagtgagggcagggatcacagccctattggccaagtcctcctcgaagggatcactgtggaggccaggcggagctcctcagaatgctcctcaggaaag

SEQ ID NO: 914673 - DNA, 4001 bp, Homo sapiens
gctcgtatttgaggaagcaaaggctccagagctccagctgggcgggaaacggagcaggtggggctaggggtttgaatcgcccgccttttgggaaaaggttgtctgcgaaccaattggttactttctttcacttttaaatcagccgtgcctcttccggcctaaacctcaggtagctacagcgtgcagtacttgacgctgtgtttatatcagacagcactgccagtctgaaacaaaactttctgaatttcctaatccccagagccagcgtgagaagtagacttgagcctgttctcttcccttgaacttttcttttacacgagtacaacaaaaaacaagaacagagacaagtcgtagtgttgctagtgataaggcagatttttcaccaagcctaaaaagcttttaaaaatctggtcccataaccaaaggggttcctagaaagatttctttatgcctagggacaaaataaactcagcgcttgaaaaactgagcaaaaagaaactggagttcaacctgatgcaagatctactttctccacctttgagatcagggagagcctcaagaaggttgaagggacttcagggcacacactgattctgagttgagggttgggaggttgattaggtcttgctggagcctccaagaatgtcaaatgttggctcccagtaatatcaaagcaacctgttgataagacaaagctaagtttcttgctcacttaggtaatggagaacaataacttgacagaatttaagtggtgtctcagagagggaagagcaagtttgggctatatgtattgagattttgaagtcccattgtaagtctaatatttaatgaggggaattggttagaattgagtcagctacgggtaaaagtttaggattggtagataaaacaaggctaggattttgaggtaaaggttcaaagtcttagaatgtaaactgttctttgatgttttccattgaagagtggttggatctttgaagaagatactggattaagcaataaagatatttgcaactttccggtccctggcaaaagtttcttgaaatagtaaatgtatgttgatgaaaataatggaataagaagtcaggttaatgtagttggcaagctatgtgagtgtagatggcttcagttctcacaatagtgaacatacctgataatgtactcaacatttgtcacttagagtattttatcctggaaagaagcgtagttgggaaaacgcacttgagatgatgtttgctgcacacagaattcggacacagagatgtgaatctccttaggaaccattttcataaagttaacattgggtcttaatagacatcagtttttaaaaattagaacaggcttgggcactgcaaaagaaagacacatccgttcacttggctgttctttttaagtttccagggagagcgtcagtgcccctttcaacaataaaagcccgcaggagtgcagattttatttaccctgtccccaccagcatcctgctgcggccaatgaatcctggcaaaactccaggtcagccccagaaccaaagagtaactcacctaagaggaaggtccgttcccaccaagtctcagacgcctgaactcgtgatttttagggactttcccttccagtcccttggaatccagcactttggttggagaacagaactcacttggggaatggcgcgtctggccaatggaatgaaagatactggagtttgtcttttctcttcaggcagcaactcacctacttcggaagccgattggctgcgctggggacacctgttggcgtgcaaaaaagagtggttggaaaggcaaggccgagggggcgcgcctaccctacccacccacagcgctcctccttgacgccgcgagcaggaccctgtctcactgaccccgtgcccacggcggtccttgcctgcttctattctcccggtttccccagtcccgagtattggaaagcgagagcgaaagcgaaagcatcctagtcgccggtaggctggcctgggccgggctggagagggagcaggaaataaaaactcgggtgtgggaggagctgggacgctggcggcagagccactgtggcagcttgagtctcgcgcgcgcaggaagcggaggtggaagttggggcgcaggaatgtggctgtccccgcctgtaaatcatggttggggaggagtcgcggaggcaccaggctggggtctgcagcgcgccatctgctgcagcacacaggaggcgctgaggctagttgggtaagtggggagatttcaggcacttccgagggggcggcatccccagcaggtgggataggcccggtgactaggacaaaatcacgaagaagccgcggatgcaggaagagtaaactcccttgtcataaatcgattctccaaacgttcatcaatatgtggagacgtttatgatagtgatgaagaagatgatatgggctctaggaatatgcatctcaaagctgatgatcgaagaagattggagagggttttcaaggcagcctgctgtttaaggacctgcattctgagtagatgtgtattggaaaaggcgattacagtcacaaaggggacaacttttatgcaattgacagaggactatatgatgtatataaacagatagggttgaaaggtgtgttggtaactacaaaacacatgggaatttgaaggaaggaactggccttaaatgcatgtacaatacaccaagagaagctaaaattactgcttcatcttctgtgggttctttggggtttggatagagtaaccttaaaacatatttgaatgctgactttttctatgagactcacttttggaatctgtgcattcctacattcacaaagggtaatcacagctagtacccagcatccaaacaatagcagccaataattctaatctggagaaaattttcttttctctctctttctctctctctctctctttctttctttctctttctttctttctttctctttctttttttctttttctttccttctttctttctcttttttcttttcttcttcattccttccttcctttcttcctttcttttttctctttatttcttctctttctttctttcttctttcttttttcttttatctttctttctttctcacttttctccttccctccctccctcctttcttccttctttctcttttgcctgttttacattttaatgtgtaagcaaatagtgattaaaggacaataggcttaacattttctaaaacatgggtgttcagaattgaatatactgataaaatttgtttccaaaaggaaggattatatactaggtgggagtgtaaattagttcaaccattgtggaaaacagtgtggcaattcctcaaagacttaaaaacagaactaccattcaacccagcaatcccatgactgggtatgtacccaaaggaatataaatcattctttcataaagacacacgaacacgtatgttccttgcagcgctgttcacaatagcaaagaatcaacctaaatgcctatcagtggtaggctggataaagaaaactcagtataccattgaatactacacagccataaaaaataatgagatcatgtcctgtacagggacatggatggagctagaggccattattcttggcaaactaatgcaggaacagaaatcaaatactgcatattatcacttatacgtgggagctaaatgatgagaacacatggacacgcagaggggaacaacagacgctggggcctatcggagggtggtggatggaagaagggagaggatcgggaaaaacaactaatgggtactaggcttaataccttggtggtgaaataatctgtacatcaaacccccatgacatgagtttatctatatagcagacctgcacatgtaccactaaacttaaataaagcttttaaaaaagttttcaatctacgaagttgagatttactagaaaggttattcaaatgactttgacatattgaaatattagtgcacaaggagataataaaaagttattattatagaagatataaaactt

SEQ ID NO: 914674 - DNA, 4001 bp, Homo sapiens
ttgtttcctcatgtcattgtttaacttatgttctagcccctgtatttcttgtcaaatggaagttatctaaaggctatgtttactctcgtaaccattccactatggaacaagagtcctggctttctagtttactgtcagtcattgactagggaaattcatttagcctttctgagcctcaatttcttgtttgtaaaaagaagcaatgattctaaatgagataatgaatatggaagtgctaaaataatgttagaacttataaaactgtctgagttcaaatatcaggtagccacttactagctgcatgaccttgggcatattaattaactattcttccttcattttcctcaccttaaggtgggaatcaaccttgttataaagattaagaaatatattgtggtctgggtgcggtagctcatgcctgtaatctcagcactttgggaggccaacgctgatggatcacttgaagtcaggagttcgaggccagcttggccaacctggtgaaaacctgtctctactaagaattaaaaattagctgggcatggtggtgggtgcctgtaatcccagctacttgggagactgaggcaggagagtggcttgtacctgggaggcagaggttgcagtgatccgagatcacaccactgccctccagcctgaggcctgagcaacagagcgagacttcatctctctctctctctctctgtcacacacacacacacaatatatatatacacacatacacacacatattatatatattatatatgcaatctatctatatatacagtgtgtgtaaatatatatatatatagagagagagagagagcatatgcaaagcctttaaaacactgcctgtatgtaataggtcccccagtaaataatcaataaaaaggtcatgtaaatgttatcaatatcaatacactcaccacagggatactttttaaacagcagagaacctaggaaaaaaaatagaaaatgtacaattgcggaactgggctatgttgcaacatccctaaatgcaagaacttgttgcccaactattaagaaaatctagggattcactgtgtctgttcatgatgtctcatcttacgaagtttgagagaggatccgggtgctttaggaatgattaatagacacagacaaaaaaaggaaaataaaatgggcagaaagaaacattaattttgcatgtacttgagcaatcacagtggaaaggggcaagaggttaagaaaacactccaatatcctccgtctccctacattgttttcagtatccaggataaatcagattatatcaaaatataaagtgctcttagctatcctataccaacccctgttttatacttgacatcaaggttctacttacctaaagaacttgcttgacttcctacagcaaagggataaagcagtgcagcctggggcccatgtccagcccacctgacagctccccttaggaatttctctgtctctcaatctctccttccttccctctctccttccccctctctgcctctctccctttcctcccctccttcactctccctcttcctctctccctttcctcccctccttcactctccctctcttcctgcttctccgcaccccaacccccactttctgcctttccaggggcaagggcaggggtcgaggccaactctaagcctcttccaatcctaccacgccgccccgctccccccagcacacaaggggacttgcagcactaccaaaataaaacctgtgtcctcccggctccccagatgggtggcgctgtcagtccccggcttcctgacacccagctccttctcctcccagccgggactcgagcccgccgcggccgcgcccgtgaccgcgccccgcggagcaccccagcgccctgtgtgctcactcactgcgcgcctcgccagcactcggcctggaatccagcgctcaacgcagttcccgctcgtatttgaggaagcaaaggctccagagctccagctgggcgggaaacggagcaggtggggctaggggtttgaatcgcccgccttttgggaaaaggttgtctgcgaaccaattggttactttctttcacttttaaatcagccgtgcctcttccggcctaaacctcaggtagctacagcgtgcagtacttgacgctgtgtttatatcagacagcactgccagtctgaaacaaaactttctgaatttcctaatccccagagccagcgtgagaagtagacttgagcctgttctcttcccttgaacttttcttttacacgagtacaacaaaaaacaagaacagagacaagtcgtagtgttgctagtgataaggcagatttttcaccaagcctaaaaagcttttaaaaatctggtcccataaccaaaggggttcctagaaagatttctttatgcctagggacaaaataaactcagcgcttgaaaaactgagcaaaaagaaactggagttcaacctgatgcaagatctactttctccacctttgagatcagggagagcctcaagaaggttgaagggacttcagggcacacactgattctgagttgagggttgggaggttgattaggtcttgctggagcctccaagaatgtcaaatgttggctcccagtaatatcaaagcaacctgttgataagacaaagctaagtttcttgctcacttaggtaatggagaacaataacttgacagaatttaagtggtgtctcagagagggaagagcaagtttgggctatatgtattgagattttgaagtcccattgtaagtctaatatttaatgaggggaattggttagaattgagtcagctacgggtaaaagtttaggattggtagataaaacaaggctaggattttgaggtaaaggttcaaagtcttagaatgtaaactgttctttgatgttttccattgaagagtggttggatctttgaagaagatactggattaagcaataaagatatttgcaactttccggtccctggcaaaagtttcttgaaatagtaaatgtatgttgatgaaaataatggaataagaagtcaggttaatgtagttggcaagctatgtgagtgtagatggcttcagttctcacaatagtgaacatacctgataatgtactcaacatttgtcacttagagtattttatcctggaaagaagcgtagttgggaaaacgcacttgagatgatgtttgctgcacacagaattcggacacagagatgtgaatctccttaggaaccattttcataaagttaacattgggtcttaatagacatcagtttttaaaaattagaacaggcttgggcactgcaaaagaaagacacatccgttcacttggctgttctttttaagtttccagggagagcgtcagtgcccctttcaacaataaaagcccgcaggagtgcagattttatttaccctgtccccaccagcatcctgctgcggccaatgaatcctggcaaaactccaggtcagccccagaaccaaagagtaactcacctaagaggaaggtccgttcccaccaagtctcagacgcctgaactcgtgatttttagggactttcccttccagtcccttggaatccagcactttggttggagaacagaactcacttggggaatggcgcgtctggccaatggaatgaaagatactggagtttgtcttttctcttcaggcagcaactcacctacttcggaagccgattggctgcgctggggacacctgttggcgtgcaaaaaagagtggttggaaaggcaaggccgagggggcgcgcctaccctacccacccacagcgctcctccttgacgccgcgagcaggaccctgtctcactgaccccgtgcccacggcggtccttgcctgcttctattctcccggtttccccagtcccgagtattggaaagcgagagcgaaagcgaaagcatcctagtcgccggtaggctggcctgggccgggctggagagggagcaggaaataaaaactcgggtgtgggaggagctgggacgctggcggcagagccactgtggc

SEQ ID NO: 914675 - DNA, 4001 bp, Homo sapiens
ctgttgaaaaggaacaggaaaagaagtacccaaaagaagcagatgtaacaatttctgaggctcatacaggactgtgtataatttcaattcccaaaaatccgactagaaaacttcataattcatgaagtatcagggagactactctgcaaggtatttcttccgcagtaggacaaaattagccctagttctgctcccacctaataaataaaagcaagcttcgaaagtataaaatggtttccatgtaaaatatgaacatactagaacaaagctcaagaatattgataggaatgtaaaaatttctggcacccaaagttgtgaaattaacaaagcttgatatctaataaaaaaatcagcaggcacttaaaaagtggataaatatgacccataatgactagaaatatcagtgaatagagacaggtccagaagtgagagagaagatagaactagcagtcagaaacattaaaagtcattaccttgaatttctggccaaaatggagtaacagggactggatttccccctagtatgaaaacaaaacaaaacaaaaaagagcaaaacatatgaaacaatggtttgcaaggaactggacattatgcaattaaggacagtgacaattgaaatgtatcctataatccactttagcagactaccttgaggaattccaggccagtgtggcaaggaagggcagcaagacaaaaccagtaggaattccagatttaaggagacaaagctgagagactaaggtgacaagaggtcacaggccaaagacatggtgggagacctgcacagagagggaactctggatatatgaagagggttcccctaaagcattcagctgtgtactgatcagagcagcagctgagaaaactttccaaggccaggaaagaaccaccctaaaactgtcatagtctaactttccaccaaccctctccctgtaacccttttagggatccccatttcctcatttctagattaaggactttggctcagatgaaacttttattgttcgtgtgaattggttcctctaagctttttaaaaaggattccagatcccaccctcacagactctgattcagtatgtcggggtgtggctatggaatctgcatttttacctgcctcactccacaacccccgcctcaaaggcgcaccaagttctttgaacagctgcctctgtcaccgcaggatgacctcaatgctttcctaaagccccagaacctatgaaggtaacctgtgcttgaagctgtgcttgcttacagaaacagagactggatgtcagtaaccaccgtgctacaagatgggaaacgaacttagaagcgctaccctaacctgaatccttgctgattaccatacctcaatctgtgcctcggggagaaacgcagcttgctaggcacatgtagtgttgggtggcaacagaaaataggagactgccacactcagctgtttctggaaagccccgtctctttccagaaatccttgctttccaactacctgccctaaaagaccttaagaagcaccctcacactacactccaggcactttgagcaggagctctcctactccattccttgatcagtgaatagtttctgctctgcttaaccgaacctggtctccttctatgggcgcgaacggcaccgggcagggaaaggacccaccagggtcaaacgaccctctcgagattcaggaacacccagatgatctctaagtatctcttcaggagtacaactcttggcctttgaagctgagacagggggaagggaattacaacgggcggctgcccagctccccatccaaaacccccttgactttgggctgaggtccttctgcctactgcccttgtcagccatccccctaagaactccaggtccgacccgggaaaagaaaaaccactcacagaaccggagagtctgtccacacggtgcaagtgcccgtcagtgcccgccgctctggatttgcaggtgctggaaagactgctcttttatatctctcagctgaacttttcccgcctagaagggctcgcccgtgcgcggcaggagcctgggaactgacactctcgctggccaatggacgaagagtctctggaggctgtttttctctcattggatgtaaatgactcatctctcatccactgtggaagccaattatcatcactccagacagtgattgaagggaaggaccggatgagcgcgcagcgcgcgcaggtgggtctgaaggccgggccgagggtactgcgcgccaacccgcccaccctccctatttgtctggatgacccttcccggtctcagtgatcccctccccggcaccactcagtccacggccagttcccgtgtcccaggataaactaagcaatcaccgccctgctctttcccgctcatgggcgtcccctgtctcccagtggaggctagggaggagctgcgcggtagctgggcggagtgggaggtgcctggaggtttcgcgctttctccgacttttgattgccagcgcgctggcgggagccgcgcgctggcggcagctgcagggcgaatagcccgccaagttgcttaggtgtgtggcagttgctgcctttctgcagcggcggggtgggcgacggtggcgggatgagcatccaggcgggatcctttggcggcagcagcagagagagctccacccggataatgcagaggcccaggctccagcggacttcaagtcccagagcaggctgcacccgcgtctgcgtgaaatctaaagggacttggcctgatcacaaatgagctaacttcgcggcggggctggcgaacacagacaatgccagcctggaggaggcagtggccagcactgcttaggcctcgttcccaggacgcgcattactgagtgctgtactttaccctttggatgaaggctccagagtacgacctccccaaactgatatcaaagaagtgctttgcatggggcttgagaaaacatcttactgtttaagaaaagaacgtcttactgtctgagaagctgaatagaatgagatgccatcagtattgggtgttatttttcagaagttgctcaaagaaggagagaagatggttaagtggggatggagacaattattttgtaactcatagaaggacagatgtttatgtaacagttgatagttttggtggaataatcatgagcatgtttctgaaattaatataaaatatacagagacccctaaaatcactgcttaaattacacgggtcttgaggtgttcggaaagagcaaactttggaagtataattgtaaaaataatgtcatacagacaaagagaagagaaaacttaacgacagctttcttaaatcgctgttattcttgaatcatctgaaagcagtacacgtgcctggcaccaatatacatcagagagtaaatcattgcacaaggagacttgatcttctttttttgtagaatctggaggaaacaaatctatgaaaagcaagagatggtagagaatggtgttgtcgaaattgcctgacatcattggagatagagaatttgccctggtaaaaggtgctcctcagggaggagcatctgcacattccattagcataaagcccctggtgggccatatgaagaagtctggattttgctataaatgtgaaatttattttaaatggaggatttgaagcaggggggtaatataccctgacatattttaaaaaatcaccctagcagcgtttgtgcggggtaaagactctgggaggacaagaagagatgtggaagggagaaggcagctaagagtctgtcccaggattgcaaagatgttggagcccgacctcagatggtaatggtggaagtgttagaaatggctggattccacatttattttgaagggccagcccttggaatttgcttatggatgttccataaataagagaaacagagggctcaatgacgattcctgggcttttgacttgagcaactagaaggatggggaagtctgaggacagagatgctgtgtgtgtcaggagtggggtgtgtgtgtgtgtgtgtgtgtaaaatt

SEQ ID NO: 914676 - DNA, 4001 bp, Homo sapiens
caagaacaggtgtagtttcttgaatgccataaggttagggtagaaacagcctctcccatccccgacacaaaaccataaaagtcctgtacccaaaacaagtttttaattaatgtaatgatatgaatttaagtcccgatgtcaaaacttcagggtccttggaaaattgagcttcaagtatctaagtaatatgtgatgttcaagtgaaattagaacctaggtctggagcatggaaggtaataattcttttagggtggaatttctcaacttttatagacctctgtcttactggtaaatttgcagggggtgggtggggaacaggagaaacagatgtttcccaatctcccttggaaatctttgcatttgtatctggatctgcatttacacctgccttataagagaaacgtacacaagccttgcttctttcccactttacaaatacatcttcctctaccttcattcttcaggccaaacattgacagaaataagacaattcaaaatgttcagacacacctagcatacatttatgatgcacttcagccatctaacagatatcgagtttactatgtgccaggtgagtggattaaaaaaaaaaattcttccagggactcacagatcaacagcagctgccaagagtacgccttgacctgcataactcaattaattcaaactcaaaggagttacagtgtagggggaaaagaccagacctcatcactgaccacctagattgtaactagttttcctactatcaaaccctttccttccccactatcaaaccctttccttccccatctgtcctgcattcaactgccagattcatttccagaattccactttcaaggagtctctctgccctactcgaaaagcttcaaagactcctcactacgtatcacctctagttcaaactcttcaacttgagtcttctatgagtagctccacctgatcaactttgtttcttgttggtacggctcccttctgccaaaccctttaggaggtgtagaacccaaatctaattcaactacctattctctaataactcctcaggcagccttcattccaagcagtcttaaaaaattgttccttctatcgtcacagatccattagttttcaggacattctttctgaactcagcataagctttcctcttaacaaatggcaggtatatcccaagttatttttaacactaccatcccaaacagatgtttatcttcccagccacccctgagtgaaatcagagggagtcgcctgcagttcgggcaagggaatcccaacatcgcatctcgtgagaggaggtatggtgtggttgcaaactatggagaggaaaaataaaggaaacaggaaaagtgaaggtctgtgctccgttctttcagctttttctttaggaggagtagggaaggtagggaggagacccccaagaaatgaattcttgaggaagggcagaaaaaacactcacagtgcttcctaagtaggaaataggtgctgggggccctggataagggaaggggccgtcatccttaggagaagggtacaggttacaacgcgaaacaaagaggctgggagttggaagatgaagggtggagagactacagagatccgggcatccgatcaagagggtccccgacgcgtcccgcaggggactggcggatcaccggagattcagtggctaagagggacggcgtcggtgcctaggagggctctggggcgagcgtttatgggacatcgctcctaagggggcgcgggggcggggaggagtttttgagtgggatcgtgtaccaaaaggagaaacgtttctcagaccagtgctcttcttgaacggaaatcccggggacgcagaaaacgttaaaccgttgaggcaccggcatttcccagccccagcccggcttccctacacactcaccgagtctcctccaaacgccactgctccagctgcagctaccggccggcgcagccgcactgagcgcgcaccgtccccacgtgactcgcccaggccccaccccgcaccacgtgacctgcagggcccacccactcccgcctcattgtagtcgcccttctccacgtggtcttggctcgccccgcccttccttgtaagatggcggcgcccaggtggagcgcgtcgggcccctggatccggggaaacggccaaggttgcgggagtctcttcactctcgtctcaaagccattttgtgccgctgccgctgcctctacggccataaatgcccagagattagcggagaagctccgagcccagaaacgggaacaagacacaaagaaggagccggtgagtccaaagggaccagaactccctagaggcagtgcgctcattggtttcccagacggggagtaggtaggagggtcctctgagtgaaagcgtgtgagtcaatagcccggacgcaaggtgggagaatggggagaaggcggaggggaggggtcagtaagggtacggtgttttcccgtgagctggatctttggctactgtcaggctcagtcctaaccactgcgtcggtacgcaggttagacagatgggtatctctgctctcaaattagtcgaaggcggcgcgggtctgatgcaaagatagtcattccctactcagattctcacccagacctttatggaaggtcttctccacggcttccgcaccaggcattccccacggctccttctttctccctaggtgtccacaaacgctgttcagcggagagtgcaagaaatagtgcggttcacacggcagctgcagcgagtccaccccaacgtgcttgctaaggcactgacccgaggaattctccaccaggacaagaaccttgtggtcatcaataagccctacggtctccctgtgcatggtaaggaccacgcgggaaaggtggaggaacctgcagctgctttctgctacaaccgaggaaaactgagacgttacttgtggtgcactctaaagccttgcattcaaattaattaaacttttgtaaactaccgtccaatataaggaaccaccgagaacacagaaataaataaataagacagtcctccctttctaaacatctgacagtaagcaattcgtagaatacgctgtgtgcagactacagggatcgctgtagagatatacaaaggctgtgtggttctagactaaaggttatcttccatcagaactgggaatgagaaaatgatacataagaaaaaagggggtgtgtgtgtgtgtgtgtgtgtgtgtgtgtatgtatgttggagtatatgtaacatacaaccccagagtgactggaatttagtggaccttcaaatgtctttcaacagatgttgcatgtagttgtcagggacagctgaagtgaatcaggaaagattgatttaaaaaatgcatttgtgaaagagggaaaaggcccattttagctagaagaaggtaatgctttttggggagatacggagatagttgttcacaaagacaaggaattaaatcacatcaccaagtgtttgtataatttttttctctctttattttcgcaacagttttttgcctttccattccccaatgaagttgttttccagatatttacattttataacgagaaagcaaagttggaaagagaagtaatgtgtccaaggtcaaaaaaatggctagtaagaagagtagagtagaaccccaggaatgtctaaccccgaagtctatcctcctaatcactcttatttaatgcttctcgaaggcctcatggtttttcaaagtatgtctgagaggaagccacatgctctagaatggtgtttctcaaactttaatatgcttctgaatcacttgggcagcttgtaaaatgcagattctgactgagtagtctaggttgagagcctgagattcacttctaataagctccctagacatgccattgttgctagtctctggaccacacttcagtagtaaggctctagaaaatattgacagtttatccattaagggcttttctcccaaggagagttctttggcgagatcttttcctggccgctcaaacctttggctttttccttctta

SEQ ID NO: 914677 - DNA, 4001 bp, Homo sapiens
cattgtataaatgtatgcttcctcaacctaatacaacagccacaccatcatcactttaaatttctgaagttcataaagctatagaaataatttttaaaattaaaaattgggttgacactttttatttgggtaaattagatctttttttttttaacccaccatctactgttaccattactgcatcaacgaaagagcactgcaacaccaaaagaataggaatgataatctctgagaataaatttatcttcatgaataaccatactgtctttctctccctccatcttggatagatgataattttatcatgtacagggtccttggtccagtgtttaggaaccactactctaaactctgaactgtaagttctgactgactgggcaagttgccaagtgttctaccaatatggaggcctgtctggactccagaaagaagcaatgagaatataccacaggatataggagttggctctgaagctaagactctggaaaagaatggggactgaggctgtctaattctcaggaaatggtctctccctgtccactgtagagttaaggaaagacttaactctttctgagtctggaaagaataggatgtcccaaccccatggctgactagcagtagagaggaaaatttagtagtgtgaaagtggccattatcactgaatgccaaaccaactttccagaatttcacgtgcatttgggttggtggggagaagaggacctaaaagaatgctagtaagatgaacccaactacagggtgtggagaggaagagataaattttcaggtggctaaaatgttcagtatcttgagactgatgatgatttcacagatgtgtacacatgtcaaaactcatcaaacacacattttaaatataatataaactagctttttaaaaaattcaactgtaagaaaggagagtaaggccatcctgtttgggatcctaaatatagtactgtatagggcaaaccatatgacctccataaaagtagaattagcaactgaatatggtcaatccaatcaaagacccacagttaagcacaggtaaggagcaacagtggaataaggttgtccagaagcaagtagagagaaaacacaagctgtcacagcgcaaaacccttcatgagagggcccatcttcaactatgcagtccagagaaggaactcgaaggaactgaagtttctgtgattactctgttgaagtctgagcctcaaatatgactttcattaccatagtactattgcctatgacaccttcattttctcgtcctccagaatatggaaagtccatgggagcagaggagtcaggtgcacaacacttccatctaagctgccctactttgtctaaaactattgctctcactggacagggcagtccatcgaaggaggcctcagaaccaacctctcacctttatccaagtctcacaagccctaattccctcctcccatgcctcgccttcaactccctcaccaatttgccgccaccccgcaggctcccacctgcgccttttactctctctctcctcgcgcaggccttacccctcactctagtcccagggtatccttcacaccagccctcagtagccccagccctagtaaaccgcgttcaggagtcccttcaacttggcacctccgaaagcacccagcctctcacagcccctcatttgtccactcacctgtaagctctcaccctccttccctatcttagacactcacacccggaccctcaccacctgccaacccctcacaaccagtacagtaaccaaacccgtcaccgtcttttcccagtctctcatccccacaaacgactctccaggccctctggcccatgcgtaccgttcactcacggaacgccgaacctggccgggcccggttgctgctgcggtgttaggtgagttcaggccgccgccatcgcttctcaagcgcaccagccgcgccccgccccgcgccacacgcagcccgcgcccccgcgcaccacacgcaaccgcccggcgtcgcacgactgggcaatggcgtgccagctcattggctgagccggaccaaacccgagcaaggacgcttgtttcctggcaacggctaaacgcaagggcggggtcgccgacggctatccgagggaggagcaccgcctctcctcttggttccgtcccttcgtacgtaaaccccgcccctcagaaggactccggcgtgtcataggcgaaggcctctgggaaggtggaggccggcagggcggaggcggagcccgggaaggaaaggtggaaccagagggcagaaggcgggacctaaggagaggcgatttttacaggcagggaaagatcagaagggcggggcttgggagagatggagccggaagaaagacgagcgagaaaggggtggggccatggattccaggagacgcttggagtggaagagtgggtgtggaggggcgaggctatcacgaaaagagaggaggaatcagtaggtgggccgggcctgcggaaaagtggagccctagagagggctgactgcgggcactctagttcattttgctccatcgtcgtgcatagcttggtctctactttagtaccccagcggtgactgcccctggctcccccaacaccgctgtgctgtgctgctccgtcaccccttgagcacttagtcaaggaacacggaataagtgcctgcatgcccagctggattccggatcaattagaaccggcctctgctctccaggacctcagagaattgcagcgtagtgtaataagtacattactacgggggccacctaggagcagcacttagcatgatttgcatgtatagaggatgagaggaaggtacggtgaaggagcttagggaagacttccgggaggtgacggtgtctaagccgagtcttgggaaacaagcaagagtaagataaactaaaatagaaaaatagaagtttcagataaggcatgtagttttaaaagtactttaccggctgggcgcggtggctcacgcctgtaatcccagcactttgagaggccgaggcgggcggatcacgaggtcaagagttcgagaccagcctgaccaacatagtgaaaccccgtccctactacaaatacaaaaattaactgggcgtagtggcgcgcgcctgtaatcccagctgcttgggaggctggggcaggagaatcgcttgaacccgggaggcggaggttgcagttagccgagatcgcaccactgcattccagcctgggcgacagggcgagactccgtctcaaaaaaaaaaaaagaaaagaaaaaaagaaaagtattttgccaatgttaaatacctggtttttatcattgtgctatagttatgtaagatcataacgttaggggaagatggataaggaatttatgagaactctgtattatttttgcaacttttctgtaagcctaaaattagttcaaataaaaagtatttaaaaagaaatagaagtttcagaccaaaggatcagcatataccagggaaaggaagaatggacagcatgtgggaggtgctgtaagaactgcaatcagtacagtgtgtcgggagcctagggaacatgtgaggaaacattgtgagatgaggctgaagacatggactggagaactttataaaccatgttaaggaatttagattttatttttgggatgatagctataaagaattttatacatagattgatagttatacagtaactttgcaaaagaccaaacaagctgataaggcccaaactagagtagcaaaaatgcagagaagtggacatgtggatttttagaaggtagatcaccatggtttgatgattgggtggatataagaggaaaataagaggaagaattaaaaactaatgcttagtttatataaattcaaaaacaggtaaaactaaactgtgatattagaattcaggatagtgattattcttggaaaaacattgactgaaaggggcagagtggggctcctgaggcactggtgatgttctgtttcttgatctgagtgcttggttatatgggtgtgttcactttgtgaaa

SEQ ID NO: 914678 - DNA, 4001 bp, Homo sapiens
tcattagttctcaagcaaggaatgcacccttaacaatctcaagctcatcaaatctatttaaatttcaaaatgcctggctagtttttaaatacaccaggaggagaggggaaaagaaaaggcagagacatcatatagaaagatatccattacattccagtttatcttctcccacctttagtttggaagtatgcttttttcccccaacttactttttatgatatacaaataacagaagacaccctcccctccttaattctaccttaactaaatcccctttcaactttaccctttgggctgacttgacttccaaattttactaatataaataaaacaaacaaaaacatcacccgaacagattaaaatggcccctaagaatgagaaggtctcttccgtgtcccctgcaaagtcccctctaacagccttactgcctctcacccaaccacagccaccaaggctgttcatttaagtattccaacccttaaccctcatgtgtctcttggaggccaccccaatccttcaccaccaaaataatccaacccaattcccccctgctctccagcacagctcactgtccctctccatcctctctgccccatccataccaacagctccaggtctcccattccttaaatttcccctgtgccacctcaccatcagcaaccacctccccaggcctaccagctcatctccgaaagtccttctccaaaactccctctgccaccttggccaagggatattttcttcaagataccatcccccaactttgctcacccctgccgctatcctttcaatgaaagcagcccagtgatgttttatgtgccctctgccttgactctgcaaccaaggagccaccatgccctttccagtgattgtaagatcaccctaaatccaacccactgtgccccacactccatttccatccctgtcctcccatttcgggcctgacttccaatgtggccccttcctgccagctcaccatcacactcccctcactgaatgtcccacctccaccaactcctattccaacctccatcagcccaccccaggaaacccccaaattgcactcttctgctctatcctaacccatgctattccataagtctccacaaattccaccagccccagatgacaaacacccacttcaagcttgggtctcaacccatgccaagcccctcacccccaactcctgccacctccatcatcctgccccaggtccaccccaaattccacccttctgaattaacactacgcagggccctaaccaaccctgtacatgccactcactctccgttgaaatcattcccctgcccctcaccccagctcagatcccaagctgtcaactgctccaggccaaacccaaatcaccaccctcattcagtcccctcccccattaaaagccatcccaccctagtctcatcttccacctcgccccaagaccatcccgaattccaacccgacgcccccaccccactctcctgtcccaggttgggttattctccatcaaaagtcctcctcccttgtcgcccgccccccaacctgcttgggtcccaccctcaccccacccccggccagcgcctggacaagtctcccccgccagcccgccgttccatcgcgacctcaaccccctccccccaacctgcacgggggctccgcagcctcccctctcattctcgccagcgccaccggcccagactcaggaccagcggaccctgtggcggggggagtctcctcaccggtgagcagctgcaggcgaaaacggcggcggcggcggctgaggcggcgatgcccttgtcttctccggaggctacggcggcgacgctctcgcccgtgtccagtagggtggcggatggcgcgcggggaccggagcctcctcctcagcgactcggctctgaatcctctgcagtagccgccgaggagcccgacgggtggggggaggggacgctcggctgcgggcgagggaggaggaggcggagggaggaggcgggggaccgctcagaagggcagggaaggaggagccggcgcggcgccgcgacacgtcccacagcctcagagcgccgggaccacaactcccggcatgccctgctttagcccgcgcgcggcctgcgcctcccgccgcgagcccggtgcagaggggccgcgccctctccggtcacggacagtggaataaagccaaccatccgctggcgaattttgtagactcaaagaccacctgtgaggaaagtcaggtcgcccgaggccccatccccaaggggccgtactcgcagcgtctccatcctctttgcatagacacccccctccccccgcccacacacacacacacactctctgtctctccctctctccctctctccctctctccctctccctctcgtctctgtctctggactacacctcccagcatgcccctcagcttcctattctccttccggacccttctcagacccggtactacagttcccagggagtgtggtccctgcgaaatgctgggagatggagttctcggttcttcctccatgttaagaaaaagaagtgaaagagaggcaaaagggaaggaatacgccagcccaccgaggatgggccttgatgggctagatcacctgtgattctgttcatccctcgccatctccgtttcagctgtctctcaccagaactaatgccggagcttcctcgctggtctccctgcaaatttgaggacgattcggcaacttgaatccaaacgacaaagggcatatcctcttcttgacccagctccattacttttaagaatttaccttaaaaagatgatcgaacaatttcgaaaagatgaatgcacaaagttgttatatgacgtagttaattatgaagggagtaaatgttcatcgatagggtgctgcttaaataagacgtgacatatacatacaatgcaatactaaggagccatttaaaatgatataaatctattgacatgaaaagctattcacaatttattcttcggggaaaaagttgattacacaacagcatgtctacacgagtgcatttatgtgaggtttgacacaatattctacaagcatggagagatttcaggaaagaggttcgccaaaatattagcaatgattatcttgggggaaagggtgtcagattgcacgtaggttttttttgttttttgagacggagtctggatctatagccaggctggagtaaagtgggggcgatcgcaggtcactgcaacctctgcctcccgggttcaagcgattctcctgcctcagcctcctgagtagctgggactacaggcgcgcgccaccacatccagctaatttttgtatttttagtagagatggggtttcactatattggccaggatggtctcgatttcttgacctcctgacctgcccgcctcagcctcccaaagtgctgggattacaggcatgagccacaatgcccgactgtaatttttgttttcatattgtttgaattgtttaaaaggagcacataacgactgttttttgttttcttttttgttttgttttaattgtaagagacgtcgtctcactatattgcccaggctggtttcaaactcctggcctcaagagaccctcctgcctcagctctcaaaagtgctgggattacaggtgtgagccacactacacctggacaattttttaagctgtgctacttccaaaaaacataatttccaaatctaacaacctttctttgctgcctagatgctttccatggcttcccattgtctcattcatgcttcagcactgtgcctgcctggttttaatagttccactattaaaacaaataatagtagtcacttccaattcataaagttggaagggagaattttctcaattttcaatgcgtcttctcaaaatttttccatttctggtctttccacacccattttctccttttctcttactcattcttcaaactcaagccaaagtcctaccttccctagaacatattttagacacactggttttccttatatctgaattcttttttgtttgtttgtt

SEQ ID NO: 914679 - DNA, 4001 bp, Homo sapiens
cccactccttgcgcactccttgcgacccagagcctgggttcttagcctctcaagatctaggaaacaagatctggtcggggtaagcagagagggggtgtccagggtgcaagccaagcccagagatctgaacacggtgaaaagaatcagatgccagacagaagcccctgcgcaagatgggtctgcctggggggttgaggaggagatgggagggggtaatggcaggtgaaagaacaaaagaggagggtcaggggaaggggtcaaggatggaggcccaggaccccagggaagggggccggtcctgggggcagaaacctttgcacaggtcccagagtgtttcctgtgccaggagagcgaagacctgggcccagcggccccgttcctcagcctcactagctgcgtggagccggtagacgcaggacaggcctgtgaggagcagatgttcaaagtcccaagtgctaagaggaggccccttccgcaggtcctggagctgctgcagccactgctcagtgccctccaagtcactgggcacgtggtgctgcaggaggagtctgagtcggcggcctgggtgtgtggacgctagttcctcatcctggatgtgcagctgccccatgacatccagctccagcccagcccagagcagctgcaaggggagccatgtaaggggtgggctgtggcctggggagcagggcagggagcaagagtgggctgggggaaggggcagaagcaggcagcaggacgcatgctggcttgccccacccaaccctagcaggtccaccctgagacatcccccttcccaaccctgagcttagggacctctggacgtgcccacccccatgtcccaggctgggaggaaagacctcaaacatcacttccggggcctctggctcctgcaggccacctcccacgctggtgctgtccatgggctgccctggggcagcagagaggagtcaggcccctgccatgctacaccatgaacaccccagcctcccagaagtgcccctctgctgcctggtagaggtcccgagtgcttcatcattctacaaaagggcaggaatgccatcccatgccctcctttcccctccctctcacgcacacacatgcacattgacattcaccctcccaggcataggtcctctgatctcaaaagcatcattccaagcccagttaccatgttggcaaatgcccaggacacctcctttaaattgcacaatgcccttgttaaagagctccaggccaacgggtcacaagacccttccccaccctcctcccctccctatagtcatctgaggataaagtcacctaaaacagtgccagtgactctcccaaggacaaagacctctttggaaagagcctactctccctgctcctcctcagcagtaagggagggaggaggaagacagggcagggaggacagagcaggggaggatgtgaggcagggaggacggggcaggggaggatgtgaggcagggaggacagagcaggggaggatgtctgtggcagctccgtccggcccacaccttggggtgttgcctcacccttgcaatgtttgttccaagcccaggcaggtcaagagaccctgctttgggcatcagtgggaatgagcccagggccagcattaagagcacctagggctatctccctaggtgtcacctgtacctttccagttctgggggtggggcccacactgtcacccaccacagcacacatcagcctggtacccaccatgcccacgcttctatgcccgactagcctcaaatagagccaactgttaactgctgtcagccagcagccttggctcctctccacccaccctgaagcctggtacctgcatggggctgggttgtagtcacaccagagaggagacaaatggctaccaccaggcaaaccaggaactgcagggtcgcagccatgctcaaccacgtcctctgagtctcactctgttcagcagttctctgctccctcatctgcctgccacacacctcagctccaactttccactgcgggctgctccagagctctgtaatgcgtgtcattcttcagtgctgaacagggaggggctggctgtggcctcggtcacctcccaggggctctttccatcctttagaaatggggaatctttggttgttggcaggagcctggctccctgcttgtcaggccctcagcctgttcctgcccagctgggcggtatgcttagttaataggaaaaaggtgtttggtagcaaatagctgtagcttggccctcccaaagggtaggaaagagctcaggcagtaagaccatcttactgtctgcgccctcaaaatatcctgcgactgaggccagccccgacacccagtctggcccagcccagcctccaaggagcccctcagctgccaaaagcatcagctgcaaagtcttccaactgcatggtgggctggctgggcggccccacagacaggcagagccaagcactcccctctcaggcactctgccgcaggctggacagacagatcagctgggctagggcgtattgtcccctggcagacagacaaatctgcagctcctgagtggtttttgccccagccctgggacctcttgtttcctagcaacattcttaattcagagcgggcacggtggctcatgcctgtaatcccagcactttaggagggcaagacaggaggatggcttgagcccaggagttcaagaccagcctgggcaacatggtgagccctcatctctacaaataaattagctgggtatggtggtacacacctgtggtcctagctactcaggaggctgaggtgggaggatcacctgagcccaggcagtctagactgcagtgaaccacgatcacactgctgtactcactctagcctaggtgacagaccaagaccctgtctcaaaaaacccccaccagcctggcgcggtggctcacgcctgtaatcccagcactctgggaggccgaggcgggcagatcacctgaggtcgggagtttgagaccagcctgaccaacatggagaaaccccatctctactaaaaatacaaaattggccgggcgtggtggcgcaagcctgtaatcccagctactcgggaggctgaggcagagttgcttgaacccgggaggcggcggtcacagtgaaccaagatcatgccattgcactccagcctgtgcaacaatagcaaaactccatctcaaaaaaaaaaaaaaaagaagaagaaaaaaagaaccccaccattctcagctcaggccagaaaccagggagattcctgtagcccaagagtgattggctaccatgccacacccatcctgaaccctgtggactgtgagaactttcagttacagctccagaatccctctcagaaatacatccatgcctgcaggccaccacgtctgcaactacactctttagtcccattaaaatagacctccggctgagtgtggtggctcacgcctataatcccagcactttgggaggccagtgtggatcatttgaggccaggagttcgagaccagcctgggcaacatggtgaaatcccatctctacaaaaactataaaaactagctgggcgtggtggcgtgcatctgtaatcccagcttcttgggaggctgaggggggagaaccgcttgggcctgggaggtggaggttgcagcgagctgcgacagcaccactgcactccagcctgggtgacagagcgagactccatctcaaaaaaacataaaagagctggtcacagtggctcacgcctataattccagcactttgggaggccgaagcagacagatcacctgaggtcaggagttcaagaacagcctgaccaatatggagaaaccccgtctttactaaaaatacaaaattagccaggtgtggtggcacacacctgtaatcccagctactcgggaggctgaggcaagagaattacttgaacccaggaggcggaggttgtggtgagccgagatcacgccattgtactccagcctcggcaacaagagcgaaacactgtctcaaaaaaaaaaaaaaaaacc

SEQ ID NO: 914680 - DNA, 4001 bp, Homo sapiens
ctacccaaggacaagcacaggaggtcagcagtggaccaccggcctcctccctcagccacaggctcacctaacaaagctaagcgaccagacggaaaaccgtcctgtaagaaaacacccaaatcagtaagtctcacctccattcttttcaatataggctttaattcaaaatgcactcaaggagagggaagggagggactaggacactgtttagaaggggtaattacactaaatacactgaccttcgctgaaaaatagaagggacaggtggctacagaagccagctcttaccccttttgccgtccccaccccataccccaaaccatcttggtttcttgactcctctggtccagtaagaacctacaaacgtgtttgtttgtttttgttttaacacttgaggttgtgattaaacaatccccaactcgtcttcatctcttttttctgaagttgcttttattaattgaatttttaaaaatctggtttcatctccacgtgcattttcccatcgttcttcagatttaggagaaacccacggaggcgcggcgctctccacagccgtctctaatgaagggaagcgtgcctcgaagtcagtcccggtgcgccccctcctcccccggcgccccttcccaaaccccgtcggatctccaaaggctggaataggcggtgcggctgtagcccgcgctgtaatcgtaggacacctgatggggcggcggcggcgggggcagggcgcagtctggaaagaagggggcgaaagaggccaaatggccccgcccgtcctccccgccgggagaatccgcagcggcggggtacagggggctcaagggctcgttcaaggtcaagccgccgcggggggcagtcagggggctctttttggtcggggagcagcccgggacgctccagggctcggggtacagtaggtttcccaccactgccggcggcggctcaaagaggccgggctccagctccgggggtccccgcagtacggaggctccggcggggaacacgtcgagaggctcggcggcaagcaagactgccgcctccgtgccggcgccgtagtcgggccccagcagctcaaagaactccacggcctccgcgcccttctccaggtcgcccaagctcacgtccggccccgacgggccacacccgccgccgcctgcccgggacggctccgtgaagaaggacggaggcagattgcgtgcccgcagcgggaccttcctggcccctgggatcgccgtggcccccgcggggcctgccacgtcccctcccgcgcccccagtgcccgcacctcctagcccggccgccggcgcagccacctcaccccccgccggctcggcacccccggggacgtggcgcagcgagtcgaagagcgcggccagacttcggctttgcaagctggcggccgcggcggcctgcgacgcctcccgccggggggcagccttgccgtgggccggggccgcgactgtcggggcgctaggggcggccagcggccgtttggctggcgtgtcggcggcgctcggggagggcgggccggggggcgcggcgcccatgaggccgctgcagcgcttgatctgcttctgcaggtacttgcggtggttcaccttccgcttcgacttgcccggcttgtccagcgccagcttgatgttgctggacgccgagtcaatgaagctgagtagatcgcgggtggcctcgcgcacgtcccctccttcggctcccgacagcagcgcacccgccggagccccggtctcatcgtcctcgaaacagcagcccttgtccagggctccgaaggcgccccctagcccgtccggggagcccccgaagccgaagggcacgaaagggtgcgtgctgaggagcgccgcctgcaccgccatcgccgcggctcccgggctgtccgcagcgctgcccgtgcgcccccgccagctcctgcccgccgcccagacccagctcccgccccggcgcggcgcgcgcggcgcagcctactagttccgggcctggctcgctgcgctgcctcccgggggagctcattaggtcttgtaagcaaggggcggagggagggagcgcgcggcgaccgtcccggtggtagaggggaggggcttacttagcctggcttggaggagtggggggtcgctttagttttctgagctttctgaagctcaacgccttaactccttcgtttccctttgccccgtggtgtttctcttgactcctctaaccgcaaggggtgaggaagagatggctggtctcaaactccagttcaggcccatgaggccgctgcagcgcttgataggcttctgcaggtacttgcggtggtgcctctcctgaggcaagaaggcaggagtctagagacgtgggtttcagtccagctgtataacaacacccaccagcttctgggcgcttgcttctgccaggcgctgtccatctattatctcatttaatccttgaacaacagccctgtgaattacatgttatcgccattcaacaaacgtggacactgcacctcagggaggttcagtgagttggccaaagtcagatctagcccattctgactccaaagccattcctaagcccttgacaatacttgcgtcctctcttgcccttgcctttctcatctattaagatggggaaggaaaatgagtatttcttaaagctctagacctgatcctaagattctaacctgagttttcccaggattctcaagcccagtgctctttcttcttgactgtttgccacttgattgttacgagtaacaattggctaacagtaaattgaggccagcagtggcccatcttttattaacacatagcaggaggcaatggagaaaggagtcgatctggctaagccccctgttacttgagaacactgtgtgtgtataaaactctcagcatgttagaataaaagatggattggaacctctcccctacctgtcataccatttaggttatccctggaattttcattgcatttcagggatcatcatgaagttcacttaaaactaatttcacctgggcaatcctctttgggatagatagagaaaatgagcaataaggtcattttcacaagagattcagaagaggcttgggttctggtcttagccaccactcaataacctcatgacttaggttgaaatccttgctctgctgagtgcatggctttagacaaaccagcgtactctctctgtttagcttactcatgttaaatgcaggtaaagttgccctccccacagggcacttgtgatatttaaatgatacattgttccatagcctggatgagtattcacccttacttctctgaaacacaaaaaggtgactatatcccttacgtgtcttctggatcatagggtgttcatgagcattaagtgagatcatagatgcttctcaatttgtgatagagcaacaacatcctgataaacacattgtaagttgaaaatattgtaggttaaaatgcatgtaatacactgattcaagttggaaaatcataaagttgaaccatcataagttggggactgtctctatatgaaaacactgtgtgtgtgataaagtgttctctaaataagttactctagtttcgatacagagcttgcataggagagacatagaccatctctttcaaaactctttttattaagcctcactttgtagatgtagcgaaaccatttttgaacaccatgaaggcacagccttaccaaagaaaaaaggccagatgggccatcagagaaatacaaatcaaaaccgcaatgagataccatctcacaccagttagaatgacgatcattaaaaagtcaggaaacaacaggtgctggagagcatgtggagaaataggaacacttttatactgttggtgggactgtaaactagttcaaccattgtggaagacagtgtggcgattcctcaaggatctagaactagaaataccatttgaaccagccatcccattactgggtatatacccaaagtattataaatcttgctgctataaagacacgtgcacacgtatgtttattgtggcac

SEQ ID NO: 914681 - DNA, 4001 bp, Homo sapiens
cacggatttttttcaaatatacaaggatattttcagagttgttttacccaaattaacttatgacaaatgtttttatacatttttattgcatattactttttgtaaacaaaacatcttaatgtttcctatatagctccaaaatcttcacacttgacactattactgcacagcattacaataccagtgcctacctaaccttccacttggctactgtccaacattataatgcccacacctatttatgaagaaattatttgttcttttctgaggctactttctgtatatactctcagagtggaactgttaaaaatgttacgtactactcctcttctatgtaacaaattattagattttcaccttggaaggcagttggtaacactacagacctttcctcagatccattaaggctttaccatttttttttagtttaacataactgtttacatttgcattttcattagcaaggctgtacattttccatgtagtattattccttctctcatataaagtctaactgtaaattaaccaccactggtttttttcgcaacattctctctcccaccatgtataaaaggtttacaacttaaaatttctggggctaaaccattttttaaaaatactttcataaaaacatgggattacaacccccaagtattccataaagacaacacttgtctttaacagtcaaaaactattcagtatacaaacctctcttgttgaaattctgatctgcagtaagtacattttacaataggatgtgcaatccgacattcctgtaataagacaatacattagtcagtatctttctgaaagtcccaaatctcacttttctggtagaaaactgtttacccaacctagtgaaagtctaaaacatttataaaacctggccccaacgtaaagaactggatgctttatcatataagtggccaatcacaatataattccttagggaaggcacaggtgtctttgtctttagtagacgtgggggtatattacagacaaattaagaaagctgtcagggcctatttcaaggattggttaaatgtgaaactacttattattttgcaccgttgctcacagacagcatccaggctttaatgggatgggaggagctccaaatcagagcattctgttcccaaaccagtcgcttcgctttcctggacagggaagaaggatgccatcagctttgcggcttcgggttcctagcaagaaagtgcaaaaaccgtcccctgcctcctggtggaagaagaggacagaccaggcagaaaaccgagatgaaaacatctccacccctgggtctctgcggcatagacaggtggctgcctcactcaaccccactcctgagacccccagacgctgacggggcccggcaccctcctgggccgcctggaaaagggcacgattctgcctccctttcagggtccgttcccagctaatgttcaagcccccagaaaaaggggtccccgagtggggaggcgagggctccagactcccaaacccctgaggcgccggcgaagaggggctgcagtgcagcggctacccggccccctccggctacggccgaggacacccatcccgcccgcctcccggagcccacggaccttgcagagctgctggccctgggagagctcctcgaaaggataacgctgggtacacttggtgcaggcgtacagggccgaggccgccatcctgctcctcagtctcctcctccgccgccgcccgctccgaggcggggccctacggagaacccgagagccgccgccgcccgggccgcgggctcctcctcctccccctccccctgcctcgcgcccaccagggcctcgccgcgagagcccagggccccgcggacgacgccaccgtctccctccgcctccacttccgccccagcccacccagtgacgccgtgccagccgctcccgcttaggccccgatagcggcggagggagacgaagcgggtagggggttgctgtttagctgtgcggccgtggatccgcttccttctcggcctccctttcccatccctgattggctgcgaaggctatcgcgtcattcgatggctcctcccaactcccaacttccgcgacgcaggaagcgcccacaaagggaggatgtcgccggccaatgacatcccggagctctcagcgcgcgaaatccgctttgaacctgccccgcccaaaggtctgcggtcgcggctatttctaacagccagtcccaggtttggctgagagcgccccaatccaattgagcaaatgttcgcgaaaggctcgttctctgccgcaactttttttcccttgctttctattggactaaatcgttaagtccctcctaatcctatttgttattggccaaaaggtaaatacttcacctggagaggcgtccccgaggcaaattcacgctctctccggcgtttaatccgagggaactcgtggagtgctttaacttcgccttcgcttttgttttatctccattactcccttcagttgccactggcgacaccactactcgcccacgcttcttactggaggaggcccgaccctccgtagaatccccgcagagccggcctgtaaccccggcgttgtctgccccagcgggccccgttacgcgctaccttgtgacgtcaccagggaagaggcggattctctcctactacagaaagacgtctgctgttttgattggctaggaaagacgtccgttaggacgtgttgccctttctgtgtaagctgtgagcgtaggcggccctgagggggtgtgttgcaggggtttccaagcccagcaccagcacccttgcccttttccatcaggggttcagcctagggtccccgctggtgggcggctcccgagtcttggagaagagcacgagaacctagaccgcccccgaagtgcggagaccccctgggcaggctgaaagatggcggcggcgtctgtctctgcggcttctggttctcacttgtcggtaagaagcagttggcgcgagtgggccccacgtcggccctaagcgcctctttgagtttcctcacgtttcagggcgctgtcagtccagcttctgacgcaattctggaggtcggcgggaatgcctagattgccccgcgctccccaagcttccattcactgtggctgtgtcgaagctgcaccctctggctcccagtgaaactgggctggccgcccctgttccccagcccttattcaccttttggcgtagcaaccaaccccggttgcctaacattcccaagggccggctgggataactgcccactccctggcctgcaaaaatgtagctcttttggtcacgtgggttcagcggcccctctaggaaactcgccagatcaggtgaggcgcgccagtgtgtttaagagacgttgcagaatagtagtccgccgtctctcgagcgcttactagtcgttgcttatgctgtttcctatccctgcagtgcctcccactcccatccacattaacttcgttgtgtgatgctcgtagccagaacgcgcgcttcctgtcacctagaattactggaacttcaatgtggaaatgcccttttggagaggcgacagggggaattgattttaaatattgttttcgcctcatcaaatgtcaccatccagtttagttactggtattcactggtatttctcaaattggagtgtcgaatgcttaggtttttgaaaaccgcggcattggaaagctttgataggaagtaaatgttggagctcttatttctccagttagcaaatgttcgatgcctggtatactgttagggtccaaatgaacagaatagaaaccctgctttgaaggagaaaaacactgaagagaaactacacgtaattagtgattactgcgcagtatagtttaggaagtgctaccgtagtagaataatctagaggggagtgattaacagtgcttgggtaggctagagaaggtttcctagaagggaagatggagctagttgcgtgtcgaaggaattgtgattgcttgtcccaagagtagagaaaggagaaaaaggcagt

SEQ ID NO: 914682 - DNA, 4001 bp, Homo sapiens
actggtcagccaggaattaccagggcagccatggcaccaaagtttgatgggcttgccatctgagtttaagtggaaatgcagaatgtgcccataccagcctgggttacattgtcctcttacagggacctcaagcccagcagcgaactttggctccagagttagccagactgtctcggctgatatgtgacacagggcaaggcacttcattgcttcagagctccttccatgccataaaagaccctacaagacctggtcctaatccctctctctggcctgttctccctcgcctctggcccaccctgctcactccactccagccacactggctgccttgctgttgttcctcaaccacagctggcttgtttccaccacaaggcctttgcatatcctgttccccaagcccttcccatggctggctgcttcaccactcaggccccagttcaaatgccacctctttggggaaggcttccctgattccccgactttggtgactcttctccccagttgctccattcaccatttccctgttttattggctttaaagccactctcatctggtcttttcttgtttattcatttatttgttaattctctggctctcccatgcaagcagagcctcatctgtcatgggtactgctgatccatggtggctggctcacggaaggcatttattaaacattttgagactgaataaaaacactagctaacaccgacatgcatttatcatgagccaggcactgatccacaggcttttgtactcaaccctgacgacaaccctaagaggtaggtatcattatatccctcattttattaataagaaaacaacagcacagagagatgcagtcacttgcccaaggtcacacagggccagggcttgggccaggattcgaagcaggcaggctgtctcctgggtgtgaactctcaactactgcaccctaatcaaacaatccctctggttaaatgtgagtgataataatagtacccacctcgtgggtgttgagggtgagcccaagttagcatgcagcgcgggcatgtgaacaattatagtcaatattgaatggagacctatgatgcttttatgaaggtttctattttgggttaaaaatgcacaaatttctcctgaccagaaatgatctctgagtgctaaatattttatgtcaatggaataacccaaatgattaagcaacacccataaaatggggcagacccagggaggaatatatatccaaactgactcatcccagtgagctcaccgcacatgaattacaaatggggccaggtgcattaagcccctctactggcagaagggaggctgctgcctgccatgggcctgtgctgagaatggcaggtctccagggagaggagaggccacccccttctctgtctcttccatcacaggtgtgaaagcctcagcgcatgagctaattctgtgcagtgctcgacatacagatgagaacactgaggcacgagggacagcctgtgacctggtcaccgcgctcagtaggacgtggttacccgcggtcctgagggcgctgactttttagaatgggcgagggcagctgtgtcccagtgaccagaaggattactgtctttaaaaagtcgtgaaaatgatcgtgaactgtaccccacaacgagtgcgcgtgtgcctcccaagacggtggagaggcccccagcttacgccgccagcccgcggggcaagaagggtgcgagcgactctggccaggccccagggacggggaccgggtcgcgcggacctgaccggcgagagcccaggcactcacgtggcgggagcgccgggggcttcagcacggagacccatcccgtctgcccctggactcccgcgagccccgcggacctctccgctagccccgccgcccacctgccagcggaaggagcgcagggcgcgcgctgccaggaagcggcgcttgaaactctgcagcaagagttcgctccccgcgttctcctcgggcgccatgacgggggcggggcctcagccttgccgggagaccgggcggaagccgggcctggactgaagagggggcgggcccagggcagtgcaccggggcagagagggggcggggcctggaggtagagtcgtgggggtggctctagggcggggccaggatgagagttatgaggccggggcttggggtggggctaggatgagcattatgagggcgaggcctggggtagggccaggataagtgtcgttggggcaggtcctcgggagagttcaggttggtgggtcctggggcggggccaggacagggcgatcctggaagtggggcttcggaagcgtccaggttggaggcgtcctggaggcggggccttgcatgggggcaggataagattcccggaggcgggcgttagggtggggataaacaatgattgggttcaggaggcgagactcggagcagagtccaggagacaggtcttggggcggggctaagaccagaccaggagaagcgctcaggaggcggggccagggcggggcgttggctatgtcgtagcacgtggccaggcgctgctcggactctgggaggcggagcttaggacgggccgacgtggggaggggcccagggtccgggaggcggggccgagtccgggctgcgggctgcgctcaggaggcgggccctgggaggcggagcttagggaggggccggtgtcgggagggaccaagagactgggaggcgggtcggggctgggctcaggggcggagagggagctgggcttggggctgggccgagacggagcgaggggtccaaggtgtgagaaacggggaggggtttgaggaggggattggagtgtggctcaagttcgggaggcgttacctgcggagggtttgaggcaggcccaggagcgagtccacggtctgccgactcggggccatggtcgggccccaggatccggagcttcgggcggggccgagtccgggtttggggcccaggaggcggggccgttagggctagggtccccgggatcgtcgggtcaggccttgggccaacgtaggcactctcacagttcctccgccttcaggaaggtctttttggcaggggccttatgggtgcgcgcttcggtcctggaggccttatcctagcctcctctccatcagcgccacccgtctggggcccgataggagggagctttccctctgtcccctagcctttggactgtcaccaaacaagccattcgttcaccaaatacttattaagcgtctaccatgtgtctggcaagggatatgtaacagtgagaaaaactaggtgtggtccaggccctccaggggctcaggggctcgtggaagaagtggacattgaagtacttatcacacaaatgagtataaaagtacaatagtgatatctgccacgaaggcgagcagacagagctagcggggcttccaggaggagttttgatcttgcagggacaggaaggaggagttagctcctggggggcgggattgggggtggtggtgatatagacgtggggtcagagtggaaaacaacaaaaatataattattttagttcaaagttattgtgtcttgagttgaaaggcagggcagttagcaacacagttcagatttcagtactgcccctgaaatctgaactgtgttcaaagtctaaaacgtttaccttagcaaatccctcataaaactccatttggaagagtcccgagagctaattttttaagtatacttgcagaaggtagatgaggagacagattaaatcttattacctctttcagatgagaggcacttgagccctgctcagctgtgagaataagagaggggaattaattctaattgaatacacgtgttctctcacagctgttgttccccaccagaaccaaatgagcgcaagatctgacaaagaaaaaaaaaaggttcatcttttattcccccaaacactttcatttaaatcaagagggtgggatgtggttattgctgtgtttttagacagaatcaacagtttctgggtctgagatgttgcatacaccctctcagtcc

SEQ ID NO: 914683 - DNA, 4001 bp, Homo sapiens
gcgcccccagccccgccccggcgggacggcagggccttcactcggcgcggggcggggggggagggggtctcgggcgccacctgctggcagagcgcggggccgcacctgccacaaacaccgcggtcttcccgccccagagccagccaggcagagcacaacgacgctgagtgtatttatttatctacgcgccctggagaccggcccctaaatttaaatatccagcacggggccttggccctcctggccgtgggtggttattgggacgggtcctggagcccttccagggcagaggaacccagagcccggaggtgggatgcccctgagccagcagctgccgatagcaacaaaaggtgaggaggagatgggagccaggcactcatcccaatcccagagacgccaagcggaagggaagatgcttcgggccccaccgcaaggctgagggttggccaagctgggggtgcacacatgtggaagaactggaggcccagtgccatgagcagaggctgtaccctagatgcccgccccagtgccagccaacccaagacaggagaaagagtttggcagtttcgcctctgaggaatacatgcctggccctcctgtgaggtgaggcggtaggggggaaggcgcaggctccgaagtctgagggcttgccggagggggagtttctgagccttttgcatgggtgcatgccccctgccccccagcccttcagaggctgatgtggaaggcatcctgcagccactggtcacgggcattgtgcgtctggggcacagtaaggggtggcgggtcaggaggcaggctggcatcgggaggctcctcgtcgtcagacaggcccgcatccggtgggtaggagctgtccgaatggagggaggatgacaggtcctggcagaagctcaggtcttggcacaggtgtttgtagtcctggattgactcgtacaggccccacagctggcacaacaaggacatgtccaactgccgcagccccacctgcagacaactgagggtgggctggagttggggtccaggccaccccagcccagccccgccccctggaatagtgggccccagcccatcttccccgcaccttcctaaacgaagtttttgtggacatcaggcaccacctgcaagctatgcaactttagtcatgaccctcacccaaaaaatggggttatccatttagccggatgaaatgaagtaacgtcagcaaaacatttgaaaatatatggtaactactgccataattggtaactatcactaattattgttaccataacccttgcaacccaactggtgcctgcaagtcctctgagacccaggccgcctgtcccagtcccctgcgttcctccgcgtcagccccccgcccagctggcccggcgcccacccactcaccatctccttgcgcagcgcggccagcgctgagtcgaggttgacaggacgacgcgggccggctgcgggtcccgcgttggcggcgccggcggcgtggcggggcccgtccggggcgcgggcggcgcggctcagctcgtcgtggatgcggctgcgctggctgtagacgcgctccagctcccgccacgagcccccgctcgcattaaggaggccgctgaggccgcgcggcagcggtgggagcccggccaaagcgcagcccgccccgcccggcgcctctgccgagggcagcccgttcatggccggggccggcgcggacggcgatgccacctccttccctccaacgctccgcccgggccgccgcccgcaggccccgcaccccgcggccccgccggagcccagccgccgcccgcaggcctcgctttgttccttccccagctcctcagactccgcctctgccccaccccctctggatgggccgggcctctcttaaaaaggcaacggttgtgggaccacgtcgcgcaaagctgagaaaaggcaacgggacatccactcactcaaggggagatggaaaaatgcggcggaggggggaaaaggctgaagggggcaggcgtggtttcttcacggttctttttgctaccccgtctccccgccgcgccccgccccgcccccacacccaaggaaaatgatctaacagtggagtcaggagactggcaagtccacacttggtgcctaacgtgccacctgacgctggggtcaccacaaactcctgtcggtgtctgagtacctggggtgggcatgagatgggataggctgatagggtcaggatgctcaggggaaggaggggaatctatcaaggggatcggaacacaaaacctcacttccaggtggggaatggacaccagatggcggaagaggctgcagaggtgctgccagagacaaggctagggtccacccctctggctgctacctttgaaaaggctatggcttcttccttagaaaaggggcatcacatagtcctctacctactccctcatcctgactggggaaactgagaagaaacaagctcaactcatctcagggcgtcaaggagagcagagtggagaggtgaagaggccaaaagctggaaaaaggtgagtggagctggggctggcatgcacacttggaaccaggaaaaaaacaaaccacacagaggaacagctgtttttctagagggtttttctcaggggcttctcttagtgctgtagctgctgcaggctgcgcagggcctccgcacatgcgcggataaggccacacagctggatgctagtctccagggaggtgctagagcccagttcagcagaggcccaggtcagcttctgcaagagggctgtctgtgtgcaggccatgacatctgtatttggaggcacagcaggagcaggtggcccctgggctgccttgagtcctgctgcagctccctcacagtgctccggacgaggtactgggggctggggcgcaggtcgagagcccagggggagctctgaggctgaggccagctggtgctcccgagcttgggagagggcagcctgggcattcagagctaaaaagaggagaaagtgggtggaatggtcaggatgcctggcccacctcagccctgagccatctccttttctgctctgctctttctgtgcttgaggtgttttccctgtccctctataaggcaactcatccactttctactttgtatcacatttatgccctagcttcaattctccatcagtactgggcctggttgagctcagactctcgcgcagtggctggcacacaggaggtgcttggtgctcttattgagttaagggtcctctttagagcctaaaggagaaataattttacttctaccccacccagagactccactgtcacctctcagccctactgttctcgggcctctatcaccacttaaccacgcttcccccctaagcatatccggcccctctcccggattattttttactcttaccgggattatctttatccacgtctgagtcgagttcctgacaagccacgcagtagattttccgctgtttgtcttggaggaggatcgtctacggaccaaaaagcacacggggccggaatgagacgccggcaatggggtccagaggggagggccggggaagggctgagtggcctggcccgcggacccatccccggtcactcgcccgagtctcgcctcaccccgcagtccgcacacgtctcgcccagcatgcggtaaccgcgcagcagatagtcgcccatgagccgggagatgcgatcttgccgctcccgtcgcgcctgcagcaccttcgtctccgcctcagtcgggggctcccaggagaagtcgtcgacttctggggaagagaggcatagggactgggggtcttgccggagtgggctgcctcccgtacctcacagccacaaacccctgccgcccaggtcctcaccagctccgttcagggccatgttgccgttgtcaccgccgggctcacaggaagtgacgtcaaagcggagcgccctccgctgcggctccgcccgttccatagctgccgcggatcagggcggacgtgacgccttagcgtggtcctcagacctcgctgtgcccgggg

SEQ ID NO: 914684 - DNA, 4001 bp, Homo sapiens
aaattagccgggcatggtggcctgcgcctgtaatcccagctacttgggaggctgagtcagaattgcttgatcctgggaggcagaggttgcactgagcagtgatcacaccactgcactccagtctgggtgacagagcgagactccatctcaaaaaaaaaaaagtttgattcttttatcatcaagcattaatttaatatccaaaggcatatattcgtatttactgtgctttaaacatttgtctgtgcgtcaatgctttaaagggacatactatgtggtgattcattttcaaagtaagaatttgcagaaaatgagaaacaaactttctgaacaatacaattttaatgcatactaaggctggttaactggttagaatactaggttaacaaggccaaactccagataggccaacagcttttcaaaccaatattcctgacactgccaggaataaagaaaactcttcactactgagggagggacagaaaacctagaaaaataaaccatactaaaagaaaaagggtattttgtttgtcactttaaagctgctttttctttaaacggtacacatattttcaacattcttacaaatgggccttctattaaaaagcaaactattgctaattccatggctttaagtggagtacttccaatcacttcctctatccagaaaatccgtgacactacatgccagctactttgcatatttataactgtttaataaactattcaaaattagcatctaaaataattatactttggacacacgaaggcatatatttggtgagaacattgtaattttcattttgtaaactatatattctatattcaagtaataacacagcattgcctatacagaactgaggcctgcgctgagacccaaaacttgtcttttcctaaatgcaccactacgaagagctaataagaggtctgtccagatgctaagaccaggtacttcaaaatctccatcctgcgctttacaggtctccagggcagttagaactttatctttcagaggtggaggggcctgacagaggctttgaaacctattgtgcaactcctcccagggcacatcttgggactcagttccaacccaaatgcctttctgaaggtcatagtgcaaacgttgaccccagtctgttagcagacccagatagacaggagacagcgctgggtggcggctagtcactaaagtcaaaagcccggctgggagggcgcgacaaaaggcagcaaagacttccgaattccccagaagccagtggactagcacttggctcccctctccaggtgatttgtggatgccgggttccaactcttcttggggccgacgagacaaaggcggctgcaacagcgccaccgctatcaccttcaggaagttgttctgaggcaagcgctcccacaggctgctgagaaacctggcgggacgctccgcttcggccttccccacctcctgcagacgctccagcagcagctccgcctgggtcttcatcagagagtcctcctggagatttgggttctctctatagccattgaagcgcagcatgtgcaccgcagaccgccggcgggcaaggcgggccaggctctcttggagtgtctcctcatcggcgtcccggacgcccgggccgggaaagagttgctgcaccaggtggtaacgagctgcatccccgagggcccggttctccagcaggcgcagagagagcaggacgtcacagtgaccgagggcctggaagttcgctaatcccggaactggaccccgcccaaagccgccctcttgcctccactggttgtgcagccgccgctccagagccgtgcgaatggggccatgccgaccaaagcgccgatggatgtggcgcaggtagcgcgcccactgcaaggcccggcgcacggtggcggggtcccaggtgctgacgtaggtagtgcttgagaccgccagaagctcggaaaagcgatccaggtgctgcagaagggattccatgaggtgcgcgaaggccctacttccgctttcaccttggagacggcgactctctgcgtactgattggaacatccgcgaaatgatacgcctctctgcaatgctattggtcgaaatgcatgtcaatctcccagcgtctttatccgtgttccttgactctgggcaacttaaaagccctaatacttttactttcgccacacaaagaggttcttcttagtggagggagagcagatgtagggcatcctaccgagaatttccggaaccacgtgcgagatgatgccagtcatgaacgtctccgcgcttcctttcgctttggaaatatccttaagtagaaattttctgagctttgcctaaaactagaatctgtgttgaggtttttcaaaattaagtaacgccagagacatactgtgacgtgaggaaacgctcttaaatgaaattttaagatctatttgagaaacatgtactaaaaatgtactgacctcctattaatgccaggcgctatgctgaattctgggccttcacattgtccttccattattagaactgaagcccagattatttgaaacaaaaaataaacttcaataatttattaaaatttgcaaaggaacaaaattttacttcacaattgtacatttcgttttcgtaatttttaggacaaaatagcttaattgactcttctgtcatacaaataatcagctgaaggaaatggcatttaagagcatcgaacaataataaatgtttgattaaataaaaaccgtgacaagagagtagggaggagaaggtcctatgtcgctcactgatgcacttaacaaacatttgtcaactcctaggagttgcattctgtacaaaatgcacaacaattcttacttaagttcataatatagtaattcatttgagctgaatttccttccagtcctaaagacacagccaaaactattcgaaaagtgggggaaggtgttttgttttgtactttaacaaaaaggggaagagaaacaaatttaaaagaggggaagagtcatttttcatttattaaaataagcattcctacaccttttagaaagtaaagcagtgatgtgcatgctgttaattcagatttatgcatttatttatttattttgaaacggagtctcattctgtcgcccaggcgcggccaatttttgtatttttagtagagatgggatttcaccttattggtcaggctggtctcgaacttctgacctcaagtgatcctcccgcctcggcctcccaaagtgctgggattagaggcgtgtgccaccgcgcccggctattatttgatttttattagttatctcaaactcttacttggtcctgaaatcgttattttattttatcctaaggatactatgaatcttaaaattctttttcttggctactacaaacttagaaccaagtgtgcagcctgcctttagcaaatgtacaggcatcactaattcatttatttattcttatatttaacacctattatgatacatagtatgaggtgctacagatttagtagtaaaataaatgcagtcctagcatgagtggagaagttcatcttgtaccatttaagagagacattaaatgaataacctcaaatgtgatagtaggatgaaattgagtggggtcaccaagtcttaggggataggaaggtctctttaattactgacttttcaggccggaggcagtggcttatgcctgtaatcccagcactttgtggggctgaggccaggcgggtggattacctggggtcaggagttccagaccagcctggccaatatggcaaaactctgtctctactaaacaaacaaacaaaaaaattagctgggcatggcggtgcacacctgtgatcctagctaatcgggaggttaaggcaggagaatagcttgaacccgggaggtgaaggttacagtgagctgagatcgggccactgcactcctgcctgggtgacacagcaagactccatctcaaaaaaaaaaaaaaaggaaaatggaaaaaaaaaggaaaagaaaccaacttttcagttgaaagttcaaa

SEQ ID NO: 914685 - DNA, 4001 bp, Homo sapiens
gcctaatacataatcaaactccagaaaatttatgtggaatttttatggataaatttatggaataattttggccggcgcggcagctaacgcctgtaatcccagcactttgggaggccgaggcggatggatctcttgaagtcaggggttcgagaccagcctggccaatatggtgaaaccccgcctctactaaaaatacaaaaattagccggtgcggtggggcatgtctctgtagtcccaactactcgagaggctgaggcaagagctgatcacttgaacctgggaggtggaggttgcagcgagccaagatcgcgtcactgcactccagcctgggcaacaaagcgagacacacacacacaaatttataaaataaaaacaaaacaaaacaaaaattataaaataattttatggaaaatgtatggaataacagggcctgggtggggtggctcacccctgtaatcccaagcctttgagaggccacggtggaaagatctcttgggccgaggagtttgaggctggaacgagctatgatctcgccactgcactccagcctgggcgacagcaaaccctgtctctgtttactttttaaattaatttgaaaaaaatacatcaggattgtacttatacgttaattctcacttgtattactgtaagagatcttgcatcatttttatgctatattacacatgcccaacatgacagctgagaaactcccctggagggcagattttctgagagtatcttctgatgttgtctttaaaccaacacttttttttttaacataaagaattaagggattcctgactgccatctagtcaaaagcaaacaatatgtatgccattacttcggagggagtgagttcttgtgctgctgaggcaaaacgagatgaactgtcacagggatggcaggaggggtggagtgtaggaggaggatcagccccagtagtgagaattaaaaactcttttgagtatttggccctccactagcagtaaattaaccttcaaacctgaccaagacactacctgagaccctccactctccgacaccgcagaatcagacaactgttcttgctcaactactcataaaagattcacagccttcacctaccacacataaatctaccgcgtttgctgcttgtatactttgtcctaacagaccaactaatgccttctagtccaatagcctcccgtccacacctcacataaaaccttctcagccaccttccggtttcagtaggtgcctcttactccagatccacgtgtccccagttctccagagaccttcaccttcaaaacccaagcccgtccccccttcactcccagctgatctccacccaggccctatcaatccttacttctaataggccaaccacactccccggccccgcgccttctccctcagcacccttttctgagcatcacctatttcccaccactttcttcctccccagacccggaatcctgcaatcactaggcctccctttgccgctaccctcccgcgagcacgcggagcccgctgctcggctaaccaccccgccccaccttcgccacctctagcggcctcccaccccaggcggctccccgggctccgcggctgcaaaccaggccccaccgtacgtcccccacgcggtcccggccctgtgaagggcggcggcggggcaaagaggggcagagaccacccggggtgaggcgggcgccctcacttctgggcgtacccgggcgggggcgggggcgggacggctggtcggcgcccccgcctcggccaggcctgcagcccgagctcccgcaaccacttcccgagccaggcgaggaggagcccgcagcccggccgctcccgctggcgcacccccttctcacctagacgcagaggctcaggcctcgctctcccactggccgtccagcaatagctgcgccgccgccgccgccgccgtcgcgctctcttcactcgcttttccaccgcccgcgaccggctgctgaagagcggacgggcagtggcacgcccattggctgaggcccgcagtcgcgtcagccggccccgaccgcacctcgcgacgtgactggctggagcggcgcctcttttcgacatccgcttttgattggctctcgcgcacacccttatccgcaggaccagtcatcctcctccctgctttagcctctcacccccaacccggtttccctccgggcgggagtggggcgggagcggacgcccgcggaacgcgaacggccaatgggggcgcggagagagggccgggaggtgggccctgcggccgggaggctcgcgggggaatgctcagccaatgggcccgcgccccacatctcgagtcctggagcgcccccgccggctgctggcgtcctgtcgggtcgcgcccagggccacgcccggctgtccgtcgcgcgggaggggcgccaactcccaaggttgggagcacgcagcgaggcccgcgcgggagacagcggggctgccattgtggcgtgcttagcgctattatggtggggcccgggggccctccggccattgctgggcgtgagggatccgttcggagaactaccagcttggcgggtgtggcccgggtcggtgagagcgaagagctctacggacccctggagcctccacgggtctcgcccagtcccaggggactgtgggcccattcattccaccttccacttcctccaaaataattccctacaaaacttaccggtagtgataggagttagaataacgtttacttctgaggggtggggcacgagggaacctatggaaagctggaaacattgcgtcttgatcctggtggtcgttccgggctgtgtacacatggaggaattcatcgagccggacacttaatagtattaccacattcatacggctcatttttaaaaaataataaaaggatcatgagaattctgtaataatattaccacaatctttgggctccgtgggactccattgtataaacagtccgcattaggatttagctgtcattcaaaacatgcaagccataggaagaaaaaaaaagatttgtgagaagcaaaaatgagtgaacgctcttggcacggtgaatagcatgcacaggttggtatttagggatggatggctcagagtgatttttctgtggggatttagagcttgtttcagtgcctggccctgttagtagctaaaagcagtcatagtgctgcatccagttggaaactacaaaagctcactgaactgcctactttgtggcagatgttaagttctggctcaggaaactaatttgaatgccatggcttctgcctcgatgagctcacagtcttgcagcaagtactgtcatttctggaggagggcacagaacacaaagctaacacacttgcttaccctcagggatgtcgcattccgctactttaggcaagacagtgtatgcctggaacccatccagtccaatagccatagtcataaatagccaggatcaggtgaaacacttcttagaagtgggtcaaaatattctcccaaaacaaacgtaagaactatggaccaaattctaatctgtaaaagaacacaagcaacaaaacaaagattacagtattcatatttattaatttagtcattaagttgtttaaatcaggtaaatgcctttatttaaagtgcttgtcactacactaggcatataaacttggatatgacagtattccacagaacatagggtttaatggagagacagacataaacaatgccagtgtaatacaggatgagggaatacctagaaagaggatgtaacccagcatgggggattcaggagcatgttagaacatgtgtagctaagttaaccactgctaaggtttatcagtatactgatagggtaatatcactataggaaatagacactatttccagaaaatacttcataaactttttgttgtttgtgcatatgtcttaattttaaaaattgatataagtacaaaagcaaagtaatgcttagttctgaggaaaatatgatgtaattattaagtaatcacttaataaatgattct

SEQ ID NO: 914686 - DNA, 4001 bp, Homo sapiens
caagattctctccatcagttgctgtaattctgagggcaaaattgccatttttaatgccagaatttgtcagtgattttttaagctgtaaaacaccagaatctgggtttaaataaaagaagccaagttcatttccagaaatgattttgtactttacaagttcaagttcatcgatatcgatcgctgagactgctgtgatgtgaccaccaactggaaagtcatatgaaataactccctggcaagccactttttcaaagagagggctgttgtcgttgacatttcctattcgaatagtcacattgacctcactttcatggcggtatggtgaaccccagtcagaggctctaacaatgaatctgtaaatttctggggaggattcaaaatccagttcttcagttgtgctaataacacctgtaaactgattaatgacaaatggtaacaaattcaggctagcgatactataggtgatgtacccattttctcctttatccttatcagaagctgaaactgttagaacgctggttcccactgggacactttcattcacataagcatcatacagtggttgctgaaattctggggtgtggtcatttgcatcttctatgctgatggtgacctgtgcttttaaatctccttccttgtttgtcacctccagtttataaacctccttcttaacagtattcagtggccgtgctgtaacaatcagacccgaccgaggattaattttaaagtacactgcatcctcaccaggagataatttgtattccacatctatcggttcaggacttaattttactatagcaaccacgacaccaggaggggaaaattcacttatgctcacatcgtacacttctttttcaaatctaatggggacagtgtctcttgtggggttgccaatgtagactgcctttaatgctgaacatttttgaggagatcccttgtcttttgcttgaagagtgagattgtagccatagggaaagctctcccagtcaatctgcttcctctccttaatcttgtactcattcaaccactttccttccttagccaggaagaactgatctaaaggatccccagccacaatggaaacagattcgatctctccattcgctccatcatctaagtcatcaactgtcaccactgcatatgttggctctttttccaacgagaaaggaacatgagtgactacatggattgttggggcatgttcatttatgcgctcaatgtgaacataaagctttgcagtactgctcactccattgttcccatacagtttcattccccggtccacagccaaaatttccagatcatacctattcttttcatcataatttaatcgaccacttaaggagatgacaccactcgtggggtgaactgaaaagagatcaactttatttttaaagtagtagtagaattctccattggaaccaatatctgcgtctgttgcagtcacctgggcaacactagtccttagaggtgtgctttctgctatggtaacagagtatgttgtgggtgaaaacaaaggtctcagatcattcatatctaaaacctgtatattcactttggtccatgcttccaaatcctctcctctgacagaaccttttactatcaataaataattatcctggatttccctatttaatatggcagaattgccacctttagttcttattctgagaaaacagaaatctgcaatgatgacttcctctgctttgaaaaagccttcctcgtctccggacactattctgtatttgatatcccaggatagatctattaaggtgatgcccattctactctggctgttgacgtaggtccttgctgctgagttctcatacacggtagcattataaatggaatgtgtgaagtggaagcccaggggtccagtccctggcagcccctgggagacagtggccaaaagcttgaaaagcaggaggatgaggcaacaagcaggaggccgtgtgcccacacagtgtcccataattatatccatcacatcatacttccatcctggagggaagaaagagagagagaaaagataaattaaccatcctagaagaagggggagagtgggaaataactattaggaagccatgctttttaaaactttatcacaaaatctttttactaaaacagcaatataagaaaaaattagaaaccttgccactactaggtaataaggaacttaagattactagaatttagcccaatcttgtaagaattgttttcaagtgacactttgttttaaataacacttttatactactgacagcgttgttcattggtacaagatttcttacattctgaaggtcaatttagagatatattggaagccttaagtgcatttacctttgacttagaactgcctttgcagtaattatcctatagaaacatttagacaattatctgttatagcacagtttaaagtaaaaaaaaaatgaagagatgctaaatgcctatcaatagaggactgaataattcatggtgtattcataaaataaaatattatgcagtcattaaaaatagagacataaaagatgtgcattttcagatgcagtaagatgtaatgctaaggaaaaaaggtcatcaaacagtatatatagcatgagttctattattatataaacacctatatgtgcaaatgaatttttatatttaaaaaggattaactgtgttttgggatttggtggcatatttgcattttctaacttttcttcaatgaacattgttcatcaatagttacataattacttttataattataatctttttaaaatgcttcaaggtattaccatcttttattgtgcttacttttaaactgatcaaggtttatgaataatgcaatgccatgagaatgaacaaagtgtcaagttacaaagcagagacaataatccctaaggagttatatgactggagtgatatccagaactattcagaacaagggaggtaagagtgattacttgcaagaaaaactttagaaattacaagagatacttccaattactttcatcaatgactattaaatttggacagtttctacagtttcatgactatgtgggttaaaagatacaaactttttcctattttagccagtaaaatcaatcaaggagaagggagaaaggaggtattcaacaagaaaaagttaagtctattcatacccaaaggatcagatttttagaacccccaaatatgagttcttccatccagtcttatactctgcaagcccttgacattctccttttcttcctttacagggaacgtgaagatgagaggagatggaaaatgaatttctttgcaggcatgtaatgatgtaggcactgtgtcagtcatttttccactttgttgtatttaatcttcatgataatcctaagtaataggtactattttacccaatgacatattagaaaactgagggtcagagaagttaatctatttagttgagacatttgcccaaacaatgttccccagccggcaagtagtaaagcaggatctcagaccttaatctttctctaaaatccatgcttttccccatcacacaatcactctctcaaaattacctgcaagcaagaatgaaataattaaggatcctagaagcatatatgacataatttaattctaatgaaatagtcaacatatgtcattgattttaaaaagtacaacccatccctgcccccagcatatctttttggttatctcctctctggttttaatgtagttctagttattggctgcaaactgaaaaaaaaaaaaatccctacaggagtttaacatattaaaatattacaaattgtatggtttataaaaccctttcatatccaaggttagcaaggcacatattattataacctttttgttaatgataatataaaacctcattttcctatctcgactttattagttaagtctaaatagacttaactttttcttgttgaatacctcctttctcccctctccttgattaattttactggctaaaataggaaaaagtttttaccttttaacccacatag

SEQ ID NO: 914687 - DNA, 4001 bp, Homo sapiens
ctaaaaccaaggcagaccagattcctgccctggactctaaggccacagctggtaccaagttcagggaacggccaggttcaccttctatacaaacctcttcccccacccatcccttctattgctgcctccataacaaacctctcaccacagtgattcctgctaccttctctgtttagaagatgaaaaagaatgacctggggggactgatcaagttacttaggatagggaataaccccaattttacatctgaagccccccaggatctgtagctgtttcttcacaggaaatttctcttgtagtttaccatttcttccccccataccaaaggcttctgccttttctgcctcactgttctcctaggggacataccaccaacccgagaagcacacctctccctgaggccttgcaagtaaagatgaaacaatgcgatgactgaactaagtggcttttttattagagaaagccagaattacaaaagacttaagagttggcattggggcccttcttcttgccaaaggtgggcacaacgttgacaaagcgccggttgtactgcatccgccgcttagcccgacctgtcttcttcttcttcttctcctgtttggccacctggagaagggaaggttaatcaggccctggttcctgtcttccacacctagcatcccttccctcaggctcatctccagggagggagaaggcaaaccgagtaagagcccagggacttggtttagctgtgaaaggaaaaaaagtcctaacaccatgaccactaatactctcactcaccttaggagtctgacctctcacttttccagcacgggccagggaaccatggactttacctgtagtgggaaaggaaggcaccagcaggtaagagcaagaaggtgccacccagcagaacccctcttttctcaattcaagcctttaaagagaagctgcgcccaataggtaatgagaacaaagttgcagatatttgaccttgaaatcttaagtttcatttcaggatcttccagcttctaattttatagagcactttgggggccctggtctgacctaattttagtgtggaagctgataaccagactaggatctcgtgatgtgactgaaatacaactacactctggctcagtctcccatggacgtctgtgttcaacatgagggatgtaaacaggaagaatcactctgaactgaagacagtgagaagtactctattaccataggtgtgacactcagctgtcaggactatgcaccccacactcactagacgcttaccggtacttcaaagaacattcctctctcactcacctccaagcatgcggcctgctacttccagggtagtcagggcctccaccccgcactggcccagagtggcctcatcctccaggggcgcgcctgccaggagcacgacttgatcttccggggcaatgccctccagtgaggctacatgagcctacagggaaagataaggctcgtaagcgttccctcgggccgcgagagtgaagagcacaagaaaatggaacccagggcgcaccaagcagccttaccttgatctgggcgaccgtttcctggccggtcacctcgaaggtgtgtagctcctgggcgcggacaaagagctgcatattggcgactgagtaaagaaaagacggcttgtaagagaagccaagaaatgctctgggataaaggagatttgggagtggaaagcggtccagaaacgatcgcgacgggatggtggtcgcggcggctcacgtggggaaggccaggcctcccaaggagttcggatagggactggagcagggccacggagcaggccccgttcttcggttccccccgcgccttctgaccccgcagccaacctgctacaagcccttcggatccagccaaggccccattcttacctgaacggcggtcccagctaccgcgaagatggagtcgagaaagaggaagaagcgagggcgcgtcagtacagaccgtgggctgcgtgtcacgtcactgctgagcgaccgcgcggttccctgctatttgtaccgcccaaggcagtcctagctccgcccctttacgctcgcaccggcgaacctgcctgggcaggcagctcgcgcaggacggggcgggaccagacagttgcgcgcacagaaggctggcgtagcaggtaaagatggcagctaccatgttccgggctacgctgcggggatggagaaccggtgtccagcggggctgcgggctacggctgttggtgagagcgctgagcgaggagctgagggcatcgcgtgggtgtgaggctcagtgttaatcattgttaaccccgaaaactaaggcattcctacttggggccttagttttgccgttttcgatcaggagaacttgtcccgagtgtacatatagaatcgagagggaaaatggtagactggggtgctctttgggagcacttaacacagtgcctggcagtgtctatataagccacaacgtttcaggtaaggggcggggtcctagcatatgagtgtgcgtggggaattatgattgccttaattctttttttttttttttttgagacggagtctcgctctgtcgcccaggctggagggcagtggcgcgatctcggcccactgcaagctccgcctcccagattcacgccatcctcctgcctcagcctcccgagtagctgggactacaggctcccgccaccatgcccggctaattttttgtatttttagtagagacggggtttcaccttgttagccaggatggactggatcttctgacctcgtgatccgcccgcctcggcctcccaaagtgctgggattacaggcatgagccgccgaacccgtctgattgccttaattcttaaggcaatcataagattaaacatcactatatcccgtcacagatgtgattaggttagcaaggccagccaggcaatcatggaggtacaaacaaggccacgctgccaatataataatatctatttctaaaaccgagacagaaagttaagccttaagtttctaaaggcttgattgacttttcagaagtgtacatatactcttttgcatcccacagaaatcctgagaggcagaccattcagagtacctgagcctcctttccatcccatctgtaccctgcaccatggaaaaccaaagactggtgctatcttatgtcaacctaaataacagactctaaaagaaaaggatatttattcgggaatgggtatagactatgtgcttatcagggaggtaaaagaagacaaaggtttttaacagaaaaatgggccaggcacggtggctcacgcctgtaatcccagcactttgggaggccaaggcgcgtagatcacctggagtcaggagtttgagacaagcctggccaacatggtgaaacccgtctctagaaaaaatacaaaaattagccgggtgtgatggcgtgtgcctgtagtcccagctacttgggaggctgaggtaggagacttgcttgaacttgggaggcggaggttgcagtgagccgagatcacaccactgcactccagcctaggtgacagagtgagactctatctaaaaaaataataaaaataaataaaggaaaggaaaaatgagtattacataattgttttgagacagttatccttggctacaaggatgaataacatgggtggtgccagttcaagattggacaggcagttgttggacagatggccatgcaggaatttgttttgttttgttttgtttgagagagtctcgtcgctctgtcaccgaggctggagtgcaatggtgcgatcttagctcactgcaacctccacctcctgggttcaagcaattctcctgcctcagcctcccaagtagctgggattacaggcatgcaccaccatgcccggctaatttttgtattttcagtagagatggggtttcgccatgttggccaggctggtgttgaactcctgaccttagatgatcctcctgcctcagcctccaaggtgctgggattacaggcgtgagccaccttgcccagccagaaatatttttttg

SEQ ID NO: 914688 - DNA, 4001 bp, Homo sapiens
ctgttgaacagtaccgttcagcagtcccgtcaatctctgaacatacttttccctctgccagaactgcatatgccctgcttcatatatggcagctccttccgatttgatcacttctcacttcctattccttaacagagcaatctatttccttcacagcacttagtacctcttgcaattatgcgcttgcccactggactgtaagctccataagagttgccttatctgcgttgttcactactgtaccctcaacacttaacagactggcacatagcaagccctcggggaaaaaaaaatctttgaataggaagataagcaaggcagcccttacaatcaagaagcacgccatctacctgacatggcaaatcaattctgcaggaagaaggtagagagggcatcttctccaccttgccaagttgagaagaggtaggcaaggcattccaggcaaggtcgagagcttgagccacaggaaaaaaaaaaaaaaagaaagtgcaagtgtgttgtatgctggcagaggtctgatttggttagaatggatggtgcaaatgtgatagtggtggagaaataagtcctggaggaccttagatatacaagccagatgataagagctttcaatgccccagaagtttaggttatagtctataaacataggggtgtcacaggttttaaggagaatgacaaccagatgtgtcttggaaagattactctggcagcaatcaaaagttggagactgttagttaaattgtaagtattttctagaaaaataaaattgctagcaggtacaggtagcgaccagtacaggtagtgaccaaaaacttgaggtatctctctatcaccacttagctaggccaacaactatctgtagctccaagaaatctgtatttataaaaagacctctaataacacagggcacaatcatcaaatggctagaatctaatggttaatccaaacacaaaacaaatctcgcccacctatcctaagagggcgactttgcatcctctgcaaatatatacggtagcacaggaaactcacagccatgccaccccctgtcaagggtgtaaacaatcctgacagctggggggcgggctggcagcgccatttcttccaccaccccagacagtcccaagttctgaagaaactgggcattgaaccacccttatcagcaaccggtgtttatttctggaacagatgctagtaatgtgggaaacccaaggtgtccaggagaaaagatagtcaccggtatggcatcaccggaagtcagtaccaaaacataaaatccaacatcgaaccgtaaggagcaatgctgacagcaaaacaattctcacgcactgaagtccgaaagtgagcccggacagcgattctggcgctggggaagtcgcgccaggggagtaaggggttgcctatcttctcctctcgctcacccacctgcccaccccggcgccagactccgcaggccccggacccagcagagaagagcgcctggccgggacaggggcttttacacagcagcagggactgaccccaaccgggcgggcacctgcggggccagcgggggtccgcggagcgcggcggtgcggcacgagggccactacctccttctcttgcaagtgggcctcaccgaggcctgggagagagatatctcgtcgcttctcatacctgggcccaggacaggaggaagactcagggcgaggccctttccgcccccgtctcgccccggtccccggtggctccgcaggatgagggcggccctggcgtcaccttctggtgtcgcggaagctcgggtcctgtcagcggccccgaccccctttccccctgcctcaccgcctcctctccccatgcccccacccctgccatgcgtgtcgtcccattacttgattagatcccgatagtccaaaaaggataagatgaggagcaggggatcggtgggcagcgactctagggtcagcggcgccgtctcggtctccatggccgccatcttgcctggcccggtgcaggtctggccccgccctggccccgcccctgccccgcccccaccagcgcccgaaccgcccccagccgctctcacaggtttgttatgtaaccgccgggccagccccgccctcagggtgggctgaggtgcggctccctggagaccccgcccgctagccgggagccagcggcgcagtgcgagttcagcccgctttcttcgcgctccgcgtcaaatctctccagctctgttctcgcatcccggttcgtaaacttgcccagcccgggacccttttgttgccaaatctgcctcggtctgcccaactcctcctgcgaaattttacactcagtatgcaggaagcctcgctcaaaatctgacactcctccacgcccttggtccccaaatccattccttctctttgttttccaacccgagaacccctcgttttccccgctcagccttccccaccccgcttgtcccccgcacacagcagggccgctccgagacttgtccactcagcaagagcagagctgagaatcagccagggacgccagctgaaggcccttctcccaaattaaggaaataattgttgagggcttaacttcacgcccctccccgccttcctaagtaaaatgtgtacaaggagtgagtctgagtctcagccgctgtcccttaatttggttatcatggctattttcagcctattagggcaatgcaaagggtacagtgtggattttttccagctttaaaatttattttggccagggtttagatcccgcagagttaagtatcccgcgtgtgaagggatgaactgagactcccagagggcataactgatggaggcacgaagatgtctgctcttcagctttgccaaggtgatattaaaatgagagtgggggaagtataatgggtccatacatcacttgcctgatttcttcttttccattgcttttccaaaggtagtatggtgtaaggggctttggggaatccagacagacctggacttcacacgcccgtcatttatttcactactagtgaaatgctggcgtagttacgcctaagttctctgagactgtccctcatctctaaaaccacccctcctctggtgaactaaggatggcgataacgctttatgtaaagtgcctggccagatactcaataaatgttaattttccaagcttatacatgcatcagtcactaagttctccaaacatttccatatcctggagaaagtttctctcaattatttggaagagtggaagtgatatgccccgccccaaaaaaatccatttcctccattcttcataccattaatgccttctatttatggttttgcttaatagttataacccctgccacccagccaacaaaacagaacaacagcaacaaaaaactctgcctacatctctgtgcttccaaattgtttatgcatatgcttagaagaacatttattgaattggatttcaagtacttgttctgtgtctctctcgtcaaactgtaaactctcagtctgactcatctttctaatttcagggcttagcaagttattcaacaactagaaagtttaaattcaggttgaatggatgaatgaagacagaataatcatttctgtttacaagggaaccatacctttttacatagacaaatgcttgtaaaggtatttgatcctgatttatgtttgtctccattttctacttcagatgggccacctgttttaaatccaaaagctggtaggagtttcaggtacactgcatttgcttctgctgtcctattgcacttggacttggtgcagctatgacctaatgcagaagacaaagtatgaagctaccaaactgtcagggccagaactaaggtgaggcaagaaagctacttgcttggggcacaaatttaagaagaggtgccaaaaaactgaataatcaaataaataacattttaatgcaatatttttaaaaataaaaattaatgcaaaaaaaattcacagtgaacaaaataccaaactcttaaacaaaaacaggatcccacagtgccatgtaagcca

SEQ ID NO: 914689 - DNA, 4001 bp, Homo sapiens
aatgtttttcagttcttgtgtaactttcacctaaaatataccatatatttatgaaggtctttttacaaatttaacccaaaaaaattgcttcaggaaaatacatctgtcagaatatgtctcttgctcgcctctcccctgaaggccataaatccaatattcgccatctagttttatttattgaagatacttatttaatgaaaaattaaagccaaatagcctgaacagaggttaaatgaaaatacacgactataaatattacaaactaaagacgtgcaaaataaactgccagtcattccatttcatgcacaagctcaatccacgtctaggtcttcctacagttttaaaagagcctgtcttctatttctaaaaaagattcaaagacattaaccaccaggagaggtgagcagagtgtggatgggggctgggagcctaagagtgcctgatacccaatgaccaatatttacacaatcatgataatatgcctgaatcgactacataaattactccataatggctgcgaaaaagcacactgtctcagaatgatgccctcgacttgctgacagcgcatcaaatcacaatctctttctcacaaaggagaaagcaaaagtgaccttccagcatatgcagtgcttttaaactaccccgggaagccgatccccgtggaggctccacttcaaacagcggagaacagcaaatgcctgctggccagagagcctcgcccgccaggccggggccccagggttcgaagttaacggtcagtctggaatctcggcctcagcagtgggaccacccggaggggtgggggtacatgttcgaaagaaaaggactcacttaaatggagaaacccggattaggaaagagagaaagcagcggcagcagacacgggtgagttaggcgttaggcaaatgtttgcccacgaggggaggacagaacggcctcatccacccagtgcccagagtagacattcagtatccatctgtaggattaaaaagacaaggacacagcctcggcccctgggaaagctggggaagggcgcagcggggagactgatgacaagccgggtgcatccgtcactcccaccctggtcatccaaccccggatcgcagtgcacaccccacgcacctcccgggcccggtcctcgcttttctgaagacagcacgacagcctcctcgcccctcagccggggacgaggcaggacccgtcaatccttaatttgttttcccttggggtggggaggcggtgactattccaacttcttttcggccgccccgtgggaaaagcaggccaaaccctaaggctaggctagaaacaaatcccccgcaaatttgcaaacgggcggggctggcgacaagcggctggagggctcaaagctggtgcagactaaacaatcacacacgcacaaggctctgcaaagctgcaggggcgtccccgcctccccctcggtgcagccccgagaatgcactttgcagcgggcagcattgccatgcgcgcgcacacacacaaatgcacacccgaaactcttgtgaaatgtctgggggtctcctgcgttagaggacggacgagccccggcggcccctctgtcggaaaggcaactcacacgcgcgccccccacctggagccggcggcaagtcggtgacaagcccaagacgagggcggtcacggccccttgcgggagggggaaggggcgcagcggtcgccccagccgcgttccgcgtacgcatctctccgaaccccaaagccccccagctgcgcccttaccttcctcggcggcggctgcatgatgctgaagggacatcaatcctccccgacggcagcgttagcaaggaccaggaggaggaggagggccggagaggaggggacggcccagcgagcgcgcgcgtgtgtgaaaggagcgcttaagaagcaagacttgccccggagggagcaggccagcgggcggcaggcggaccccagccagagagcgagtgtgaggagacgagggaggagcaccgggaaggcttggggcccgggcggcccgggcggcccgggggtgtgtgaggaaggaggcggagacggcgagggggcgggggccccaggagcaggggcgcgagggtctcagccggccgggcggcgggttagccgcagccgcgttgtccgcgctcccggtcggccgcctgcgccgccgctcccggcggacgcagcggcccccaccccacccactcaggcggcccggccctcgctgggcctaacgcccccgcccgcccgggaggaggaaggtggcgccgctctccccgctagggctccaccactcaggccgcgggaatttccggcctcgccgcgcggcgcagcgccccgctccggatgctgagggaaccgctctgtccagagcggggttcgaggggccggtccgggctgccaggagggagctaggccacggcacggggcttcgtaccgcggcaggggaagggggaagctaacggattggtcggtgggtgggaggtgtagaaacgccagcgccacgcgaaaatcccccctttctctccgagagtggcacgttccagacgcctcctgccctccctcccccacgctgggagccagccgggggcttcccgcgcgctttcccgccagctcgccccggcgcgcgcgtctccgctcgggggcgcgcacgtgggcgggagagggctccgcgccgacgcacgcgcacaggccgcccccgcctcctgcctgcctttgcgtgtgtgtgtgtgtgtgtgtgtgtgtgtgtgtgtgtgtgtgtgtgtgtgtgtgtgtgtgtcggggggcgcgggggacgacgctcgcagggaaacgtttgcagtggggaggggggcgcagcatgcctgtgggatacgagaattccggcgttttcttcctctcagcccctcaacaccctactctccctaccagctagatgtgcgcgagagaggcgagcaaggacaagtcgctttgcggctggccgcaggtgccaggccattgcgattgtagggcggaaaggcagttgctctgcaaaggaaacggcggcactctactgcagggcattcaagtcaaacatcactgactccgctgagagggagccaagagaacgttaaggccgaggcccccgtttcacagacggggaggcaagtgcccatagagggaagcctttctaaaggttacacagcaggactagaatctgcgtcaggaagtgttctatgggttattttaaaaaagaaacaggtgcaggataataagcacgaggaaaagtagaagaggcaggagaggccatagaggaagcccttgtctgggagtcaggatctctgggtgccagtccactttgcctgctccttaacaggctaggtgagctcggcttccttatctgccagtgagggtgcttatctaagcagtgcaccccaccaccacacatgaaccttcctgctctgttcagaccatctacgggggagtttatcgacctcccttggggtcctcagaagaggaatacctcttccccatgcccagggaggttttttttttttttttgagtcacggggctgtgtggaggctgagctggattactccaccgttttttcagaagttgagatcccagacagctgttctcagaagtgcagtcaggcctaagaggaaggtgaatgaggcctggatagacgagtaacttcccagatgaccacatgaccagaaattgaaaaggtggaacttcaacccaggttgtttacattgagttagactagattcttgtacagaaaagtgacagagctgtgttttgaataagattaatctagagctgtgtatgaactaggagactagtcttgctttttctggcttcaaaagttagcccttcaccagaatccttaatcaaatcagggaaggcctggggcaaggggacaggtggatggaggcccagggccctgacagctgcggggtggcagctagagcccaggccataggtagcgtaggctgggctccagtctcagctccaccaccaatttattgtgaagcgttgagctagt

SEQ ID NO: 914690 - DNA, 4001 bp, Homo sapiens
tagtagttacggtagttacagcacaagtctcattaacacagtaagaactggaaaatccagttgtagctccaaagtctgtaagaggaatgataagaccatgaatagaaattgtgccaataaagagggcagcaggattatgaggaaatagacgtgctcccctttaaaacaacctgacatatccaaatccaaaaaacaaatctgagaaagataactcccaattactacaaaaacattcatgttcccttataccagttacacaagcatgttcaatatctgtcccaattgattcagttgtccaaaactcatccattgtataacagaaagcaaggtacccacactggtcaaagacagggggggaagtgcagaggaaacaggaacaaataaatctggcttgccttctccctgatttcccccaaagttcacacaacaaaaatgtatggagcacccactagataacgggattagtggggaaaagatgactgaaagtcttagaccctgctctcagagacctcaaaaagaaactagacaaagcagcgtacaaatccaacacactctccctctagttctcgattcctgctaccctacatcatgcggtcaaagagctgtcgagagatctgcattatataaatcgccaccatgttggtaaaaattatgtgtaaattgtatctctagtatatctaaggagtgtctttgaaaaacaaatatgcccaagaacctaaaacttcaacacatttgggataaattgtcacatttctttcaatatttaatacaaaactctcttaacattgtgaacctaagaagctgctgctgctgctgctgctgctgctgctgctgctaccaagtggcatctactgagccctcattacgtgctaggcacaagactacctgtatcgctgtattaactcattgattcttcaattaaccataggaggtctacactgttattatatccaacttgcaaatggagaaactgggttcctaaggactgaccaagttaggcacgtcagacaatcagtgccaaagccaagtttcaagtcccggcagattacttcaacgcaggggctttcaacacttgagcaactagcaaagggcctacagggcagcagagggtatgggctgggtgtattctacctggacaccccctgacaaagacctgggacctgggtgtcctctcaaagcagggcaaggccctgaaaaaaacagctggcaggtgtgtcaggccaggacagcaggagggaagcctgtcgcgaaggtcactgccagtttcgggcagagcaaaggtcagatcccagacaaatcacacggagaacaagcagcagcaaagtcccggctttcctcagggcacgggaagcgctgggaaagggagctgggcgtccagggtccccgattcccgccgggagtgggtgatgcggaaaggaactctgcggtgcgacggaagggaggcagcgacgccaccgagcagcgagacggagccgcgagagcaccccagaagaggggggcgagaggcaggcctccggggtgtgggcccggcgcgcagaaggcactggaaccagagactcggcccagagagccaggcgccacccaccggggaccccggcccgcgccggcgatcgcgcccgcacggcgccctacctgctccgggcccgcgccgacacgctcagcgaccggctcgcctccgcgctcccgcccggcccccggttcctcagcaggccgctggatccagcgcgggacccagcgtggtgcagccaccggccggccgggccgccgaggacagcagaagcggcgcgcagcagccgggcgcccccagcggcagccatcgcccgcggtcgggaactgccggaagcgacgcaggccgcgctttgaggccgcgagagactccaaagaggcgggggcggcagctgcggcgcagacgcccgagggccgcggcgaggggcgcggggctggagtggcggagagaccctgctggaagcaccgcgccgaggttccgcgtgccttccgggtgacctataaagacattggcaagcagagcgcggccccgccccgcctctcacgcccacgccgcccggtcccatggggcggggccagcgcagggggcctttaccaaccctccaggttccgttgtaagctggatgcttttttagcggctgaagttgccgtgcagaaacaaaatattttgaaagatagctggacgtctagcggaaatcggttagctagaccactgtgttctgttccgcatacccccatcccctagccgttaaaaaaaaaactgggaaattgtgtcatcttggagtcaagttagagcaaagtgaattctgcccactgtaaaacaaaaacagtgggaaattttggaaaatctcagaatgctattatacaaagaaataattatgactataaaattgtaaatgaaattaatgaataggcttggggctcctgcagaggacaggtagccatcctagaccttgactggcaagtaaatgctggctgagtacatgaaacccacgagactgaaccggaaactttgtgatgagctgagatctctaaaagactttcacaaaaaacagaaaagatgaactttaaaatacaccttatcatggttcatatgttgtgggaaatgcatgggctttaaggtcagaaatagcaatgttcagatccaagatctactgctttagagatctgagaccttggaaaaattattctcatggaggatcagagtttccataactctcaaacacagataagatgttccagccttcagggccattctgatgttaatctaatacgcaatgcacaccgtgcgtcacaaaccaggaaggctaccgcttcctgggccttcctccatcagggtactcataaagaggctaaaggccaaagtcaaggggatattgcagatatgctaaacacaatcagatactttttttttctttttttgacatggggtctctctattctgcccaggctgtagtgcagtggcgaaatctcggctcactgcaacctccgcctcccaggttcaagtgattctcctgcctcagcctcccgagtagctaggactacaggcgtgtgccaccacacgccactaatttttgaagattcagaacaagaaagtgtaagcatgagtaaagtatctgcggacaatgtatggtgctttctggaacccaatggcagagagaaggcagtggctcctaattgcctcaaatcgttggatgaagagaaagtctttcaagctgcgaagggcacagcaaaccctgacaagtaatcttgaagaggaggttgtaaaagaacagctaacttttgtttttagtaagaccaaacttccaaggtcggatgaattagttgtaggaagagaattgaaaagaaaaaaaatcgtagatgttctgtcttctctcagccctcctgtagcaaatacagtttcaactcccttaaggcacttgatagctttctgctttgtagggtagttattcgtacacatagagtagttatttatatagttcatcttagtgactccgacagcaccagctacagggtcttgaacatatcaagggtctaataaatattggtgaataaattgatgttatgaaatttccattaataatcatcagaattcattaagcatgtatatgaagattaaagatagaaaaaatgttctccaggttttctaaggtggatgagaagtaatgccaaaaattgcaaatatcagtagtcagcagaattccagaatggatttgtaaacatgatcatgaatacagataaagcaacatggaattactgaggacgtgcttttgcttatctgtttgcttatgtatttctttgtctataaaactcccacccctccatccctttttttttctttttttccttagagatggggttttgccatgttgcccaggctagtctggaactcctgagctcaagcaatctgcccacctcagccttccaaagtgccgggactacaggcatgagccaccatgcccagcccatcttttactcctttcaaaatccattca

SEQ ID NO: 914691 - DNA, 4001 bp, Homo sapiens
aatcatgtaaagcactgttttcagttcacaataattttatgaggctgttagttacttttttttttttttttttttttgagatggagtcttgctctgtcgcccaggctggagtgcagtggcacgatctcagctcactgcaacctccacctcccaagttcaagcgattctcctgcctcagcctcccaagtacctgggactacaggcacgtgccagcacggccagctaatttttatatttttagtagaggcggggttttgccactttggccaggctggtctcaaactcctgacctcaggtgatctgctcacctcggcctcccaaactgctgggattacaggcatgagccaccacgcctggcccagttagttactattaatatccctagtttacagttgaggaaacggaagcatgtaaagattaagtaagcttgcttaaaataacaactgttggccgggcgtggtggctcatgcctgtaatcccagcactttaggaggccaaggcaggcggatcacaaggtcaggagatcgacaccatcctggctaacacggtgaaaccccatctctactaaaaatacaaaaaattagctgggcgtggtggcgggcgcctgtactcccagctacttgggaggctgaggcaggagaatggcgtgaacccagtaggcggagcttgcagtgagccgagattgcaccacaccactgcactccagcctgggcgacagggcgagactctgtctcaaaaaataaaaataaataaaaataaaaaaataacaactgttaagtggtgggctgggatttgaatccaggcagtctggcttctaagtgcacgttcttagccattagactatatggctctcattattttgcactgtcaaaaataaatgatcctcttttacacacccaagagtacattatttgtactttcatttagcatttagggtttatatatctgtctttccaactaaacttggggttcctttggggctttatagtctcttctaaacatatcatagtagcttgcacgtgtgccttatgtttgggtacagtaactatgttatggacatcttaaacattttccttgtgagggcgctcctttcctcacctttggaaaaatttggcaagcagttccctgttcttagctacgccagctttgcgtccacaatgcgggaagatgaaataaatttgatcaaattctctctcgtgcagttcaaagacatctgccagctgggtgcagtccacaccgaaacgtacatcgatacctggcaaagatagtttgggggcgcaaaatatagacaggaggatgcctcaagacatggaacagaaaaactcttcctaacttaaaccgtgcagaccagcccaagtctgggcacaaagccggctttatgtgaatatccgtgggacgatcaagaacaatctccacgtgggttacatccccacgcccccaccctttccactttgggacgcgccggccgctgggcggggtttcgcagaggggcgggctcgctacctcgctcgcgcaggcactgcagattctcccaggccagtggatcccgagccaactcggccgggcgctggaggcaggtggcggtaagttgagtgctctgatccagggtttcgctcagagcggcggcgaaggagaaattcccctccccaaccaacaggaggcgccgaggggccatggcctccacggactcccggctcgcgttctctgtggcgctcgttttacgtcacttccttcacggatctctctccgccccgtcttctcccgtcactagttgatgacgcacccatggcgcctggttgtctagacgagccggtgtaccgactccccggtggatgataactatgagtgcaaaagcaagacgcgcactttcctgtcacctcgccctttcaccccctcgggaagatcaaagtgtctttagcccaagcatggccttgagcgacttcatcacacctgcatgaggtcacaagcagtcactagcgcaggggggtgaggcgagttctgggtgaaagaaacggggcggggctgaggccaaggaagaggttggactgtgtctcgcatgctcctgacgcagaaggttttgaaccttttttcacctcgtctgaaatggctgcctcccagtgtctctgctgctcaaaatttctcttccaggtgcttaaatctcctatcttctattcgttcaagaaagagtattgagtgtctattgcgtgccaggccactgtgagggtggttacgatatgtggatgaacaaaatgtggcctatgatttcaatgagcctgcagtctggtggggaatgcacagagcaaaacaggcaactctgatatggcagggtgtgtgctctgggagcacacagaagaacgttaccaagtttgggggcgaagagggtcagagagtccttggatgaagtaaacccgagttgaaagctaacagggtaaaagtgcatcttaactgagtcaagaggcgtgaagaggcagaaggaacaatatatgcaaaagcttgatggagaaacagaatagttgagtttggctgaaacacaattggagggagagtaacagatgagactgaagagttaggcaggggccaggtcatagggagcgttgtaagcctttaaaaaaaatcaacttttattttacaaatgggggtacaggtacaggtttgttacgtggatatattgcacccaggtaggttgcaggtttgctacatgggtatattgcacctaatagtttttcaacccacaccacccgccctccccactctagttagtagcctggagtgtgtgttgtttccatgtttaggtccatgtttgctcaatgtttagctcccacttataagtgagaatgtcagaggtatttataccagagcaactccgtcttgaataggggctaggtaaataaggctaagacctgggctgcattcccagtaagttaaggcattcttagtcacaggatgagatagctcagcacaagatacaggtcataaagaccttgctgataaaacgggttgcagtaaagaagccagctaaaatccaccaaaaccgagatggtgatgagagtgatctctggtcatcctcattgctacactcccaccagcgccatgacagtttacaaatgccatggcaaagtcaggaagttaccgtatatggtctaaaaagtggaggtatgaattaatccaccccttgtttagtatataatcaacaaccataaaaatgggcaaccagctgccctcagggttgctctgcatatggagtagccattctttattcctttactttcttaataaacttccttatgctttatagactcaccttgaattatttcttgtgtctcttggggtctggatcaggaccccttccggtaacaagaacatgctgtatttggttctctgttctgttgtaagccattttaacagactgaatcttactctgaaaacggtggaaagccactgaaagattttaaataagaagatgatacaattatactttcactttgaaaaattctcctttcctgtggagaaaggtttggagaggaacaaggctgatggcatggcaggataaaacaagaggcaactgcaataatggagacaaagctgacagtgatttgaattgaaatttggcaatgggaatggagggtggcagtctgattcaaaaatcaacaagacttagtgactggatgaaaattaaagacaagtcagagtcaaagataagccccaggcttctggcttggacaactgagtggatggtgatgtctgtcattccagccctagagacagttacacctagatctccagtatgagtaccaggcccattggactttgtggcaccagctactctggtcatcatgttgtttggtaacatcagtgcatgcatctgtcttcacaaaggcagatggtatgagggtagttacctgggatgtcatccttcaatgctgcattattggctttgtttctgcctgtggaaaggcaagtgggtggtgactcccaaatcatggccacttgcccatggtaat

SEQ ID NO: 914692 - DNA, 4001 bp, Homo sapiens
tattgcacttcagagttcagtgtttcccagatagcagtgtttcccaaatcaccctcacgatttttgctacttccaactaaaacccgtactttcattcacttagaattttttttaaaaaactaaactggaaaactcataagcaataatatttgtgttctattagttatattttaatatgtattaaatgtataactattaaaaaggatttttagggggtgcaatttaaaatcatcttgccatcctggccaacacggtgaaaccctgtctctactaaaaatacaaaaaaaaaaaaaattagctgggtgtggtggtgtgcacctgtaatcccagctactcgggaggctgaggcaggagaatcgcttgaacccaggaggcagagaatgcagtgagccgagattgtgccgctgcactccagcctagcaagagagtgagactccgtctcaaaaaaataaaaaactcatcttgtgcccactgttggtatgtgtccaatactccaagaaatattctactggggccaggcacagaggctctgggcagtaatcccagcactttgggaggccgtggtgggaggatcacatgagcccaggagttccaggctacagtgagctatgattgtgccaccacactccagcctgggcaacagagcaagaccctgtcaagaaaagaaaagaagacaaaagaaaagagaaagaagaaacgaaagactccatcaggccttttcattgttcccactctttcttcacagggttctttctagagcatcaatgactgttcaattcttccttctaattcagtccaaacacttcagcatggcatcacgatctttcatgttctggttcccaacctaaccctacattctgggatctcaacagaaagctggaataaggcccgccttttcccacttttccttagctgtgccctcctctcgccatcctctcacgcgtccttccaggtccatccctggattattaatcaattaataattaattgacaatgaattattcatttgattaatatgaataattcccctgtgaactgcagcggcaaaagctctggccttgaatctaggcgcggcatttaccatccgtgtgacattaccaagccactgaggtttattttctcgtctacagaagaagaacgattaccatgcctgtctctcagggctgctgccagggttaactgagacaacagacagaaacctctaatgtcccctctccaggcctgttcaacccttcggctcttgcctcaagccggccgcgctgctggagtgtggactgaggaccagaccatgtagcccttgatcccctcacggcgtcccacagacaggtaggcaggaaaggggcctaaacaactcaagtgtcagaaatgtttctcgtccaaggtcttaggaaaaatacaacacgaccccataaggtggaacttattaccgcttttctacaatggaggaaagagaggctcggagcttacgcgactggcccaaggctcacagggggaaaagtggcgggacctcttgactgcgaatcccgcgcactccagaccccggctccccacggcccccagcgccaagcggaccccgtcgctcccggaggcgcttcccatggggtctcacctggcctttgggacacgcggcctcggcggctaaagcttggttcggggttgccccgggcaggcggtcctaagctcgctctcccttctcagcttagcggcgggtggcctgacgttcagccgccttccaaagcccgcgctcccgtcacgtgacctgctcgccacgcacagcctcttggggcgcgtagtgcaggctgcgtcccctcagacggctgctctcatggcaaccagtccctccagggagaacagagtctctcagcgaccctggcgtacccttctccaccgcttgtccccactccacccacaccaggtccccgcaggcccctgctccctctacacccgaaatcgcaggactacaagtccctcaatgccacttgcgccggaggcacttccttttccggttgtgctaggcgcctgctcctgccgacgtgttcttccggtggcggagcggcggattagccttcgcggggcaaaatggtgagagcgttgaggggagttccagacggagatgcgaggacccctcggggtctgacccacaccgcgcttatctcctcagacgccggagatccagagggctagacgctcctggaacctccggcttgggctgaagggtggggaagggggaagccccttgccatgaactccttaggtttctcagctcgcgatttctaagggcgagaggcgtggggcgaattttgaataccttccagtttgtatatctctgttatcggtggtgtgttatctttatttggaaagttcttctgccgaacccgtgcccatcctacaatgccctgggcaaatgtttattggtgaagcacttccaactctcaggcacttggccagactttcctaggagcgcccacagcctctgtacagatctctggccacgttccatggacttctttgttttcggccacgcctcctagtgaccaccgtctgacgcgcatctagctctgggatgatgtctattcatctttgtattctcagtgccaaacagagggcccgtaattggaagctcaataaatggcagtgattgtctttatcattttgggggaagggggccgtgattgtttactgaattgaattccagtgtctcagaacaatgggggcagtttacttctctagagttgttatgttctggattttagaagcattggctgaccggtgacaatgaagttaacatttgtacagatctttacgtttacagccctctttcataaaagacattatctcatcatcttccctacagccttaggaaggaagcaaatacctgttgagcaaaatactccctgctaggcactagatgctttgattcatcatctttcttatttttcagttctgtgaaatagatattacagtcgctttactcagactcagattactcagaaccagaacttgaatgtcttgaccatagctcacaagattccataatagcataggtagtgaggaaaatactgaattagaaattgagggccaggcgcggtggttcactcctgtaatcccagcactttgggaggctgaggcgagcggatcaggaggtcagaagttcaagaccagcctggccagcaaggtgaaaccctgtctctcctaaaaatacaaaaaattagccgggcatggtggttcacgcctgtaatcccagctgctcgggaggctgaggcaggataatcacttgaacccagaaggcggagcttgcagtgagccgagttggcaccactgcactccaggcactccagcctgggcgatagagcaagactgtctggaaaaaaaaaaaaattgagcctgggcgcggcaactcacacctgtaatctcagtactttgggaggccgaggcaggcagatcacctgaggtcaggaattcaagaccatcctggccagcatggcaaaaccccatctctactaaaaatacaaaaattagatgtggtggtgcgcacctgtaatcctatagtcccagctactcgagaggctgaggtatgagaatctctagaacccgggaggcagaggttgcagtgagccgagatcgtgccactgccctccagcccgggcgacagagtgagacgccgtccaaaaaatgagactccgtcaaaaaaaaaagatattgagatctgggtaccaccagtcagtgacttatagcgggggttctcagcttggtgtctatagacactggtccacaaagctccggaaattgtaggcaaactttttcttgtatgtggtttttctcaggcagagagttcgtacctttagtcacgttttcatagtggtcagattattggcctcagaaaatgctaataagggccattgatctgcagctacatttccgggctaaaatcagcctctgtttcacggcagcaccaggctccttgataaccgcatgttctctccaggctgaaatcgtgggat

SEQ ID NO: 914693 - DNA, 4001 bp, Homo sapiens
ccccatcctgggctcggggcagccccctcctctggctccaggcccccatgatagcgccctctgtgcggcagccggcacgcagcccccatgggtcagtctcacccgctgctgctccaggaggccagggactggcccggggcggccaggctgagcatcagtagacagagctgatgtgcttaggagtgacagtatccccaccacagggaacacagagctaaaggaacttgccctggggtgcccagcagcgggtagagcagcggggtctgtctgactccaggttaaggcctcctgcgttaccctcatgccgtgccctggggccacccaggtcttcaccaccctctctctgttcctcacttctattctcacagctgctccgggccctgcccctggcagctcccctcacagcctcagtcttgtggccgggccgttctggaccctatcctctccacagtcggactgacctcctcctgtgctgcacatggtggcctggcggggtctgaggaagcctccccaccatcacccaccccccacccactggcagcccaggcccaggctcttggccgggactgtggtgggcctgtcttccggctctgcctatcggggtcttcctgctgctctctcaggaaggggtagcccccacccccggcagggaaggaagatgaggagcccccgtgtcactagccccgtggtcctccatgactgataccacagctgctctgctgtaacttcctgtgggggcagggccttcccacccaggctgggcctgtcaccaacctgctcaaagcttccgccaaggggagggagcgtgggggcaggcccctgggtcacctagaccccctcagacctcagcaatgtgacttcagcctcggcccagacaagaccactccttctgcccctattggtggctgaatggaggattgtggctgcgtctgatccttagcagaccagctgcagcagaagggagggagggaagagggtgggagggagaggaagttggggaaatgtcttttttggaaccaaatgattaagctaatgcctgagtcaccgtgacaccattatcgggagctgagcagcagggatggcccggaagtgcccagagacacccgtggcggccgcccatggtgccgagttcagcaagcgggcagcggacactcactgatctgctccacaatcttcaggagcaccccgccgatgtgcgactccccagtgacccgcagggtgaccgactcggcctctgggtcctcctctcccacaaacacccgcagctcccatgacgagtcgatgtagtccccggaggctgtcttcatccccgccatggctgcggctgctgctacagagagtgtggaaggaggcaaggtgggcaggccctggtaggcctccgggtttgggcagaagagctctgtgatgccctggacacacccagaggaaagccgctcatgaaggagggcgggagtgagcacccaggccagcacgcccgtggtaccctcagactctctctccagcgctggcgcttgagccgcgagggccctcagagaccatgtagtccaatccgctcccatcctacaggcgggcagactgaggccgggtaagaaggggctcactcaggaccaccgtgctcaatgccagcccacagctcactcccagaccctcaggggcagctgcccactctggccatggcttcgtacccaggccaggaagtagttccgatcctggcccacagctcagatgccaacatcacaaaccagccaaagcctctccggggaggtggaaagttcaggctgccgcatggcgagaggcaggctgggcagaggctgcaggaggataaggaagagaagggcccagggtcccagtgaggcctgagcttacctttcctggcaagggctgggggctgcaggtgggtctcgggctacacccctgtgggccgtgggcttcctgccctcctttctctttggagcttccttcagggcagcccttgcttgtgccttatcacgagcagggcgggttcagcccctccccagggcgggctggcgctgggtgcaggaagcacactgccagcccacagagggttccaggggcccccccacctttgtccccagagagcacaggaagctagggagagcggggcttagcgactcaacaccataaaaacgcccccttcctcatttggagggaagctcagtgcaaactcaacaagtcccccggctgtgtgtgttcagggctaggtccacttttgtgggaagtgtctgccatcctcagcctgtcacatgaggtggggaccttgggctttgaaacatcactgggctgccggagggagagcccaggagtcgacagagtgtatccaggttatttgggactcacaggttaaatcggctccagcctggctatccctatcaaccaaggatccctcaaggccccagagggaaacaagtccattttgcagtttttcctagctccgcgtagggctaccttcaaactcatgaactcagacctgccaggtgaacaagtgaacagtacttggcccagaccatccacaacctcccgggccctcaggtcacccagctccaaacacgacccctccactgtgctccacttggatgagcctccccgagtccccacgaggctcactcccatcaagtccctgcttaggtgacacctcaggggtctctggtggtctataccctcctgctcatcacctgccctaggatgtggacttcagtagagcaaggcacgtccgccaccagctctgcgcaggacagcggcctttccagtgaacacactggggttggagcatgcagggtgggcaagcctgggggcggcagagtcctgccaatgggggaggctacctgagcatcgccactcagatggggaagggggcggcctgccggggattcccaggggaaaagaaagctgatgaaactaacagcaggaagtccagccagctgctagtctcagcgccttcctagcccagaaagcagcactcttggagcaaatgaggaagttttactcctgccccaaaggcctccccagtccaggaagagagctttagaaaacgcagcttgttgcaaccatggaaaagtgtaattaaagcttagcaccctaagttctcaggtaagagccgtgcattaaaaccatcacccaggccgggcgcggtggctcacgcctgttaaccccagcactttgggaagtccaggcgggtggatcacgaggtcaggagattgagaccatcctggctaacacggtgaaaccccgtctctactaaaaatacaaacaaacaaacaaacaaaaaattagccgggcgtggtggcgggcgcctgtagtcccagctactcgggagactgaggcaggagaatggcgtgaacccgggaggcagagcttgcagtgagctggatcacgccactgcactccagcctgggcgacagagagagacaccatctcaaaaaatacaaacaaaaaaaacccatcacccagtggggtgcagtggctcatgcctgtaatcccagcactttgggaggttgaggcgggtggatcacttgaggtcaggagttcgagactagcctggccaatatggcgaaacacctgtctccactaaaatataataattagctgggtgtggtagcaggctcctgtaatcccagctactggggaggctgaggtaggagaagcgtttgaacccaggaggtggaggttgcagtgagccgagatcacaccactgcactccagcctgagactccatctcaaataacaaaacaaaaacaatccatgacccaactcctaaatctaacagcagctaacagcatagctgccctctccccacagaggtctcagcatctcacattagaatcctgttctctggatctccactataacgtggagaattaacagcacccaaagcttatctgaacctctcattggtactacttggggtggggaagccttcagattcccttccagctgctgagcaacagcgccatctggcaaccttcttggcaaagccatggagc

SEQ ID NO: 914694 - DNA, 4001 bp, Homo sapiens
gcacttccttagatggtgaccctgccttccttcctttagcccactttctttcgccctcctctcttcacggagtgctttcatccttcaactaaaatgtctgaaacaaccttattttccatcctggcaagcttgcaccatcctcattcatagctcatctgggagccttcttttccttaaagtaggattaatacaagcgatagcttattccctttagacttccaagatcaaaaataaatacgtacatacatgaaaatggcagaaagaaggaaccatgggagggtcgccttttctttttctctttaccacagaacagagcgcaggactatagtctgattgtcctacaatctattccatttattttcactcccaatagatggtgtaatttggaaaagaaaagacactcacggggcttaacagagacccagtaggaaacgcataaacgtctccctgcagcacaatgatgcactcgctgcatctcggggctgcggtacaaatgctcagtccctgctttgctgagctgacccgagtggagcggagcggtggagatttcaccacgctaaccccgctgggcctcggcacctccacacaagccccattccatctccttcttcccatcacttggtccatagatcaactgattccgtgcctcgtcccccatatccgtccctaaaacctaccctgcactgatccaccttcagatttcccactgctcctccgcagaacccacccagtgtgcatgtttgtgcacattttgacagaaaaagtatttcgttgcatatggatcagcaaccccttcgcggttctgcttgctcccctccccctcctcccgctgctccattcacctccatctcagatccccctcctccccccagtccggtggggtaaagaaagcctcctccaggcagcacaatggctggcactctgaggaagccggactcatcccgtgcaggccgcatacacactccactgcccttccggccaaacaagcccggacacgggagagggatgagagtcggggatgcctagcggcgaggagagaagggataggcaaaagggaagaagagcgggctgtgatacctcctcgacgccgtcaaacactgctccccgcattccagagcccggggcccacccgacggcagcgcgccccgccaccgcgcagccgccccggtcccttctcccgcccgtctgtagtaaaacaatcgctctcccggcgtctgcggccgctgccagcggttctgacactgcaggaatgcgcggtctggggaaggctccgcactctggggaggggcacgagcggggtcgggggtaagtttttagggacaaagatgatcttggggcgtttacggtgactggaccagataacggtcccgggacgaggtaccgacccactgccccagcgcgatcgggcggcgttcccttcttcccccagcccccatacctcgccgccctgccttcacacgcgcgcacacacgcgggcacacacacgcggacacacacacacacacacacacacacacacacacaccaggcctggctggagggccgatgctgagatgatactggaagtgcccatcatcccacatctccagggcctggcgcggcgtcccagctgcgctccctgaagggctgggcaggaaggcgacggcctcccgttgttcctttctaatcccagaatgggaccaggtgaggggagctgcggcgaccccagaccgtcctgtcagagaatcccggggcctccttaccacccccaccagaccccacccccagcagtgagtcgggtcctaactaaagtcaacccccgcgacggcacctgtgcgggtcctggcggagggaggcggatcccggggctcagccggacacccccatccacgggccgcgggagcggccggagcgcagcgcagcgcagcggagagccagccagccagccagccagcgagcgctccccgcgcagctccggcggcgcccggctccgctcccgcctccaccccaccccttccccgcgctcgtgcccgggctccgggggcgcgcccgcgctcgggcacccacccaactggcacgcgcgggagctggacgtcatcccctcgttaacattcatagccttcctccgagcacgtgggcttgcctttattaatatttatgcatttctgtttctctcctctttaacattggcctttctgcttccctcatgaatattcagaaactccaagatgaaagcgtgcaataactaccaatatggatacctcgcaaagcctgacactagtttctggataaaatgcaggcgatggctgctggcggatgccggcagacacactcaaagacccttttggactttccgagtttcccattctcctctactggaggctgaggcgggcaggcccagcgacgtctcccagctccaactgggttcggacctcaagccaaaaatgaggaggccggcaggagagcttttctcgcccaaagatgctgggtgggagctggatccagctgaaaaatctgagtgagaaggtttcaggcccaggaggacttgagataatacaggaaaattcaagaggctgaaatgagaagggtccctggagtcttgtgaaaaattattaatttatcttgtctactgtgcataggcctgtgcttatagaagttgtcaataaaaaatctaataattcacgaatacacacaactaagagcacaagaactgtaattatcgaaggaaggcactggaaaaagcatgtcggcttggagaaccccaagtacttttgtctgatggcaaagtacctctgggctgaactgaggacttcaactggaaggggcagggagcgtctcttttgctcgtttatgcattcattccacagacatttcaaccatgagaaggatggaaacaggaataatgtcccaatgagatgagaagaagcgttggcctatttgcctttgtgggagcaatagacagaggatgtcttcctgtaagaaatcataaggccaggcacggtggctcacacctataatcccaacatgttggaaagctgaggcaggaggatcacttgaggccaggagttcaagaccagcctaggcaacatagtgagaccccatctctataaaaaaaaaaaaattagccaggcatggtgggcccatcctggtagcccatcctggtagccccagctacactggaggatgaggtgggaggatcgcttgagcccaagaggttgaagctgcactccagcctgggcgacagcaagaccttgtctcaaaagtaaataaataaataaataaatcacaaagagtagctggttaaaagatccctagatctcctttcttgggatcatgcccagttttgtgaccttgggttagttaacttccctgtggctcatttcctcatctgtaaaatgaagaaaataatagtgcccgccgggcgcggtggctcacgcctgtaatcccagcactttgggaggccgaggcgggcggatcacgaggtcaggagatcgagaccatcctggctaacacggtgaaaccccatctccaccaaaaatacaaaaaatcagctgtgcgtggtggcgggcgcctgtagtcccaattactcgggaggctgagaatggcgtgcacccaggaggcggagcttggagtgagccgagattgcgccactgcactccagcctgggtgacagagcgagactccgactcaaaaaaaaaaaaaagaaagaaaataatagtgccccactctattgtggcctgttgtgggattaaaggagtgaatatgagtaaagtacttccaggtttattagaaggcactatatgtatgtatgtgtgtatatatatacacacacacatatatatgtcatatatatgtctcatatagatgtcccatatatacgtctcatatagatgtcccatatatatgtctcatatagatgtcccatatatgtctcatatagatgtcccacatatatgtctcatatagatgtcccacatatatgtctcatatagatgtcccacatgtatgtctcatatagatgt

SEQ ID NO: 914695 - DNA, 4001 bp, Homo sapiens
cccgcctctgcatcctttctggggtgggggccccgggcaggcgcggccacccccgccctggcccctgctccgccagggagtccggggctgcgtgtgaggcctgcgcgggccgagacctcacacagcctcctctgcgcgcggggccgcgggaggggcgcgggttcgttcctttgaactcccagcctttgttcccggccaccagagccccagcgctcgtacacttccggccccgggacctctgcggttacctgggccttccctgccagcccccaccccctgcccccaccagaaagcgtttacaggacaggtgaggcccgcaggaggaaaagcactcccctggcgcaacatgactccagcgcatctgcgtctaagccacaccgtgctcctggtagattaaaaattaattctaaaaaaaaaatctctcctatcccaaatgcactgttttctgccttgcttgacaattgatttgtttttaaaggaaagttatgggtagatcctcttttttctttcccattctttttttcttcttttatactggagggagggaaacggaggcgaggaccacacacgcgcaggcagaggctgaaaaggcccgaggtgggttttcctgtttaatatcaaaggaggccgaataatgggtttcctcggtccggctaggccggcctttgactcaattggaaatgcaaaggcagcttttgcctattctctggctgctggctgagaccctaaatttccgtaggaaatcgtcggacatgcacttaatcggtctttgcaatctttccctcgaagttgcacgcgggtctgggcggaggaggcgaggaaaccctggattcgaaccagcgcctttctctccttcaggcctccgcccggggacaggcgccggtcccccgccccggcgcatccgccccgtggggacacttaccagcccctgcatcttgccgtcggcgcccatgcagaggtaccgcacgctgtgcacgcccttgatggccacggtccgcagagcgactgccttgatctccagcaaacctaggcgcaggggaagcgagaagctgcagcaaggaccgctgggcccgcaccacgtgggtgcggtcggtccacaagcctgtgcttctccctagcgtcccgcgctgtttggggactaacggagggatcctaacgtccaggtgccaaaacctggggttcccaggagttgaggggtccgcaggagcctaagggtggcaaaggaaggaagggcgctggggtggggcgcgcgcagcggggtggggtgcgcgcggcggggcgggcgggggtgctggcgggcactcactgtgcgcgctctggccccgcgcgcagtccacgacgccgtcggcacggatgcgcaggaagcagctggagagcccgtgggggccggaggtgtacaggtgccgcaggcggatggggtcgccccagccgtagtgcacgtggggccccgcgtccgagaaggcgagggggcgcccggccacggccagccagaggccggccaggatccatacgtggaccaccacacacccgctccgcatggcacctccctggggctctcggcgcagctccggcgatgggggtgcgggaggctgggcggcgaccgggatgcgctgcggggctgtgagtgccgggttgggatggtcgtggccctagatcctggacgcagcgctcctgctctgacggcgcggcggctccgggccggcagccttatatagtagcgccttacgggccccacgggtaggtgcccaagacacccgagcatttcttatcgggattgcatcaagcctccgccccccgcacacacccactcacaccccgcctccggccccagccccagccccctccccgggcccgggcaggcaggcggcggcttcttgtcccagccggggtgaccccgcccaggccgttcggatctgcgggaggaggaggcctcgcttagcggccgggtttcggggaactcctccccaccgcgcagcggccccgaggttcttggctgggagagtttgactttgtaaagcaatcgacaactggggcccttcccccaggcctcaggctcccagtggatgcactcggcgtggggcactagcgggggcggggtcaggaaccccggggccagaggttggggggcaccgagttttgcccccttcaccctctgtcgggaaaagcctcacctcggccttagtgcccttccccttaaaagcccactcgcactccctcccccgactttcgcagccccgcacatctgacgtcaaagccgtcccgtagaattttccccggcagttccgacagtctcaggttctttcagcttcatcttcttgcaattcctgccccgccccttttatccgggtaaattgccccccgacggggggccgggcgcgctctcggccggcggggaaacaatggaagccgcgcggactgtaggtggcgccgcagcctcggcgtccgcctgggctttgcgctcctggccccgcgcccctgcctgctccgcgctcgccccggccccgcggctgtgcgcgagatgcaacctgaaagggggcactgggaaggaggctctcgggcagggtgggcgggccagctgcgggattggtgaaccccagcttctcggctggagggtggtggaggcaggggcgcagggagggaggcctgggcctccgtttcccgttttttgagctgtcttgtgtcgggggtctggtttttgagtccccgagtccctgcgcacggggtcaggaggaacagcacggtcggggaggtcgagagcgccttacctggtggggaggggtcgggaaggggcccaggaacggtgatgggcgcccctggcgtccgggcaggtgccaggtgaggaaagaaatgggggccgctccatgaagcggttcctgccaataaagaaaacgacatccagagaatacccaggcggggaataaaggggtcctcctacggggctttggtttaactctaattatttcttgttattcttccaaacccccagctcctggatgtggggccccaggaggctggttttgggggcagagccctcctggcccagcgcaaaggcgatggggagggcaaacaggagagacagcgagagaaatgccaggcctaatgaatttcaatgagcagaggccacattcattccccagtcagtgactggcgttaatgactgagggcgcagcaaatgtcaccaggaaagtctttacaaaaagacatcatcccgaaggctttctagaccagggacccccacgctgtgtgtcttggttcagaaagccgtggcttctgttaaatctaattacttcccccctgtggctttaaatcgacggcggctcctattaaacttaattaccctcccctgcagctttcgttttaaagatccgtggtaaatgcgtgataaatgctcttgagggcgatggcagaggctgcactgggggacacgacccaaaccgggtgggggcgatggcagcctctggttccacccctacccctctgcagccccttccagggacatggggaagagagtggctgatgcgatcagggaggtggggaaatgaggaaggcggctgctgtcccccagcccctgttctgagcgcttcatggaggttctcagctcaaatctccacaagagcccccacagtattctattcctccctcccccatggagcaggagggaaatggccccagaaaagtggccgagtaacccaaggtcgcacactctgttagtggtgaagttggaatttgaacccaaacagtggggctcgtaaatccaggctgtgctgcgtcttatcccgggacaggggctccggggtcagacccactgtagcatggatcacacccggccactccctgggtaggtcgtggaccgctgacccattgccctctcagcttgctctcaggcttgtcctgagggtgacaaggaagaggggacagagagggcctgggatgtagcactcatgaaggtgttgatggcaggccttgaggtcagctgtgtgccggccatctcacaggcacag

SEQ ID NO: 914696 - DNA, 4001 bp, Homo sapiens
tcgacgcaggacaggggcggctgcgggcgcgcgccctcccctccccgtgagcagcctacaccaagaagtttggatgctgtgcgactccgagggggagcctggctttggagagaaccggagtgtcttagtgagacgaattccgcgcactcggaccccctggtgacagctggtgcccaccgtgcggctccggaggcgcatgtccccaggacgccctctcagggctgcggctttcctggaggaagccgcggtttgctgaggccgccgccgccaccttcaagcggcggaaccgcttcctgcgcccggggccggagccgagcgccgcgcggagcacccgaggacagctgtggtcttgactgccctcccacgctccccacgcggtcctcccgggccctgagctccgctatcctgctcctcaaagggctcggcgcgggcctcaggtccctgtgaccagaggagcccaaccgtgtagtccggcagactcccgcggtgagcgcagcccgggccgcgggtcctgcgtgcgggggccggagtgtgtgtgtctgcacccccaggcccgggcggacaccgttccgcgctcgtgatccgcacgtcccgacggcgagggcctccaccctcctgtcgctgtgcggccagggcggaggcgggggaggtgcagattccagcgcggggaataactgtcggtggcggccgcggccagggaaccgagctccgcagggcaagagtcctccgcgcagaggcagcagcgggggcggccacctgggcagccgcgagcggggagggcggaggggacggcggggcgtccaggggtcggcaggaggaggagaagtcgtcaaaataataaagaggatgataaatgccttgtccggctccttttctccgacacattcaaagggcttaaacttgtcagagctgcccaaagcagcagagcctggagccccggggtcgcctagctcgcgtcccctcagaccagcgggccggaccggggacggactctgacagccgccggcgccctcttcggacgtgaacgcccatgcccccgagttctgctcgaaccccagcgcgcgctcttctcccggacgtgtaggttgaggagggcaccctggcattccccttctggcagcgggaggcagacggtcttttcccggacaccccgggcgcaccatgccttctcccgggccagacccctccccggcgccgcctcccccgcggggccccgcagcgcgccttctcccgggcccgacccctcccggcgccgcttcccccggggccccgcagcgtccggcactcactgtaggcgctgttctccaggctgccgttgacgcggccgctcgggtgcagctggaggtggtacttcgtggcgcagtagagcttgcggcgccggggcgccccgccaaggtgctcgtagacgccgccacggccgcccgcatcgcgccgcaaccgcgccccagggcccgctgcgggccagccgggctccagcaggctgagcagtagcagccagattaggcccatcgtggcatcgcgcccgccccgcggcggcggcggctgcaggcgagcgcggcgcccatggaaggggcggcagccggacagctgcgaggtgctcggagcgggatcccgcgcctggagatgctgactccggcttcgcgggaaaggtgggggaagaagggggaagggtgggcgagagagagaaagagagggagagtgggagagggagagggagagagggaacgcgagtccctttaatttccacccaggagcaatgaaatttccgttgctgcgcaaagcgctgaaagaaaggacggttcgccaacaaaaggccgacgtggtccccaggcggaggcgcgggaggggcgggaggccggcgggtggggagccccgcggggctcggggttcgggccgggcgccgtctgcatacactcgccgccagcgcaccgccgtcgagccgcggctccgctccgcagcgcgccccacgcccccgaaagccctcctggctctgaaaggtcccctacccgcccctcccccgccccctcccccagaccaattatgcctccgaaaattatagaccgaggccttgaggaggccgccccaggccctgtcaccccctcccgctccccatcaatccccctgcacaatggggccgccgccgatgactgatgtccgtgaaaacaacttgcggggaagtcgagctgacaaacgcccattaaaggcggcgcataatgaaggggaccgcggagggcggcggcagggaggctccggggcgcgggcacgcgtggggagctccgggtttgtgtctgcgcccggcgcttcctgcaggagcagtggcgctgtcctcagccttgcaaggcgcggggcaggccgggtctggagatgctatctccttttgcgcacaccaactgggcacccggagtggtggggttagctctcgtctggcaggcctcggaggatcccgtcccagtgacggtccagagaggggcctggggaggcgggaggagggacgcgagagccagagaagtgggcgccgacagagagccctagagagaaagagatgcagatagagacagacagaaacggaggaggaaaggacgggaaagacatggaaaatgtgaatgacagagatcgccaaaaagaggaggcaggggagatggaaagaagacagagccgcggagaacacccagagaaaagcacagggagtctggtagccacagcgggtgggtgatgacaagaggaacccggtagaagctgggaatgggtgtgggggagtcctggcctggaggatctgaatcagtgcagatgcccaggtggtcccctggactgtgtgggggtcaaggtgtatctcagggggcccagtgaagaggggcttcaaaaagtatcgggaaaagccatgtccccacccatttctcttgcttcctggtcctctgtcccccagggtcctggggccagcaggaagcaggggccagcacaggggatttgcttctctcaaccctgccccagaggagggcacgctgtggagtccaggggtctaggccacagctttggctccaagttgaccaggggctctggggtgagttgggtgggctgacattccccagcctgccatctgcatcagggtttggggtcaggcaagtgtgcagggcaccatgagctgtggcagtgagcacacacccctgggacgtgtccagctcccatggcccaatacacacagggcagtgtgtcctctgtgagcccactccagcgtgcacagggtccaggtggccatcctgaaggagggcgcccccaagccatccccgagcacctcagtcttagtcagggtctcctagccgctgccccagggccagcttgtgagagtccttgaacaggccagaggccagccactgaactactggagcctcagactcttgatggagactgtgttacaggggtcagaggctggtgacaggaaagccccaaaggacagcagcaagaggagagcttgtccagtgcagccctgtgcaggcctgggctgggatgtgtggtcacctgggctccctaagaggcatggaagaggcacaggaaggaggtcgctgctctaaatgccttagctctgctacctcctgacacctggccaagaagagaggagatgtagtggcgggggtggggggtgcacaagaaattcagagaggggtgcagtcagggggcacagtctgacagagagaggagagaggacacaataatgttttaagagagagagagcaagagcagcctgctggggccaggggacttccgatgccctttcctgtcaaggctccggctgcctccttggcaggaccccctctggaggactgggaggagccagaaaaatctgaccaaggcaatctgggtgtccatgcccctcctgctctacacctggggcccccagcagttcccagggaaactcccgggctctggtctccagccctgcccactgccaggttgccgtgtgcccgagaacccaagatgagggcaggggctgctgccctgaagcagga

SEQ ID NO: 914697 - DNA, 4001 bp, Homo sapiens
cggggtacttgtaggactcgtaggcgttgtagttgttgggaaggagaatctccttgaacgtgcactcatcggtgaagaagggctgcagcaaagcagggcagtgtcagggctggggcacctcttgggcaaggtacccagcctgaagccaggggtcagaacccccttctgtcccaccccccaccctgggctgagatgtctctgctgagcagttaaggtgtcaagacccacacagggtgagaaggggacatggccagcccacaacagctggtgctctcaccacctgccctgcacctagcagccagagaattcattccctccgtgtccagcctcaagcccgcagttccaacactgagacctacccctctggactagagaagggaagggctctcaatagcgccctttcctcggtctgggaggggcccactcagggatggcaggaacctcattgttcctgccttggggctgcttcctttgtctggggaggcctgccggtcccgtgacctggtgaccctgccacccctccaagacccaggcacaggtggggctggagaagccacgagcctgctagccatgtccgctgttcccaactaggtgcctagccagacccctgcggtactcaccgagccatagagcttgcccttgctgctcatggccacgaagaaccggctggccacgccgaagatgctcaccacgccccgctccacgggcgagagctccagcaggcctgggggcggggcgcaggtcattgcggggcaggtgatccctggcccactccgcccctcggcttgttcgcctccggggaccctatttctggggtggggttggggataaagggccagggttcccggcgcagccgcccccaagggcctccagagcccaagctgccctctagggcctccggagcccaagcctgcgctagctcagattagcttgcctgtgtaggggacccccggcggccgcacccagtcccggaccttcagacgcgagcccgaccccagcggttccccagcctgggccaggccggggcgcgtgtctcgggccccctgtggctgcaccgcgcgccctgtgcccacgggcgaaggcgctggaattcggcgctcggagcccgagtttctgaaggcgggaggcggcgcccgacctcaggggttgcgctgggctgccggagccaagagtgtctgcgtccccagccccgcgtcagaagggaccggagcccgagtccgccccggttcccggggcccccgagcaggtgcccgccgagggtctcagagtgtgactgagcgggttggcccggcggccgttgccccccgcccccgccccttcgcgcctggccgcgccactcactgtcgcgggtgtccgcgtgcgcgccgccgatgcggccgtcggggagcgcctggaggtggaagccgatgcccacgttgcagtagagccgccgcagccgcttgatgcccagcaggtagtcgccggcgccgctctggacggccgcctccttgggctgcgctgccaccggcaggcgcgccaacgagagcgccaccaggctctcccagcggcgctccagctcggcctccagcgtgccgttgggtgcagtgggtgcggcggcgccccctcggcccgcccagggcgccagcaaggccagcaggaccgccgggagcagcgctaccgcggccgtcccgggccccgacatcccggcccgagggccgtgcgtcggtcaggcggtcagtgcgcccgggaagctggggggcagagctgcgcctgtggcgtcccgcgggagcgcacggccgacctcgggcaggagtgcgcaaccgaggaggtgcgggaggcaagcgacggggcccccgggcgccgggctctaccccggctgcatggagcggcgagccgggcggaaagcgcgcggctggagctgggactctgaggagcagtgcgcgcctccctgagcgccaggcccgcccgaggccgagccgctatatatatagcccggcgccccctcctactcgcccgctcccgcggggggccgttcgcgttctcctgggcgcccggggcgctgtggcgttcgcggctggtcgcaggccgcctgccaatcagggccgggggaagggaggaggctggggactagcgccgcgagtgccacctggagggaccccggcccccacccttggctccgcccggcccacggacctgttcgtcccgccccttggcggctcctacacttctgcttttcagccagttttgcctcttgcactttgtccctgcctgtccccgtccccgtctccctctctgctccggccgccttggcgcagccctaactcgggcatccgaagctcctagtgggcgcagaagccagcggctgctgcctgcccttcgcctttcggaggctcacgggaacttggttcctttgctggggccttgaggaccggcctgggaaggaggggtggataagagcagtaagcgacaccggggcctggctgggcaagggaggaccctttggctacaggcgggagggaggccacccccaccccctaggtcttggccccacaggcttggcgcgtttctgggctggagttctgaatacctggtggaggtccacctgagccaaagggcaaggtggcagagatgcacccagggaggcctggtcctgcaccccctacacacacacccttccgtgaaaggacaggtagcagggcatagggccagaggggatattcagcatcccctgctcctttgattccacagcagaaatatccatgtaccatagccagagccctcaatctagcagggacccaggccaggcctctggaagcctcccctctctcactcatggttctacctcccactgtgcccattatggcctgatggggactgtcctagctagatgcaggcccacctaggtgtgaaaacccctgttctttgtggtccctgaggagcctgcctggcccttcctgcaggcccgcctagccacagctgcagggggcttggtgcctaccccatctctcataccaccagcacctgtgaccagagatgtccccaggccaccgcagcctcctccacctccaccgcatccccacagggagattcctgggaccccttcagaaccctgctggggcttattcgtgcccctggaggggacctgggaggcttgagggctcttctctgaggtgcagaaaggggggcacttgggggtcatcaagtggctttggcaggaccggaacctcagctccgcaccccttgagaggatctttgttcctccttgggcctgcagcctgcttgggcagcgccacccagacctggaccttcctgggctgcagctcacagcttcgagatgcaacccggctgcctctgggtcctggggtcccccagatgagcctgcagatctggtgccaaatagacatcgttggccagggtgcagggtgcagggtgcaggggacctagaacccatccctcacttgctgtgttgtctttccatctctaggtccctgactccccatttgcaaaatgacatgggaggtgggctttcctccctcagcctggggccaaccgaacacaccctctggggaagtgagacccaggcctggagacccacctgtgccagctgacctgagcagagggactctgatgtcttcccccggcttttgataggatgaggctcctttcttcccaggactcccacagcaagctcaatttagggcttcccaaggacccctccctgtctctcctatttgctgtgagttcagcaaaggacgctgcaggcagctgatatatctcccagaactgcaggcccacccacacaggataggtgcttgtggtgactggggactgacagccagcagggcttttgggagctgggaattcccagcagaactgatctggaatctggcttccactttgctccgggtgctccctgagcacactctcaacctccgcaggccctggcctcctcagctgtgcaatggaggcaacaaaagcacaggtaaggaagaattgcggatgaaggatgcaccaggaagcac

SEQ ID NO: 914698 - DNA, 4001 bp, Homo sapiens
gctaaggagttattagaattaggattccccctacttgaagtacaagtttccaataaacagacagacagaagcaaaaccccaaatgagaaagaatacattggtaacctaaatcataggcatttgtgggtatgttcatacaatctacctatttctttgtaatttactatagcactgatgacaaagcatagacatacaatgagaaagagcaaatcagcatatcagtgtgactgtgcaaccactacaaagcttggccttcttaaatgtggccactttaacttacacacacccacagaggcatcagaaatctccctgcaaacacgatttgcctatagttttgtggcaatactgttacatagaacaaaaacaactctcagaccatggttaataaataagagagaaaagaagtaagaaacaacttccatgggttggcaggcatgcaaagcagcaccttgaacctcatttgaaaaacaggcaactgggatagcttttggagcccaggagtgaaggctagaggctgaaaggagctatgcactattatctttgggtatttccacataatctgcaggatggggaagtttaattccgcaccacataaactgtgctcttttagatgtggctgaaacgggtgtctctgcagaattagaaacccatctagaaatgacattgcttaaaattgttctttccaggtgacaattccataacaatcacataaataatgtacaaaaacaaaactaaaaacaaagtcactcaagtgtccaatttttctcttttgaaagatgaccttagatgtattctcaaagtgcaaatcgggatataaaaaaatagtaggtatgggggaaatgtagccccatcttctgtcccccaccctccaaaacggggctgatttgattccctctttctagcatttgtatccttccacctatactttaagataatcatttttcagccgacctagtcgggtcccatggctcctaatggtgagggccagcagctcgtatttgtccctgagccccacagagatgtccagtgtctccttcagcagggacctggtgtggaccagcattcccagaaagtcctcgttgagcctgctctcctgccggctgtcctgttcctggccctgcttgaacttgctctccagctcagtgagggatttgtccgagttggagtaggcatccccgatctggtgggactcccgccgcaggtacttgccatagctctcttccccgtctaggtcgtaggagatgcttttgctgatgccctccagcacgcgcccagcatcctccacctggcggcccagcacggtgaactcctcccgcagggtgaggctcagcaggctgccaacctggctcccctccccctgggagcagcgcctgtggtcactcaccctgaagagcagctggcacttctcggggtcatcgttctcctcatagtccccatcgggcacgaagtagtggtgcagagtcccattggacatctctgggtagagggggccatcgaagtagccttgacacaggtggcagaagaaactcatgcagaagaacttcagaaacaccattctggatattcaggatggccagggaccccaggaggagactttttacccaggcacaaggaagggagtgtctttgcgagtcagcgtctccctgagacagcgtccgcctcagtcccagctggcttgctgctccctggcccccagtccccagcaggcttcatgtggctctgcacaccagcgtctgggtagcgcgcccgccgcagcgcaggatgcacccacccttgcgcccctcgctcggtgactggaactcctccggcacaggcgtagcggggaacccctcctccggggccctggcaagatgctggctctgttgccctcctctcggagtttccccttgctcccgggagatggagtgtgtagctggagagaaaggctcttgccccctgatagtatttcaatttctggactgggtgggaatgcggagcttttcctttggctaaagatatcctgaggatctctctgctctcaaattacagctggtttcgtcacttggaagccagggaacaagtttggaaaagaacctctcaccaggtctccactattaaaggtacagggtcgctttttaaaggttggaagggaagactctacaatagaatttagctcgaaagagaaaatgagaagagaataaatggaatttccaccacaaaaaccctggtttgttattgacatattgggagggggaaggaatgattaccctggaaaaatgccatttcacgtgtctcaataaatatcaggttggattttctgagtatatctatttttatctttaaaactttgtgactttgaaggcaaatttaaagtgtcagaaattacagttttgtttgaaaatgattggttaattaaaatttatatcaacaatactttggatgaaatgaaaatacagaaagttgcttaatgtatagtctttagtatgtataagaacagaagcagaaaaatgaaattttgccagcttagtgagttaaaggacaatgagatccttatttaattttatgaaacaatgctaagcatctgcattgaatcttgaacctaatgcttttatagttgttgcctcttttgagagtcttgaaagcttttgaagaatgtttctggtactattatgcccattttccagatggagaaatgaaggagcagaatgttaagcaaattgattatagtcacacagttagactttagttgagccagaactaattgtcacaaggtcttttaatttaacttggggggagaaaaacaatgtttttttttttttttttaacctggccattttaatttctaatttatgaacttattggcaaatggccatcctaaaggccattcatttgtttaatgaatatttcttgagcatttactgcatgccaaaatctatttgaggtagtgggaatacagctgtgaacaaaaataaagacaaatccttgccttcctggcacttatattttgggaaatagaaaacttaaatttttgaaaataggtcaggcgtggtggctcacgtctgtaattccagcactttgggaggcagaggtgggtggatcacttgaggtcagaagttcgagaccagcctgaccaacatggtgaaactccatctctactgaaaatacaaaaaaaaaaaaaaaaaatagctggacatggtggtgcatgcctgtaatcccagttactcagggggctaagacaggagtattgcttgaatccaggagagggaggttgctgtgagcctagatcgcaccactgcagtccagcctgggtgacagagtaagaccttttctcaaaaaaagaaaaatatgtaaataaataagatgtaagttggacatcaatagggctgtggaagaaaagaaacagaggaagcatgggaaagcagaagcaggcagcactcctgtttctatgggtattttctccttcttccttgaaatgtaactgaaacattcatgttgacttgccagtgttccatacctatctccctccccaagtaataagggactggcttcattcagactcacagtgccacactgttctgggacagttatactcattgtcatcactttcatggatataaacaacccagactcctgcagagaaaatgagaagtctggttaagtaacttgatattttgctgatgtggtatcacatgcatggagtttctgaagcatgttgactgcacattttcattcttatccagatacttagcatcatggaaacatagaccaaaggagttttcttactgtttatgccaagtggaagaccaaggcctattttcactctatcccagaagaaaactacaacttccttcagttgaaagactggactgttggactcaagagctacattgcttcattcctttttctctgggacattcagaaatgacaacagatggattcatattggctgcttggccaaagaagcgaagaggaatttactctgattcattccatttcttgcacaatctctctctgacttacta

SEQ ID NO: 914699 - DNA, 4001 bp, Homo sapiens
gctgatttagcatttgttattccttcaaccaactattagttattagtacttgttatcaaatcaaatgcttagcaactcctgctgtatcttgccttggataaatgtttactcaatcttatctctaaatccaaccccattttagcaccatgctctccagatcttcacaagtttgagttggaagagactttcctggctaagccctagaaactaaaaaataaaaaacaaatgctaagctataaacagaaagctcacaggagatacaaaagaaaggcatcaaagacccagaagggttacttcttcctggcgtaccaaaaaggcttgtggagaaggtggcatctcacctcttgtcttggatttcaaggggtagatattgccaagaacagtaccctccaggtagaagcaacatgagtaaaggaaagcctggggctggagaaatgtaagcctagagaggtctgcagggatgagataacaggacagtccataggtcaaagccaaggagtgcagctgctacccaggaggcagtgggagccaatgaaagtttatcaggggtctgataaaatttcaggtcattctgaaaggtcactctggccatacagtacaggatagcttggaaggcacaacagggagccaggcacggtggctcacgcctgtaatgtcagcactttgggaggccgaggcggatgatcacttgaggccaggagttcaagacaagcctggccaacatggtgaaaccctgtctctactaacaatacaaaaattagctgggtgtgggagcgggcgcctgtaatctcagctactgcagaggctgaggcacaagaattacctgaacccaggaggcggaggttgcagtgagctgaggtcgcgccactgcactccagcttgggccacagagcaagactccatctcgaaaaaaaaaaaaaaaaaggaggggaaaggggaagggaggagaagactaggtatgaagctgctgccacaatcagaggctggaactgggccagtggccaaagggagggagtgaagtgtagatgggatgctgtgtccgtgtggatgcagtgcatacctgtctccggcagctcttgagggtgatgcctgttttggtgctgatgtcatccaggtctttcttggtgcctttggacagcttcttgcccagcacctcccgaacaaaggcctcatcaaaggcatagtaccttgtggagtcagagaacaccattgaccctccataaaagacaggaaagggagtctggcggggcctagcagggcctaggtctgaccccttccactctcaactttctgatggctgggtaaatcccatccctccctgggcctgtttcagccggcaaaatgggtatacagtcagactggttgatgtctccaccatcccagagggtgagcacctctcgatgagtagtgcctgccgggagggcggaatctggaagatgagctggtgcagtagcttgggcggcgcatgcagcagccgctcgagcatgtggaaggtgcggtaatggtccatggtgtcgctctgcagcaccgctgccgtggcgccagtctgctccaggattcccgagcgcacccgcagggccaccgcgtcggtcactggaaagcggacgctagcatcaggccccgccccgccgacgccagaggcccttaagggtttccatcccagacccctataacacctcttattcccaggcgctcgcccacttccctaaaggatgcccaagtcttagccccgccccctctcccattcaacacaaccgctccgccgactggcttccccacacgcccctcacggacccgagtaaccatcgagccagaggcgatacacgtcctcgtcgataagggtcgtgttccccacgaagatgtccagctcactggtcatggcgacgcccggggccgcagcgccccgagcaggagcgagcactgctcgggactggcgcgccgccttcaggccacttccgggagcgccgagattccgctcgcggcatcgggacccagcttatgaccacttccgggacacagccagtcggggaggggacggggcgggagcggcgagggaagagagggggaggcctgcgcggaggagcaccgcttcctcccgccgggagggggagtcccgggctcctgcgtcctgtctccctccccggccgtctgcaggagcacgaagggagtgcctcctcttcgtctcctcggtccccgtaacttctcccctcacttcctcctggcttttctcccaccttctctgccctcttcgggacctcctaagtttgacctgtatcctaaacttaggggtttcacagggctctatcctaaatctccgcaaaaatggggtatgacccgacttcctcgggctcttgctggagactggtttgtccatcctgcgcatgagcacctctcctgggtttggggcacctgctcccaccttggttttaatcccacccccagccccacgagctactgacgtctctaattctgcccctccgagctctgcctggaagtccacatccggaggggccgcctatcggccaagtctatccacactcttcccgtaagcccctcaaaagctcaacatattctagacagacctctgcctctccccatttgtttctttcctgcgtccctatctcagtgacagccctaacatccaccagttctcatacgagaaacctgggcgttcttccagactcctctctccccacattcagttcggctgatttgcctcccgaatatttctagtatctgtttgtcctctccacccccactgatgctgccccagccgtctttctgcttagctctccttgctcttgctctttgacaccgttactaatctccctgtttatgtcccctccccgcagggtccggcccacacagatcagcccaatctttttaaatacattttttttttcgagacagcgtctcgctctgtcgcccaggctggagtgcagtggcgcgatctcggctcactgcaacctccgcctcccgggttcaagcagttctctgcctcagcctcccgagtagctgagattacaggctcctcccaccacgcccggctaatttttgtatttttagtagaaacggggtttcaccatcttggccagttaaaggcatattttaaaatgttactcccttgcttaacatccttacaaatgttactctcttgcttaacatccttagtggcctttggaaatgctccaacctggtactggaagttcttaagaatctggcttttacctacctttgaagcctcgctctctctctcttagcattttctcgacacatctgcttttcaaaaaccaagctatcctcattgttcctaaagcagctaggctctttcgggcaccagtgtctttcactatgttattctctctccctgaaatagctctttacttggcaaagtcctatggatctaccagagcctcttggatagcatctcttttgggaaccctcttaaggaccctcagaccatactcctcccggatttatttcttgcttaacacagcttgacttcccggacagactgcgacctccttgaggatggaatcggtattttggttaaatttatttctgcatgggccttgcacataaaaaacgtttattgaacaaacgaatcctgtatgttcctccccccaggcaggaaacgctccctgggagggagggtagtctattggtgagctaggacgtttggactcagggttccgaggaaccaggagcgatccttagtgggccgagacttccgaatttgatcaaaggtaaagagggactggagagcggtccatctgacttctgtgggggatgggcaggagtcaggggcggacgcctgaatcttgtttctcagaagagccgagaggcctaggctcaagcttggggcgatccggtacttggaggttcgaagctcctagtttcgggttgagaccgatgtggagggcgatgacgcgcgggttccttgacatcgaggatcagtaacacccggagtgggtggggaacgaggggggcggcccctgagc

SEQ ID NO: 914700 - DNA, 4001 bp, Homo sapiens
taagctgggtggagagaatgttacacttctcgcctcggtgagttcgtcctcccagaactttgaaaggaaacagcgtgggattgaaagaaaggggcaggtgggtgaaaagctgaagtttttagacacctttgcgggtgggcgttggccggctggtccctgacagtggcagaggcgaccgcccttccccccatcatccataccccagccccagatctctctcttttcctcccggtgacactaagtcccagaccggcggccgtacttggccttacagtgcaaaatgtgcttggcgaggaagtcgaggcggcgctgtagcagctgagcgtgggggtctgcaagggcggccagctcggggaagcgaggctcgtggcgccggtagaggcgcagcagccgggccgcggcgtcctgtccgcggtgcagctccaggacgcgccgcgcggtccgctcgcggaacacgcacactgactgcaacagcggctcgttatacttgtcccacatgcctgctacccggtagccgtgcaccaagcccgcctcattgtccagaaagaccagcgccccgcccggaccgcggtgcaggttgctggtggcacgctgcatgacgcgcgggtcccactgcaggctgaagaggttgcttacgagccggtcgaagttggccgtcaggtagtcgaaaaggattaagtcggtccattgtactaggtccaccagctccgcctggctgaggttggccagctcacccccggcatcccggagggggcgcagacggccgtcctccgagcgccagggcgcgggcaccaccacgtccgtgaggttgggcagccagcgtgtcaggctcaccacgctgccctcggtccagtgcgcagcgcgcagctcctcctgcacctgcgcccactgcgcgccccgagcctccacccgagccagtgccagcggcggcacgtggcgctggaggcccagcaggcgcgccagatagtaagacagggcctcgccctgaatctgctccgggttgatgccgtagcgcacgcaggcgcgggtgccgtcggcaaaacgggccagtcggttggagctgcgcccgcaacccccgcgctccagggccaccatccgggcgccgcgagccgcctccagccacgccgccgcctgggcctccgaaaagcccgggggcacctgctcctccaggccgcggctccagaagacgcccccgtgcaccgcggcgctctcctccggccggggctgcctggctgacacgtgccacctgggctcgctccgggactgccggggcgggccgtccgcgccggccgccagggtgagcagcgcccggaaagttttcagggagccgccgcgggcgtcccacgccaggggcgggggcagagggaagcgaggcgcgggcgcggggccgccgctccgggccgggcgccgtgggagtcggtcttcgggcggccgggaggcgggcagctcggtccgcggcggcaggagccctccccacagcgccagcagcgagcccagcgccagcagccagagccccgcggtggcggcggcgccccgcatcctcctgcccatgctcccgcggctgtgccggtgcgccgccgccgcttcaagccgagcccaggcacccgggtcccggcggcgaggcgggcccggcagtttgtgggctccggggcttcgggcgcttcggccccatcgcggccgcggggcgctgcggggctctgtccggcgctccgcccggcgctgggaactcgagtccccgccgcttcccagctgcttttgtatttcgctgtgagaccctccggtgggcgcgattcacaggcgcccggaccacgtgggagccagggggatccccctccccctcctccgcctccgctccccgccccccgctcccccgcccccttcctctcctcttccacttaaagcggcgatggctccttccgagagggagaggcggccccacactcggtccgggacttgggggcctggaggaagccggactggctgcgcccgcgccggggcgtaggagggggtggcgcagagccggagtctggggcctggcgggagggacgcgccctgggccctcgcgggggtgtcttggtcgccgggtccctttgcctaggcagcgcgggtctcctgcaaacttcagacagatttccacctctttccgagctccgccaggctaggatcaggcagggtccctttgctttctcagtttctgtctgggtgattcacgctgctttatgtaaatctctgggaatgtctccgagccacagaggatgtgattccagcggaaagaggaacccgctgtagccaacaactttgaaccgacactcccttttccgagctcgcacatcagcaccaatcagtattggccgctctgcctttcccaacggactcccagggaatgaagcctcgctgtgcacgtgccccttgaacacctaggccatctcccattcattcatgcatccattcaacacagcgactgcccctcagttctggttctgcttaccagaagcaaaatccacagatccgggtcccagtgctgctgaaatttacattccagtgggactctcaggttgctaagagagattatagccatccaacctcgtgttggggagaggggagtcagggacgacttttcgaaagaaatgataccgttttgtccatgaggaaactgaggcacagagaagggatgggtgttgctcaggattgcacaattagcaaggggcgaagctaaaagtcaaactcaggtctcctggccgcatgcacttgattttccctccattaagaaagatcagtattttttttttaatcaagtcagcattctcaagtttgaaattcactgtcatttgaccactttgttccccaaatgtgatttttcaattaaaaggatttttcaaatggaaaggaaaaaaacctcaatcccatactgcatttgatttactgcttttacgatttaagggaaaaagaaatggtggtggtggtgggggagggaggtggtgaaggagcaaagaaaacaaaatgaacaacctcttcaccccaacacatcttccagccacctctgggttacatttaccaggaaaacttggatgccagtcggccctcccttacctctctgtatcagaatgagtcccagatccacactgagattcccagggtagacacaagatcaggggcatggtggaatccacctctcaaaggccagagtttgaaatctgtttccttacatggtgtgtatcttttctctcctttcatcttcccatcaggtgcacatgggggttttcaactggactacctcatcagttggcactgattatgttttattctccaaagaaaaaacgttctagggtgatagagcgttccagggtgataaagcagacactcttatgtttatggctgagcagaggcatcaaaaaaccacatttggagtattgcagcactgacccaggatacagtcaagtgttttcactggtgtggttaagtacatactggatgaactgttgaatctgttcccaaccacatggtggctataccatgccattttataactcttatctgataatgagattactatggctcccatatggttgcatcgaaatatattaatccattcaaaggtcttatttttttggcctatgtaagcccctcctcatctttccctagcaggcagggactatgtcttatttttttatttcttataccacctaacatagtatattacactaaataagcactcaataaatttaatttttttgtcttttggtttaacttctactgggatatatatgtatttatttgaaaggcagcctctttcagcgtgggcaaactataagcaagatcgccacctagtgggcataagtagagtatcatctaattggagaaaagtagacatttttaactggatgattaattgttgaagttaaattcggaagactattaaatgtctactgtgtaccaagctatgtcctaggggatatggagaaatccaaagtagttggggtctctgtctttttggctgctaa

SEQ ID NO: 914701 - DNA, 4001 bp, Homo sapiens
tttccccatcaagctgcccccccacgcccacccacagccctggtggtcagtcctttttgttttttgagatggagtctctgttgccatggctggagtgcagcggcgtgatctcgcctccctgcagcctctgcctcccgggttcaagcaattcttccacctcagcctcccaagtagctgggattataggcgcccgccaccacgcctggctaattttgtatttttagcagagaaagtttcatcatgaggccaaactggtctcaaattcctgacctcaggtgatccacccgcctcggcctcccaaagtgctgggattacaggggtgagccactgcgcccagctggtcatagttctttaagaggacagagccttgggcagctcacagtacactgtcactgcctgctggtgcccacctgggcagtaggcaagggcaaggcagaaccatggaaactggcttagaggcgagaggggacttgcccaaggtcacctacctggcttatggagaaccagactcccaagcactctctggtcctcggaagccccacccactcccaaaaggcccgcccaacccactcaccgtgtagtgcatgtgcaggacatcccctttgcgcgatttgatgggacagtggtccacccgcttcttgaccccgatctgcagcttccttttgccctcggcccccgtggccgtggccacggcgctcaggcagatggacagtactgtcaggacccggaaccagctcagcctcatgtctctgtgggcacagaccccgaccgaccgactgaacgtgggggagggcagggagagtatggaacacgggtaggtaacaggagggttccaccgccactgtatcttccttgccccgggggatcccctttgtcccgggtcaccgccctctcccccgggctccggggccacacttaccagtccagtgagaagggggcttggccgaggaccccagcagcggggggagggggtcaggggaggccacagcagccagggacccgcccctttgctcacccccataccttccctccctcccagtccccacctccgctcttcagttcccgcctgtccctttacgcaaagtccagaccctatctggctgcactgcagttgccccgactgggcggccccactcacgccacacccagctgcccccggtccagcacaccaacacctctgcggccgctgcagggggccggccccgaggcacccacacatccccactgggtggctccgaggagcccgggtcctcgggagataccccccagcctggccctgtgcttccgcccggggcgccgccccaactctgagcccttgggggtctccggggcacccagactggccctgtgtctgctggccgccgagcccgctccacccacaccacctctcccggtggagttctcggcctacggcgtccccaagcccggccaccacggagaccacccccgcgaggacgcccggggccattactcgggccaggctcctcacttggctccttggcaccgcccttcggaggacgcggtaccgcccccgggcctgcagccccgccttcgacagaactagaccccttttccggagccgtagccacgccactcaccggctgaagccccgcccccagcgcctccgctccgtccccctctgcttccgaccccgaggctccgcctttcacctcctccagctcctccttcaagagccaggctccgtcccccgaccctcctagctccgccccccgccgccgggctccgccttccactggcaccagctcggaggtcccacccgtcccggttccacgtcccgccccgagtcccaggactccgccccgtgcggcgtgagaaccctccccctgcggcatctccggacagctccggcccccacccccaatttcctcgtcacctagctctcgttgacactcggagcccggtccgcttctgcccggcctgatccagcctgccctcttgcaccccggctccccccagcccgggctgtggcccccgctcacctcctcgccgcgcccccggagtcaaccccggtggtgctgccgcctctgcgcaggcgcgtcctcgtcgctaccaggccgggccacgccgccctcccttattggaccgtgcgaaacccgcggccacacgcccgctggcacgggtctttcccgagccccgcccccgcgacgccgctgccctgcgtcacttccggcggagcggtagtctgtaaggttaggtgaaagtgacttccgaaaaggccggagacacttccggccgaggtgatagtaaggtcaggcgggcgtgggttcccggagggggtcttgaggcgccatttcaagtcgcccccagcctctcccacagcactcctgttttcccgggcctcatcatggcccacggccctcagtcgctgtggagcctgggcttcacagtgacactcacgtttgaactcccggtcggctgtgtgcttggtagaatttgtcatccaatacaggcgtgtaacacgggcttgatgacacccaccccacagggcccctgcaggaccgagatgatgtccaatgacaagccctggcttccagccaatgctcctgcccacatctctctcccaggagccaggcttacctctacctgtgcacctgggctgtgactcatgactggaatgatctggctgggcctgttcccccaccagacttattttcaggcgccccagcagccaccaaacatctgtcaactgaagtaatgaacctgcagttgagaggcagctaaacctaggttgaaggttagggagacagctgagttgaggtcaaatccccccggccagttagcctttctgagcctatttcctcaattgtaaaaggaagacaatcatgatgctgacctcagaatcgagcgaggagaaagtgaggaggtgcatgtgaagcattgtgcgtgactggtggggctaactgggctctggaggcggtagctctggggccctaacccctttctgcctcatgctaattgacctatggcatgtccagtgacatcatgactgagaaaatgatttgaaagtagtaatcgctgtcaggaattgtctcctggttcaacccactcctgccttaggcccactaagatcatacccacatgctctgacccaacacctcagagaaagcctccattagggtggctgcccctcccagtggctgcccaattgagttaactctgcccctgaatgtcctgcttcagcaggcaaagcagtggtgcccaaggttggcctttcatccaccccaaaccactcagccctgggcactggaggctgcagggagaagggtaggggctgggcttgggctaggatagacaagtcaggagaatctcaggcagcaactgatgatgaaggaagctgcaggatgcaagggaggcgagggtggagaaaactgtgtgggttgggcgggcgcggtggctcacgcctctaatctcagcactttgggaggctgaggcaggtggttcacccaaggtcaggagttcgagaccagcctggccaacatggtgaaacccgtctctactaaaaatgcaaaaattagctgggcatggtggtgggcacctgtaatcctagctacttgggagactgaggcaggagaatcgcttgaacccaggagatggaggttgcagtgagtggagattgtgccattgcactccagcctgggtgacagagtgagactctgtccaaaaacaaaaaaaaaaacaaaaaactgtgggttgggttgaggggagcctgccgcccaaaccaggcccaccagccccagacttgcggtgcttccctttcagggaggtgggagtgaagttaagacagggcaggtgctgaggctttagattcaagctgcagggaacaaaaagcagcagatgctgaaagcgctgcctggcaggaagaacaagtgttcttttctattacgtaaagatagtctcaaacttctctggggcccgaggacgccaaccacagcaatcttctgttccctctatgtgcacatgtggaaactgctgctcagaga

SEQ ID NO: 914702 - DNA, 4001 bp, Homo sapiens
cgccaccacgcctggctaattttgtatttttagcagagaaagtttcatcatgaggccaaactggtctcaaattcctgacctcaggtgatccacccgcctcggcctcccaaagtgctgggattacaggggtgagccactgcgcccagctggtcatagttctttaagaggacagagccttgggcagctcacagtacactgtcactgcctgctggtgcccacctgggcagtaggcaagggcaaggcagaaccatggaaactggcttagaggcgagaggggacttgcccaaggtcacctacctggcttatggagaaccagactcccaagcactctctggtcctcggaagccccacccactcccaaaaggcccgcccaacccactcaccgtgtagtgcatgtgcaggacatcccctttgcgcgatttgatgggacagtggtccacccgcttcttgaccccgatctgcagcttccttttgccctcggcccccgtggccgtggccacggcgctcaggcagatggacagtactgtcaggacccggaaccagctcagcctcatgtctctgtgggcacagaccccgaccgaccgactgaacgtgggggagggcagggagagtatggaacacgggtaggtaacaggagggttccaccgccactgtatcttccttgccccgggggatcccctttgtcccgggtcaccgccctctcccccgggctccggggccacacttaccagtccagtgagaagggggcttggccgaggaccccagcagcggggggagggggtcaggggaggccacagcagccagggacccgcccctttgctcacccccataccttccctccctcccagtccccacctccgctcttcagttcccgcctgtccctttacgcaaagtccagaccctatctggctgcactgcagttgccccgactgggcggccccactcacgccacacccagctgcccccggtccagcacaccaacacctctgcggccgctgcagggggccggccccgaggcacccacacatccccactgggtggctccgaggagcccgggtcctcgggagataccccccagcctggccctgtgcttccgcccggggcgccgccccaactctgagcccttgggggtctccggggcacccagactggccctgtgtctgctggccgccgagcccgctccacccacaccacctctcccggtggagttctcggcctacggcgtccccaagcccggccaccacggagaccacccccgcgaggacgcccggggccattactcgggccaggctcctcacttggctccttggcaccgcccttcggaggacgcggtaccgcccccgggcctgcagccccgccttcgacagaactagaccccttttccggagccgtagccacgccactcaccggctgaagccccgcccccagcgcctccgctccgtccccctctgcttccgaccccgaggctccgcctttcacctcctccagctcctccttcaagagccaggctccgtcccccgaccctcctagctccgccccccgccgccgggctccgccttccactggcaccagctcggaggtcccacccgtcccggttccacgtcccgccccgagtcccaggactccgccccgtgcggcgtgagaaccctccccctgcggcatctccggacagctccggcccccacccccaatttcctcgtcacctagctctcgttgacactcggagcccggtccgcttctgcccggcctgatccagcctgccctcttgcaccccggctccccccagcccgggctgtggcccccgctcacctcctcgccgcgcccccggagtcaaccccggtggtgctgccgcctctgcgcaggcgcgtcctcgtcgctaccaggccgggccacgccgccctcccttattggaccgtgcgaaacccgcggccacacgcccgctggcacgggtctttcccgagccccgcccccgcgacgccgctgccctgcgtcacttccggcggagcggtagtctgtaaggttaggtgaaagtgacttccgaaaaggccggagacacttccggccgaggtgatagtaaggtcaggcgggcgtgggttcccggagggggtcttgaggcgccatttcaagtcgcccccagcctctcccacagcactcctgttttcccgggcctcatcatggcccacggccctcagtcgctgtggagcctgggcttcacagtgacactcacgtttgaactcccggtcggctgtgtgcttggtagaatttgtcatccaatacaggcgtgtaacacgggcttgatgacacccaccccacagggcccctgcaggaccgagatgatgtccaatgacaagccctggcttccagccaatgctcctgcccacatctctctcccaggagccaggcttacctctacctgtgcacctgggctgtgactcatgactggaatgatctggctgggcctgttcccccaccagacttattttcaggcgccccagcagccaccaaacatctgtcaactgaagtaatgaacctgcagttgagaggcagctaaacctaggttgaaggttagggagacagctgagttgaggtcaaatccccccggccagttagcctttctgagcctatttcctcaattgtaaaaggaagacaatcatgatgctgacctcagaatcgagcgaggagaaagtgaggaggtgcatgtgaagcattgtgcgtgactggtggggctaactgggctctggaggcggtagctctggggccctaacccctttctgcctcatgctaattgacctatggcatgtccagtgacatcatgactgagaaaatgatttgaaagtagtaatcgctgtcaggaattgtctcctggttcaacccactcctgccttaggcccactaagatcatacccacatgctctgacccaacacctcagagaaagcctccattagggtggctgcccctcccagtggctgcccaattgagttaactctgcccctgaatgtcctgcttcagcaggcaaagcagtggtgcccaaggttggcctttcatccaccccaaaccactcagccctgggcactggaggctgcagggagaagggtaggggctgggcttgggctaggatagacaagtcaggagaatctcaggcagcaactgatgatgaaggaagctgcaggatgcaagggaggcgagggtggagaaaactgtgtgggttgggcgggcgcggtggctcacgcctctaatctcagcactttgggaggctgaggcaggtggttcacccaaggtcaggagttcgagaccagcctggccaacatggtgaaacccgtctctactaaaaatgcaaaaattagctgggcatggtggtgggcacctgtaatcctagctacttgggagactgaggcaggagaatcgcttgaacccaggagatggaggttgcagtgagtggagattgtgccattgcactccagcctgggtgacagagtgagactctgtccaaaaacaaaaaaaaaaacaaaaaactgtgggttgggttgaggggagcctgccgcccaaaccaggcccaccagccccagacttgcggtgcttccctttcagggaggtgggagtgaagttaagacagggcaggtgctgaggctttagattcaagctgcagggaacaaaaagcagcagatgctgaaagcgctgcctggcaggaagaacaagtgttcttttctattacgtaaagatagtctcaaacttctctggggcccgaggacgccaaccacagcaatcttctgttccctctatgtgcacatgtggaaactgctgctcagagaggcaggggtagtgacaagcaaggtcactcagtagatctgggtcctaccccaagctctctggccacagaaggctgtctccttctagaaaagaaccctggtgaagagcaggagggcaggcagtctgtattgactgggctatccctgactcccatgcgtggcaataacttgaaagtgatgaatacataattctg

SEQ ID NO: 914703 - DNA, 4001 bp, Homo sapiens
ttttttgtttgtttttgttttttgttttttttttggaacagtctggtccctgatgggggcctctccccctgcccctccccagtctggttacagctcagttcgtcgctctattttgagcagctccacctcgaacaccagggttgcaccacctgtaggggagaaggggagtcaaaatgccaaccagggccacagggaggtgggctggctgcaggtgatgggaggtatcaaaaggtttactacctggaatctttgggggagctccccgctctccataccctgttgaagatgcacaaagaaacagtcagtgatggccaagctcccttccagtgtgggcaaagggagagtgttccgcccctctcagcaagaaggccagaaatggagaagggtaatggagatgggaagggggtgccaaaggcctggcaagggcagagtggggccactacagctgagtgcttcaatgatcttgccctgtactcactgctagacacagccaaacttggaggaggcatgtattgtaatgaatggatacggtgaagaccaatgaaaagctgaagcagctttcacccttcccagtcacacaccccaaactcgctctgcaccctcaggaggggcctcttacctagctcggatgggatcaccagcttgcgcttttccccctcacacatcctgcaggaagacacatgctcagcccatggcagcacccagggcccttgtcttgtatccctggggcttgcctcccacagcttacctcctgggcggtggccatgcacgcccccactcccaagcccattcccccatgactcaccccagcagcccctggtcccagcccttgatgacctggcctgtgccaagggagaagacaaagggctggttctggggcaggctgctgtcaaactctgtcccatcttccagcttcccctgtggaaccatgagaaggccagtgaggaagaggggaccacccctgacaccccctccctcagctgctttccccatcaagctgcccccccacgcccacccacagccctggtggtcagtcctttttgttttttgagatggagtctctgttgccatggctggagtgcagcggcgtgatctcgcctccctgcagcctctgcctcccgggttcaagcaattcttccacctcagcctcccaagtagctgggattataggcgcccgccaccacgcctggctaattttgtatttttagcagagaaagtttcatcatgaggccaaactggtctcaaattcctgacctcaggtgatccacccgcctcggcctcccaaagtgctgggattacaggggtgagccactgcgcccagctggtcatagttctttaagaggacagagccttgggcagctcacagtacactgtcactgcctgctggtgcccacctgggcagtaggcaagggcaaggcagaaccatggaaactggcttagaggcgagaggggacttgcccaaggtcacctacctggcttatggagaaccagactcccaagcactctctggtcctcggaagccccacccactcccaaaaggcccgcccaacccactcaccgtgtagtgcatgtgcaggacatcccctttgcgcgatttgatgggacagtggtccacccgcttcttgaccccgatctgcagcttccttttgccctcggcccccgtggccgtggccacggcgctcaggcagatggacagtactgtcaggacccggaaccagctcagcctcatgtctctgtgggcacagaccccgaccgaccgactgaacgtgggggagggcagggagagtatggaacacgggtaggtaacaggagggttccaccgccactgtatcttccttgccccgggggatcccctttgtcccgggtcaccgccctctcccccgggctccggggccacacttaccagtccagtgagaagggggcttggccgaggaccccagcagcggggggagggggtcaggggaggccacagcagccagggacccgcccctttgctcacccccataccttccctccctcccagtccccacctccgctcttcagttcccgcctgtccctttacgcaaagtccagaccctatctggctgcactgcagttgccccgactgggcggccccactcacgccacacccagctgcccccggtccagcacaccaacacctctgcggccgctgcagggggccggccccgaggcacccacacatccccactgggtggctccgaggagcccgggtcctcgggagataccccccagcctggccctgtgcttccgcccggggcgccgccccaactctgagcccttgggggtctccggggcacccagactggccctgtgtctgctggccgccgagcccgctccacccacaccacctctcccggtggagttctcggcctacggcgtccccaagcccggccaccacggagaccacccccgcgaggacgcccggggccattactcgggccaggctcctcacttggctccttggcaccgcccttcggaggacgcggtaccgcccccgggcctgcagccccgccttcgacagaactagaccccttttccggagccgtagccacgccactcaccggctgaagccccgcccccagcgcctccgctccgtccccctctgcttccgaccccgaggctccgcctttcacctcctccagctcctccttcaagagccaggctccgtcccccgaccctcctagctccgccccccgccgccgggctccgccttccactggcaccagctcggaggtcccacccgtcccggttccacgtcccgccccgagtcccaggactccgccccgtgcggcgtgagaaccctccccctgcggcatctccggacagctccggcccccacccccaatttcctcgtcacctagctctcgttgacactcggagcccggtccgcttctgcccggcctgatccagcctgccctcttgcaccccggctccccccagcccgggctgtggcccccgctcacctcctcgccgcgcccccggagtcaaccccggtggtgctgccgcctctgcgcaggcgcgtcctcgtcgctaccaggccgggccacgccgccctcccttattggaccgtgcgaaacccgcggccacacgcccgctggcacgggtctttcccgagccccgcccccgcgacgccgctgccctgcgtcacttccggcggagcggtagtctgtaaggttaggtgaaagtgacttccgaaaaggccggagacacttccggccgaggtgatagtaaggtcaggcgggcgtgggttcccggagggggtcttgaggcgccatttcaagtcgcccccagcctctcccacagcactcctgttttcccgggcctcatcatggcccacggccctcagtcgctgtggagcctgggcttcacagtgacactcacgtttgaactcccggtcggctgtgtgcttggtagaatttgtcatccaatacaggcgtgtaacacgggcttgatgacacccaccccacagggcccctgcaggaccgagatgatgtccaatgacaagccctggcttccagccaatgctcctgcccacatctctctcccaggagccaggcttacctctacctgtgcacctgggctgtgactcatgactggaatgatctggctgggcctgttcccccaccagacttattttcaggcgccccagcagccaccaaacatctgtcaactgaagtaatgaacctgcagttgagaggcagctaaacctaggttgaaggttagggagacagctgagttgaggtcaaatccccccggccagttagcctttctgagcctatttcctcaattgtaaaaggaagacaatcatgatgctgacctcagaatcgagcgaggagaaagtgaggaggtgcatgtgaagcattgtgcgtgactggtggggctaactgggctctggaggcggtagctctggggccctaacccctttctgcctcatgctaattgacctatggcatgtccagtgacatcatgactgagaaaat

SEQ ID NO: 914704 - DNA, 4001 bp, Homo sapiens
cagagtaagtggtaactgtcctgattggggcgagggagttttctagaggggagcatctcattactaaacccagaaatacagagacacttgcatgaacacatcaacaggaagcagagaaacaggcataaaatggcccaatgacccccactctcgggtctttgcaggaatcccctctcacctacttctcacctactcactttgggtttgaggaacccaggctcttataggctcttatagctccctttaacccatcacagtcagttatctcatctccagatttgcaagttccttcggttggtgtcttttacctaagtcagcatatttcaaactttcataaaaaaaacttagaaaataaaaaccacgaccccacccagaagataaaaatctcttgaattctctgagcccaacatcttagccttctcttgctgagccctgagcagggagtcgattctttcgggttctggggaatggcgggctctgccagtccccacctcgccagcctaatagtttttccagacagactcccgcttggtgttgcgcggcagcctcgaagctaacccctggtcccattcattcccctaggtcctctaaggcccgtcacgttagggggtgtccctcctctctgctcctggccctacttggcgaaccctttcagagacagcagtcaacttttctgaagtgagacgcgaacccaaaccctcacctttccgcctgggttgcactttgcaacctagacccaggcttggcggcggcggctggggtgggaatggccgggcgggcgcggggcgcgggctcacagccggcccctgcaacggaggcggctccgaaggacgcaggaccctttcggaggcgacagctccaggagccctggtcctggagccggcgcacgcctaggcgcgaagggcgggggctcggggcgctagggatctgtgcggacgggggctggggaaggttccccgccggagaggcggcgaggccggcccaggagtcccgcggagccggcggctctccagcgcctagagccgggcgactgagtgccgagaggaagggaaagcgctgacatgtaaacaggggcttccatctggaggagcccgctcagatagatcccccgacacactcacttgcacccctaccctcgtgcaacgaggccacttacccaccccagggcccaccaggcagggacccgagcccgggcgactgcagcccccgcccccgccgtgttccgcctctgcggagaggaagcccagtgcctagcgctggggccacgggagccccgggtgtcggtgggagtggtggaccccgaggtctctcgcccttgactccgttccgtaccctggggtcccccggtttcccgccgtcccctcctgcagccccggcgggcagcgaggtgggaggggggccggggctccactttgggggctgggatttcgggggagggtcgccctcaatgcgggcgcctggccggctggcccgcgagtaggactcgccacccgagcgccggaggagccggcgcgaagccggggcgcggagggaagggagagaggccacgtcttccgggacgcgggccccgcacctacccgcccgccgcttcgcctccccggccggtccccgccgcccgcgtccgttgccccgccgcttaccttaatagtcccgtccatttggccaagtctgcagccgagccccccaatattccacacattgacccggttacagcctgacctcgcagccccttcggattagcccggcgcggcctccctggcgccctgggccctccctgcgtgccccctgcgagcgccctgccctcactcccctgtgcacgtttgttgttgtagcggagcgaaagagacagttaaccggatgaaacttttttttcagctaattttgggaagtgacttcactttgcgaatcggggaggaagtcctatctctctctctctctctctctctctctctctctctctctctctctctctctcgcctcgagctctcctctctcttctctcccctctgctctccctcgtcttccctccccccccacaccccctcttcctcccctgctggtcctgcttttcgcatcacacactatataaatatacgcggagatgcccagacacattcatgcgctgcgcacacaggatacttgctcctgggagataagagctagccgggaacaatgacggggtccacgcccagcgtccgcgccctgattcccgaagtctgaacctccccccatcaccttcccccaaaatccaaagccaaagacctttggcttctttgcttttcctgaggcggttggccgaaggtggccctcctgactcattcactttccgtttcttcccacagatacgttcattaatgctttttccagccggagacaaactttttgggggtggggtagggggggtatggagggagagttggctagggctgcgggtaacccagcgcctactgccggggaagactcggacgaaaaccgaggcaaaccaaccattaaaaagtgcatccaataagaatttttccactcaggccctccgctgccgagacgcggcagactcccagagcggctcacccactcatcgaagcggattctgggcggtttcgggctgacccgcgctgtcagggcgcggactccattccgggcgcattgttaggagaaggggcccctcggggcggcgcgcctcgaccctgggctcccggtgcccgcagagggcggagatccgcggcgccctaggccacctatccgcatcttctcgagccaaacccccagcgcttacccggacccgacggcccaagcactgactcccaggcaagagtcgcccttcctggtccccagggaactgacactaccgcgggacgttccctctaggacagtcagcaggtcccaggagcgcagcacgcaacagcgcagagcagacccagacttttcccggggtgagacccggaggcccgcgctctggaccgtcctccctacccagcctggaggccggcgttccccggcccaacccggagacctccccgcctccctcctgggccgccgcgcgccccagttggagcagcctcgaggggctgggccctttcggccggactcccttctcccggacatccaaaacaggttaccttgtccacgctctccggaccacgctttggacttgctcacttttatttaagagtccgacgggggaaagagggaaaaaaaatccagaggagatccaagtcaattggaagaaaaaatttcaaaagggtgtccacagaggcgaaaaaaggtgacttattaattctttatttcttcaggagcaattgagcccgagagctcactcgtctccctccctccccctccctctctagaaattagtctcatcaattcggctccaattttgggttcgaatacagacacgggtctgaacgtgaccagacctggagtggcgggtgcagcctgccagcaattgagacttggtgtgcgtgttgggggtgggggtggggtggatggtgggatgggggccgggctgactccccccgctcctgtctgcttctcaatccaggggtctgctccggggctcccctgggaccgccacatctggttaccgctagcggggtcagtccccccctttgcctggggccaccagttctggagttcaattaaaagaaatcaggcttaaccctttcctccccgcggcaggctgcctgccctctcactcctcccttcagcgtttccacgtgctttccagagaggaaagaggttaacgggaaaggaagaatgaattacatcctttcaaaccccaaattgtttccttttcagcccaggctctaccgaccttcaaactacaacagagctttcaggagaatgcggagagacggcttcccacccggacctcaccagaaacccgcacaccccagccacattgctcctcattcagccagaaaggactccaactccaccaccaggaggccccccttcctggtgctggccagttgcagaggctgttcatggcatcccacaggtgg

SEQ ID NO: 914705 - DNA, 4001 bp, Homo sapiens
cgggtgcctgccggacaacggcaggggcttggcagcctgcaactgtttgtgcccctctggcaaatgttcgatggagggagccggtggaacagactcaagattgtccctgccacgcagacctttcgccgccatcaatgcacccctttgtgcaacaatacaaactttgtggctgctgaaaaatccatttttccaccttgaaaagagctcctgcagcgagcagcttctctggcggcccacagctcccagactgccgtctcctcgcctccgctttgtccctgacccgtggcctgagtcgggttccggggctcccacgtgcccctctagggctcctcatccctgaggtcctgggtcccggggtgtgtatggactcgagggttcctatgagtgggagagagactgcagctcccctccccggggccatttacaatcctcagtgcagagctagaagtgagagctcctcttgccgggctcgggtactccgagtggtgggagtacccgagtactcttcctaaacttctcaggaaaactggggacagcgaatccgtgcgcgccttagtctaaccttaaagtatgctctgtaacctcctgggagtcattttgctatccatccattcactggttattgctacatgaattacactgtatttcattcattcattcactcactcaggcattgtcaatgaaacacccctttttgggccaagcctctaggattaggccttcccttcctgaaatgacgagtgactgcttcacacgggaagatgcgtccgtgtgacaagttttcctttagagagatctgaggagggttggacgcataattggcaatccttggacaggacccgagagtctgcatcccatcacacagggccagggactgccctggcatttgcccgacactcgagggagctcagctgggcctcactgaccggtctggggagcacttggaggcggggcttcaggatggggagggcggggcagagatctgggaaaagtatgcgggtgtttgcagcactgcggagagtccttcctcctccgctctcggactgactcagatggtcctaagctttgggtccctactcggagggcgtcaggtcgcggctgcatggcgtgaggggacccagtcaccgcccctcccatgagcagggcctcctggtgcgcactccccgccccacccagccagcggattttcatttaacttgtaacccaggtgtcccagcttcagtttgtttacattcttggaaactgttgtggaaaagaaaaaaaaaaaccaaaacccttcgatgtgctgtcaaatatagcaatctgcgcttccgaagggcgggcggggccaaagaaggtgggctcgaggactgagcgcgtgtctcacctgtaggagaagcgcgtggcgcccgcatacccgcacacaaccccacatacacacgcccacatgcaaacaggcgcacgcatgcacacatgcacagacgcgctcacacacaagcgcgcgcacgcgcttaatgcagggaacacgctgtgcgccagccgctcagagcaccccacccgttgggacctgacgcggcgagctgctcggtcttcctgcacaggcttcgccaggctctcctgctccaagtttcccaaacactagccgccaggagcgttgcttctcaacctaggattcccgagggtctgtgccactctcatctggccaggagcgccctagcttgagatccacgagccgagagtagggcccacttccacccctacccctttttcccggggaaagggaaaagggaccataggcccgggtggggtagaagctgggggtcatcacctgtttaaagacgctgccatgtcttaccttgatgtaagacgacgtgtcggggactgtctgaaacatcgtgggtagctaagggtcgggaacgcccaagaaccagcctgggagggagaagcctcggttacccgcgagtggagcgagggagagacggtgggatggtgatgaagtggggatgcagatggagagactgtaggggtttgggaagctcagatccgcctagtccggcgagggagggtccgagtggttgggtgttgagcactctccctacgcctcagtcccgtccccgggcttcaggccaggggacggtgagaactgagagccacctcacaccattgggtctcctccctacagtccttttactctcccctgcccgaaatcagactgccgcctcccccagggcctgggcagtttcgaactggggatgcccgcagcttgttctggaaaccaggatgttctagttcttggtgcgtgttgaggagagaacgcgaccaggacagaggtaggactcccctttcttgcaggctgaggagcagaagcttacagagctgccaacactcgcccctcagtgcacagacctgcttgacttcctcaccaccctttctctgccagcatccagctgcgctgctcttccctgctggtggcccggggacggaggaagactaacgcaaggttagggaggtctgtggaggccccttagaaaataggtttttgggaagagactgctacaatgactgtcaggtcctcatttttagtggcaggagagtcttacttaggtctgataatttgggctggaaggcgcaaaagccaccctaggttgccaggtgcctctgcgtgagtgggtctctccctgacttagcccagtctggcggccgtatctctcctcttcctttccttccttctcttaaccatctttaacgtggcggctcacagcttctctggcagccaatgtgtttctgataaagcacttttctccccactaacaaattccagcttttttttttttttttttttttttttggctcctcaagccacaagagaacacacactagtgcagggacaaggtatattcctcgggcccagagattcccttcgccgcctccgcccaggcgcactttcttcagtctctcccccaaccccagcgaccccaccggtcccctacatttttttttttgaaagtcgaagtgtaatttacaagaaaacagagaggaaagaaggagaaaaaagaaagccggagaaaggagaagaccccaaagtcccacatttcccgactgcaaccagaacaagcagcgagacacactgaggcgccccgaccctgcatcgcccccagaggatcggacgcaagtgggcactcaccttaggcaccctttcctgctaagcccgcaggagcggaactccgggcagctccaggatgtgttagttcttggtgcctatcctgtgtgcccagagctcccagaacccagccagtgaggagttaaacctgctgcgtgcctggagtcaaagtttgcctctctctagggcctgcccacaagcagcctcagctcaggcgcatcctggggggctgcaggagccgctgtgcaggagctatgcgtgcactgaagctttccccttcgctgcctcccgccagctctctgggtcccactccctcttcctttctctttccctttcttgtaatttgatttccgctttcttatcaatattccaactgctgtctgatgaattattcttacaggacagccaccagtttgcccccagctgcttttctagaaaccactcggtgttactaggaaactttaaagaacgctagaaatcatgaacgcatatcataaataaagacatacaactaagcgaagccaaaagaagacatgcagacccaggcttctttgagctgattatttattctttgaaagttccaaattatcgatatgcaagtaatcattcctcaaacttgatatcggtgaagttatcttttactttttgagcccttatgtttttctttcgtaagggttactccttccccttattgagtcctattgcgcccgccctcccaaccaccaccgagaatacacctcttcttgatccactttttctaggcagtatctataagagcaaagtggattgcaaatgccatagaaatagccatattatgaggttttaatttaaaaaacctcaaacatttaaaagcattcttgtt

SEQ ID NO: 914706 - DNA, 4001 bp, Homo sapiens
gcagatgaggaaaatctgaggccctgcatggaagagacaggctcagggtggagacagagccctcccgcagctgtgggcagcctccccgcccacctcctggggccttggcgcccaactgtaaccctttcccaggggtttggcacagggaggatgctggggaacagtgtctcaactccagcagggcctcatgggagccgctcttctccaccagcatgtctgcagcccctcaagcctgtggggtcactcacgcctgtggggtcactcatgcctgtggggtcacgcctcttagcattaggagtagctggcagggctgggtgcctgagtgttgggcacgtcatagaatgctctctccagctggccacagcctgtgtggaggggacaggctgcatccccagtgcagaaaggggaggcatacagggaggggcagacctgtccaaggtcacatgctcacaaccagagggccaggccccaacccaggtctgtctgcccagagcgtttgtttcttgcctccctttgcacagagccactgagcagacctttcatggcagcaggcctgggggacagcagctgctcccctctagcttggcttcagcctgggaatgacccccgagccctcctagggactagaggggcagtagggaccagggctgggcactgggagagaagcagccagcccagctccggctcaggcacgctcgcggccccgctgtcgggctggcgcacttttataataaataacagcaaatagcccatccgcagggcatctttcacaccggtggctaataacatggctattaatgcccccgcagatggcatgcatgctgcgccgtgctgacgaatgtcccaggccctggtgcaatcataaatcaacccctctcctgaggaagagcgtgggaagtgtcattttccatcttggtaatgaattggggcttccctgtcctgcccagggcacagaggcttgaggttgctgggatttgtgtttttggcggtgcagcctctccctctggcctcctgggatccctggaggagtcagcccctcctcagcggcagggaggactcaccgcctgttgtgtgacccttggggcactctctgcccttctctgggcctcagcttgctccagtaaccaacaaagaggctgaactggaagccagtgcagatggtgcccaagggccaacaggagcaggaccttgggcagtagctttggatcaacccaccctgggtcccctggccagaacaggggcgggccctgatatagacttgtggactccctctcgttcaagggcagcaggcgccagggcaagtagcctaggttaccagagctcctgcccaccaccccgccaaggcctcactgctaccacctttagggagggggctcaaaatgagattcctccaccctgctgcagggccatttactccaggagaggccactccattacatcctgggtccagctgctgggtagagcccagcagcacggggaccaccaggtggcaaatgatgcttatgccggcaagcagaagctgccagctgcatgaactgcgtgagtgggtgtgtgggatggagctgcagacccttggagacctgtggagctctggctgggaaaaggggcctttggagggtgcaacccagctgtctgggtgcgaggaaccctgggcccaccctggagcccttctgaattcgcgtccctcttcccttgtccttgggccttacctccttcgtcgctgccgcccaagaccctctgggtttgactggggtcactggtccggaggcccctgccaaagtcacgaagccgcgactcaggacaccgtgagctcagatggcgctcacattccctgccccgtggtcctaccaggccttgcaccactagggacgcagacctcagccctggggtgactgggcagcactggggctccccagggcacagagaggggatccggtgcctcggtatcctggtctcctggcgttcagatgaggctgtgggccacaatcagcagcctccttggcaccctaggctgcaggcgcagctggcttatccctgcagagtgagggtcctgtgtgcaaggggtacagggacacccctctggaccccaggactcccgagggtggcctgagggggttccgactccctgttcgtcgggcatgccctgtggcctggcacccagccctgagcagggtggcctctgctgcttgctacctccacagcccttttcaactcttgcccttttgtctgcagcccgccacctcttctgaagggcctctgcgtggcttttaccccctttttgtttaccaaggctttttttttttttaattcctttaagtcacttggcagaatgggctgggtgcagagagtgttcttgcatgacggagctgagagggagccactctccaaaggctctgtattcctgccactcaggctgtgtctccgggggaaaggagggggtccattaccccgctgaggagttcagatgttcatggtggggctggagctgctgacacatgcagctgagctgtcaggcccccacatgcccttctttgagaagatgcttggggggcaagggcctcagtcctgcttggctgctcctgtttgtagaggtttccttgctggggaggtagggaggatgagttattcccgcttcactctctggtcttgtctgtccaaaaaggaatccatcttctcgcccactgcctgcttcctcacctgccaaaaacaataccagtgattaagcccagagacatgagggaccgtactgggacaacatccaccagggccactgggctgcagccccctttgctttggatcctgtttttttgtttttttttttgagatggagtctcgctctgtcgccaggctagagtgcagtggcacaatctcggctcactgcgacctctgcctcccaggttcaaccgattcccctgcctcagcctcccaaggagctaggactacaggcgtgagccaccacacccggctaatttttttttttaattttagtagagatggggtttcaccatattggccagatggtctccatctcctgacttcatgatccgcccacctcggcctcccaaagtgatgggattacaggcatgagccactgtacccagcctggatcctgttttttttcttaatgccacttgcctatgagccggggaaggggctggggttattctccctatctcctgcctctttccaaatcctgacaattggccatgcatggtgcccagccttgcagctacctggttttccctccctgggggtggaaggactgggaagagaaaaatgaagtttttcgagctcctggccgtgcagggccaaccgcccagcccagagctggctccaattcccccggcacctgctcttcttgctaaatgtcattcaaaggctccaactgggccgccatggcctgggcttccagaacaagcactgcctttccccaccatgggaagcaggaccatcagggaactggggaagttgggtctccgtgtttctggcctctgtctggtgcccaccccacttcctaggtggggggtcagtcctcaacacccgcagccgccctcctcttccacacagacggagggcagggcaggctgttctggaatccaaaacaaaaccccgagccctccccagcacctctcattagtgcggcatgtggaagggccgcggcgccctggtgtctgtattccccctgcaggaacccctctttggaaaagggcttttattacacatctgagagtgctcactctggtttgaaatcagatccagatgggctcagctgcatctgggcacttttctttgtagggcctaaggtggctgatttgagaaatgcttgttgtcagaggccgttacaaataaaaacagggatattagggttcatgttttaataagcccagcacccagatggggggtggctgcccacggggctcacagcctggcagggaaggcatttgggaagggtgtgtgccagccaggtggtgtgcaggctgagtctgatggggtggacaggg

SEQ ID NO: 914707 - DNA, 4001 bp, Homo sapiens
gaaaacactagaggtgacaaaccaacctttgatttaacatttcagctctagattccatcaattttttaaaaagtgcatttcggatgggttcgcacctgtaatcccagcactttgggaggccaagacgggggggggggggggccacttgaggtcaggggttcaagaccagcctggccaccatggtgaaactccatctctactaaaaatacaaaaaataaaaaaattgctaggcatgatggcactcgcttgtaatcccaactactcgggaggctgaggcagaaggatcgcttgaacccaggaggcagaggttactgcagcctgggccacagaggaagactccatctcaaaaaaaagaaaggacatttcattgacccaaataattgggagataataaacacagagctggaatctttttttttttttttttttgagacggagtttcgctcttgtcgcccaggctggtcaaactcctgacctcgagtaatccgcctacctcggcctcccaaagtgctgggattacaggcatgagtcaccgtgccctggagtctttcatctgcttacaaacttcaacatcaagggaagactcttaccatggtaaataaaaattattaatacatctgcatggccgggcgcgatggctctcgcctgtaatgatcgcttgagccctggagttcgagaccagcccgggaaacatgaactccgtctctactgaaaatacaaaaattagccgggcatggtggcagggtcctgtagtcccagctacccaggaggctaaggcgggaggatcgcttgaacccgggaggtggaggttgcagtgagcccaagatcgcgccactgcactccagcctgggcgacagattgagacattgtctcgaaaaaaacaaaacaaaactcttaaaaagttacatctgcaatacttacaaatacatacaaaaacagtaagtattctccaggctatgataggacctttacaagacacaccaaacactgctattgcggattttttccaattaacgaaccagcgtgatctctgaacatgtgaaacggtcgcggcttctccggcgcctagtcctggagtcacttttaatctaagcaccactccagtgagaaccacacaaatacttaggaacctaccagctccatttctccagcagttctgctagtgtggggatgcttactagctggaatattaagagctttttctaaacgtctctatccccgtttcgacaaaaccgaaaggaggcagatgacgtgtggaaaggcctggcccacagtcacaggccgcgcacgcggaaactcatcctcacatccaccctctgcgttacccaaaaccgacccggggcgtttgggagactcaggatgcccgaacttcggtcatatttcaaacgttcccggggcaagccctgcaccacagatggcgcctcgggcttggcccgggccgagggcgcagaactcggcctggcccttctgcggcccggagcccagggccgccccgcctgcaggcccgcagcaggcaggcctcggaagccgacctcgcccgcctccctcgccgggtctggccaggcgccgtgaggagcctaggccgcaagccctgagctcgagttcaggtccccccgcgcacccttgccttctgaaggcgagtcgtccgaggccgcggcggcagtcaccgcggtggtggtggtcgtcgccgccgacggggcgggctggctggggaccgccgcggttgagtccggctcagtgtcgggttccggctccgggtcccggcccggcgtgctgccccgaggacccggcggagagagttgcaggatgggcctacggccgggtaccgcccgggacttcttccccatcgcgagcccaagcgcgagcagagagcgtcgggcggccgagaggggcgggcactggaggctgggcgctgggccctgggcgctgcgacgcgtaatcaatattcatacaccgtgacaccgcctccagcccggatccgctttcaaccagcggagcacgcgcttgcgcaagcgcctcggacccttcggctcttctggctcctcctcaccaggagaaagggcgggattaccaactgcgctaggcgattggctgttttgacccagagaagggaccggtggccaatggaaaaggaaaaagggtgagagtccagccaatagtgcggtagggcctgaattagaacgacttccccacttccgtcgggttccacccatgcgctttccccaagccttttctttgcctacttgtcctccatcttgtggctattctcggcctagagtttcatgttgtctgtcttctagaaaggtgtgctgctgggcccagctcactcacgcctgtaatctcaacactttgggaggccgaggcgggtggatcacgaggtcaggagttcaagaccagcttgtccaagatggtgaaaccccgtctctactaaaaatacaaaagatttagtcgggcgcggtggcaggcgcctgtaatcctagctagtcgggagactgaggcaggcgaatcgcatgaacccggcggcaaaggttacagtgagccgagatcgcgccactgcaccccaccctgggtgacagagtgagactgtctcaagaaaaaaaagaaaggtgtgctgttttctgagcccttccccacgtttcgcccggattattgtggcttactttgggtatagcattgaacattaaatgggacagtgggtcttttacgcttttgtaatttcctgcagcacacaaatagatgtctcatattttctcgcttattagctgggaaaaatcacgagatactccactacctacaaggaaaaagcctaaaattgttgggatggcatacaggaaccttaccagttttgtactactatcgtcaacatgctttaatttacccttgctttaacactgccccctctcccgtctcctgcctctggagcccgccacttggagcatcacctccctcacttttcctttgcactgactggaataattactgcatcacatgatgaaagtcttttattgtttcatcagggcgcaatgcagacgcagtgcaggcgtgacctctcctgcccagcctctccctggcacttgacatcctgttgacatccgtctcccctctaaactaaggaatgcgagtggtatttatttttatatccgcagcagctcagttcccactaaaaatatctaatacttactgagctctatgtgtcagtcaccaagcactttacacgtagaattgcatttgatcttttaaaatgattatttctaattttatttttaaacgtgtcttgctctgtcatccaggttggagtaacgtggcatgattatagcccactgcatcctcaaactcctgggctaaagccattttttttttgagacggtgtctcgctctgttgcccaggctggagtgcaatggcgcaatctcgactcactgcagcctctgccctccgggtccaagcaactctcctgcctcagcctccccagtagctgagataataggcgcccaccaccacgcctggctaatttttgtatttttagttgagacagggttttgccatgttggtcaggctggtcttgaactcctgacctcaggtgatccacccgcctcggcctcccaaagtgctgggattacaggtgtgagccagcgtgcctggcctaattttttaattttaattttaattaatttatttttgagagagcttctctctgtcgccaggctggagtgcggtggcacgatcttggctcactgcaatctctgccttccaggttcaagcgattcccctgcctcagcctcctgagtagctggtactacaggcgcgcagcaccttgcctgtctaattttttgtatcttagtagagatgtggtttcaccatattggccaggctggtctagatctcctgacctcatgatctgtctgccttggcctcccaaagtgctgagattacagatttttttttgtatacagagtcgcccaggttggaaggcagtggtgcgattttggcttaagggaggaga

SEQ ID NO: 914708 - DNA, 4001 bp, Homo sapiens
ttgctctgattctgaaactaaaacaaaatgctgtgagagtttgcgtttccagtgaagtaggcgtgagaaatccaagttcagacagctacaatgaaactacaatttacccagcctctctgccagacacccagtgcacgcataggcggccagaaacaatggatagctagatcctgcagtcattagaccttgcagttggcttttaacctgaaggagataaggcaagattccagggtttatttagagaaattacaggatctgggaataaagtagttacaaaattagtccccaaccagctttcatggagctttccaattattaattattctagttcttaatcgcatgcatacaaatgcacatacatatatacatgcatattaaaatacatgattgcacgcaaacggaaataagattccacctgtgcataaaacagaaagacttggattagagtgagggatcaggaaacaccacactgaggacgagatgcttgaactgagatctgaaaaatgaacaggatgaagaggatggaggcctgtagggggaggggagagcagagaatcctagtgggtggggggcggacatcaataaagaactcttctgtgtcagccactgagcacggaatacagggatgagagtgagggcaataccaggaagaataaaatccttttaagagatgaagattgttatgagcacagtgtgtggttcaaaaatcttttaacaaccccaaggtgaagctagtggaagatattgaatttgtttaaacccatctggtccatgccctgttcttctaaatcccgaaagagggtcaagaattccgagcaggagtggactacctggtgataccttagactagtcctgtgtattaaagtccaatgaggagtatcttggtaaaagaagaaataaagtggcgaaaatcccagtactgtgctaggagatttacatgctatattatttactattaccaataatttgcagataatattatcctcatcataaaatagggtaactaacgctgagagggactcggtaacttgttcaaggccactaagaagtggcaaagtcaaaactggaatttaataaaagagtctgagcttgcctgtgtggttctgcttttcttagaaagttggatcaagtctgcaaatcagtacccaggaaaaacagcaaaagacccgctggtaaagacctgtccagattgctgacctggttcacacagttcccaagcttgcctctgttacttccaaggaagaaagaatgcacagagaggtaaaaaaacaaacaaacaaacaaaacaaaacaaaacaaaacaaaagcaaaaaaaaaacttcctctgtcttgcagggctccagcacttggaaccttcctacgcccagtttcaggttctctcagttctaccctcaacctgagtgactgtcctaccagcagcttgtcgagaactcagccctgcaccgttcccagctaccctcctcctaactcgaggggtgctcaccccacattaccccgaccctaatcgccgcccctggggaagaccagcaacaggatcccactcggcagctgacccgcgagtcccagcaccgcggcaccacggggaagactccgaggtttgctccgcgaggcgcccccctaccgaagaggaagccgaggagaaagaagccacccgccagcaccagcgccccagcgcacagccagcgcgggcggcgcgcggtggccacagccgagtcggtttcgtgaaggagattccacatctcggcgcgagcagagccggcctcccgggacccgcgcctgtgctgctgctctactgcgcgccctccaaccaccacggcggggtaaagtctctctcaatctcactaatgcctcgcttatcagccctgcaggctggaattcgctccagacctggggtccagtttctccaccacagcagtgtttctagagtgcactgaaccaatccgagcgagagagagaggcaacatctgcctccaggagaaggaaatccggccccttttgagaggcgccttaaaaaaaaaaactttcttggaaaatgtccagctcttgcttaaatataaaaatgaaaggaagaaagagactctcctctctccactcctataattatgaggaacttttattcaactctgaaattctatacaatctctacaatactctactgaataaaagcagagcagaaaaagctgcgctttttttccatagtcgggaatgcttgtcatcagtgtaaatcaccaccgcgccctttttcctaaagaatattattgttattaataaacatgtagggtattatcctccacttacattacaaaaccattttttaaagccgggcgtggtggctcacgcctgtaatcccagcactttgggaggcccagacaggcggatcacgaagtcgagaaatcgagaccatcctggccaacatggtgaaaccccatctctactaaaaatacaaaaattagctgggcgtggtggcgggctcctgtagtcccagctactcaggaggctgaggcaggagaatcgcttgaaccggggaggcggaggttgcagtcagccaagatagcgccactgcactggagcctggtgacagagtgagactccctcaagaaagaaaggaagggaagggaaagggaaggaaggggaggggaagggaggggaggggaggggaggaaagaaaagaatactggaacttgttgaaggcagagactttattttcatatcccggctatgtctggctactgtcttacgtaatagatataaaatcaatcttggttggattaaccagaagaatcatcatacaaaattatatccccgctataaattcttaataataataatcgtatttcaagggagagaatagctacatgctttataaaataaactgtgttcttataatccgtgagagaggccgtgcatttgctaggagtactttatggaagcactgcttttaacagaaccataaggtacaggtaggatttgacccagtggagatgagaagaaacattaggggccatgggccagctgagtaggcaaaggcagaaaactcagagtgtattcaaggaatagcaaacagtttgctttgagaaagggagagcacagtatgagttaagtggaaaaagatggactagattgtacagtcttgggtgcttcgatgtagactttctgagcaaagtgaaaaatttgggaaaattaatttgtcaacaatgaaccatgacaactcctagatgacctagggcaggaaggaagggaatttcttcatctctttctaacaaaatcctgaatgtactatatctttcctaatgttcctattgtcaaatctaatcagagatggctaataatagtgactaatatttaaagagcacttattatgagtgatgcatgttatgtacatcacctcatttaatcaccattgggacccttcaaggtttgttctattactcttcccgatttacacatggtaaaactgaaatttagctagattaggtaagtcattcgaagtcacaaagctaagacttaatataatgtctgtcttactttgtaccactctacagtctctattcagcacaggatacctttatggagtttgcttgtggcactggagggagcactgagtttggagtcagaagactcttaacagtctttggacctggtcctgtccaagctgtgtacccctgggtgctaagtattcaacttaccagaatatatcttctcatttgtaaaacgtgggatcacccagtaacattacccagtacagttggttaatgtgttttctttgaaggttagatgtgattataagtaagcaaatttcagttaaatataaaagtgatttttgaacaatagaatttattcaattaataattcaattaataagacgctatggtgaagaggatgtatttgaagaattcagacaatgaatgaatatctgtcacatattgtaaggcttgtggaacttacagtttagtggagaagataaaccttcaacaagtagttaataaccaatatactgagca

SEQ ID NO: 914709 - DNA, 4001 bp, Homo sapiens
aactatctaataagaaacttaggtaacttcaaatccttgtttttatgggtaaaatgacataatgacatgttgtgtgggatttgttttcaaattctctagaataatagcaaaaaaaattggagtgataaacaaataaaaaaagattgacaacatgttgacaactgtctctactttcgtatatgttagaattatgccataataaaaagtaaaattagaaggaaaataaaaatgtatagggcacaaaaaatgattcaataaacattagccccatagaaataacataattttccccctaaaataccatcattcaaatttgaagaaaatcaacagaagcatttcagttaatctcattttattttcattattttgactttgcataactaataaagcttaggctaagccgcattttttaaaacttggaaataaaaaggtggagcaaataaagttcaggtagatttatataattttactatagggtaatatgtatcattttttaaaaaagaaaaaaatttctgacaatgtattatgttctaagaagatttacaaagccaaaaaaaattacataatctttacaggagtctacaatttaagagtaaaaccagatgaagacataaatgtcatagataacttggcaaattattttatacaagttttaaaaatttagttagctttaaaccacacaaacttaatgatcacagatttttgtaaacatcatcaaatagttgagcacattcaaaataaattagctccctttgttaatgttttacaggggagcctttcagcataagactagtatgtggactctgtgagccagactgcctgaatttgaatccaactgctcattcagaggaggggtgatcttgggctgacctctagtctcactttcctccctgtcaaataagagataataacaccccctagctttagggttgttaatgcaagtaaattgctggcatttaggaaacactctttgaaagttatctccattatcttacagaaatgaagcaatatgcatttcctgggctctatatcctaaatgggccatttaaaaagtttatggaacttctgctctcctgtcccttacccacactgtgaaatctgtaaatctggggggaatttattcaacagcaaaacctgatctgacctgaactaatttgaaagcaaaatttgacttgagtagacataagtctgtttatattccttattccccgccccccacttactatttagcgtaagtattcatacactctgcagcaaaaatatttatatgctttttccccatattctgtcccagccccctatgtcactgttatgcaagttatggtatatgtgtaacaccataatgttttttaaatagctgaaaagtctaaatttgaaagcccaccaggcccaagtttcaaaataagggggtaagaggcctgaaccaatcactttagagttcaaaattctttcattcttaaatgcaaagagaataaaaaaagacatgcttagtccattgtgccaaaggaaattctttaataaagtctcttttaaatgttaagtttcctgtgatattcaaggattgatcactcaccatttgctgggtaacctggtgtgagagggtctcctgcaccattcagatttaggatatttccacgctggacaccacctccaggaagattccaaccgtctggataggacttcaccccaggagcaaagtagtcagcagggtctgagtagagaatgactcctttggcccctgccagctgggcatttttaacctagaaaacacagtgtctttctttccttattttaaattggttgttccagatttggtaatatcaattttcaatattacacttaaatgagtactagaactttatcttcaaccttttgtcattaggcctacaaaaaaggacatctcagagagaatttcccttttctttttgctactataagctctaaaaatcctcagaacatcagatttggaaatgttcttatttgtggtagtgagtatttgctatttccttccactagcttagaaatataataagcaagtagaccccacaggccaaattcctatttgttctacagtctaaagggcatttttcaaaatttaatttcccactaaagagaaaaatatatttattaacaaatcaaatgacagtaatttttaaattggctatgtgtaaattgttttcactcattatttataacaattcatactacaatttaatttagtaaacatttttgtagaaaatatttaaaacaaagatactgaaagttaataataaacccagtgcatgcttctttgtaggccacagccataacctgtaagcacagaaaaatttgttctgttcactctaaacatctacactgtccaaattccaatgctcaaatttaaccctgggatataacctagtaaatgtgtcctctctgtaaggtgggcatgtcacagaatacaagaaaataatggtattcataaagttttaagaaaatgattctacacatgtaaaacccactataactttttatattgggggagagaaaaaaaagagataatttttaccttaccttatttcctctgaaaactttcctatatctggcaattacaattttcccagagcaattgattttcatgtcccgttccaatttaaagaagtcttcagttcgtgcatagttaacatgcactagatcaccctgttgagatcaggaatgacttaatatgaatcagatataaaacaaggaggtttttctgcatggggactgttgggcatttttgaaagagggaagaggtcagagcacacaggagggtcagaaatgcatgagctccaaagaagagattcaagggaaaaatgaattgaaattgagaatggaattagttgggctagaagcacatgaataaagtaatatttgtttgtatttgtcccatatttagtggctatgaagctgaagctacagaagcatccccccacagaaaagcatatacatatacacattgctgcacgcaacttgaaggggtccagataccctaggctaagaagcccttaatgagaccttttctctcttcagtgtgtgttcacagggagtagcttaatggttcttaacaactaccaagtaaagaaaaaagcacaggtaacatcactgctttacaggtctgatttcaatcattaatgtgattatgtgcaaatcttataacatatttgagtctcaatattctcattggctcaatgatctgctagattaaatcagtgatcttccaaccttttttgctcacctattccctaaattaattttgacaatgtaccccttcatctaaaatttaaaattttttatcatacctttaagtagctgcaaagcatgcaatatctagcttactataaatattaacatttttagaagaaattgtatacaacttttatattgatccaaagcaatttaaatactgtatttatttactattcaacatcatcaattttaaaaattacatgaacatgctcttctttacagtcaaaattttgtcatctctttttttttcttgaacttgtatattgtccatcttcccccacagaattttactctaaagtaaaatgtatttgtgctgggcaccagatgagctgtccagattcatggtcaacgaaggactttttgctccagctgcaggggaggctctctgcagacaatcttcatctgtcagccccttcaaggattgcctcagctgtagacagccccctttctcaaggtcatgtcccttcctagaatgctacacattcagtgactgattgatgtgagggtacagagacctggacatctcagtctaacgtaggaaaattctgagaaactattccagacctccttataggcttaaccaaggttatccttcagctggcattgcagggtgacttctccctctgcccaatccagctctgcttttcacagatgttgatcccaagagagcactccataattatcaactagcattctaaatttcaattcagaatctattaccttaaatatgggta

SEQ ID NO: 914710 - DNA, 4001 bp, Homo sapiens
aaatgcagaaatagccaggagtttgccataggtccacaatgccttattcaaatgtttcagggttaaaattttttaggatttcatcaaaggtgattcaaagaaaatataattttcatatacccaataatcaagtgtatattctggggtgaaacagttacactagtgggataaattaaaactatacataaactcacattaattttcaggtcagattttgacaccaaattacttcattgtaaaagtttacaaaaatgggctgggcgcggtggctcatgcctgtaatcccagcactttggaaggctgaggtgggtggatcacctgaggtcagaagtttgagaccagcctggccaacatagtgaaaccctgtctctactaaaaatacaaaatgagctgggtgcggtgtcgtgtgcctgtagtcccagctacgtgggaggctgaggcaggagaatcacttgaatccaggaggtggaggttacagtgagccaagattgtgccattgcactctagcctgggtgacagagcgagactccatctcaaaaaaaaaaaaaaagtttataaaaatgttttagttgggggggctgcagtgtggtttttgttagtttgttttgctttttaaaccttggtcccagcccctttctagcctcatcactcaagctagtttagtaggcccttcccggaaaccatgggatcttggtggggtggggtcacaggacatgggtgctggcaggggacagccagctggacagccctggggccttggggagctcctgtgccccctaccacagagctggcttctccttggtcatcacagaacttcaatcctttgacctcagacactgaattttgggaggcgactgtttccttcactccactggacaccaggtgtctgggccctcctaaaatgctcagaatttatttcctatgacttctctccatctgtctcctctaactcatcttccacataccagtcgctaaagtggacatgcctttcccgctcacaagcttgccttgcccccgtgctgcccctcctctcctcttgacagggcctccttgacaggggtctaggcagggcctgagctgggctgtctccaggccgactgcacagcagggctcatataagcctggaattgaattcccacccagcagctctctttcctgctccacaatccattactctgctactctattgattccagtgttcattcactctctcatggttgattcattcattccaggatccaatcatgcccctgtggacctgctcactcactaaccttgagggccacgccggagaaatctgtactctcagggaataccaggtgatcctttgggttcagttcctgcgggaacaaaccctaactgtttagagcacagggttcccgttcaacctgtcccgaccccagccctcactccaccttctccttggccttgggggaaagagaagcaaactatcttgaggcttagctttctcctgcaaggattaaatgtaagaagggggaaatcaacaaatgatagccagtttaatctttgtggaatcatttcagcacagatgagggccatgccccaagtcacacagtagggaccacccaagttcaggccagagctcttttggcctttgccccctgcaccttcagagtgctgaggctctcatgggtgcggccaacacacagtgctggggatgggggctgagaaaatcctttccccagcccccagtggagcccacctgttcagtcagtagtctctcttgctgtggctgcttctgaagccaggctctcttcctgtccttttgagcagcatcactctgcaagctcctttcccacctgcctagtctcaccttcaggtcttagtccagctgtgacccctccccaccaacaatcatgacccccacacccaaccttggggccccagactagaagagctgagaactcagctctggactgaagggctagagcccaggtactagttcagggggatgaacactaacttgtcgtttaaccttgagcaggccacactctggtctgggcctcagtctccacttcaagattctctggccttcaggcaaacagagggcccttccagttcagaaaatccttaacacatggtgggaatgccatagggtgtgtggcctctgaagggggatggggagtgtcacatacctgggagaggaggtggctctccgtctggctcaggcttctgctctgctctacactcccccttgccttattccaggggacagctgtggtttagtggcctaggagacaggcagggagtgggaatggagcccaggagtggagcctgggattgggcgaaggccactcagcagttaattattgtatgtgagcaccagccaggcctccatggggtagtgggagggggtgaattaacagtgcaggcctaaggccagtccctaagctccacctacccaattttttcccaaacactgaggtctgaaaaaaatcttgcagcctgagctgccaggatcctttgagctaatctcatcagtttccaacccctctgtcctgttaggcagatgaggaaaatgagatccggaggatcaaggcaagggctagagcccaggcttccaacctcccagtcagctatagagagcaaggatctcccaaggccataaattgtagagccaccaactcccccaaccccattagcccaggtgtcacccatcaccagccacaaaatcacagatgttctgaatcttttgatcagatcttcaattgtttgaagggccaagctctccttccatccccaactcatggaccccctctcccggcaactcaggtatcctttctacagcacctgtgattctgggctaactcttccctccatctccaccccagtcaatgacagaagccttcattttttttattctctgagcccatggtggtaccacagatgggaaaagggagagggaggggcaggtttgggcaggaagaaacatagaacactgttttgtcgaggtgcctgtgtgcccttggcccggggaaggtggttgtagaggggaaagctcaggggaagagtccaggttggatgcagatgtgggaaccatcagactatgagtggcagtaagtgtagggaaaatgggggcccagtaatctgggcaatgccacaagaaaggacccaaggaggaggcaggcaggggagcctgagaagacagttggatctctagaggaaaatcaaccaagaaggaaggctctctagggcctgcaagcagaccaattcccaggagatcccagcttatgtcctgcaacagtgagccatacctgaatcttgtgacaacctgagaagtgtcaacttaaaatcaccagatctatatatttggaaacaatattttttcttatgtcaggttgtaacctgcaggctggtaagtggagcctttggctgagaccaaaagcaggcaatttgagggaggaagggtgggacaggagttttatgtaaaatgggttggctagcatacatattaatgggttataggaaaagctatgaatgttcatgaaagggagccacatgcatgtatactaagcaaacatacatgttacatacatcttgtgttcactttggggttgagatttaacattaatttttttattttttcatttatttatttatttttgagtcggagacttgctctgtagcccaagctggagtgcagtggcacgatcttggctcactgcaacctccgcctcccagattcaagagattctcctgcctcagcctcccgagtagctggaattataggcgcctgacaccatgcctggctaatttttgtatttttagtagagatggggttttaccatgttggctaggctggtctcaaactcctgacctcaagtgatccgcctacctcagcctcccaaagtgctgggattacaagtgtgagccgcggcacctggcctgttttttttttttttttttttttttgggcagagtctcactctatcacccaggctggagtgccgtgtcacaatctcggctcaccgcaacctcca

SEQ ID NO: 914711 - DNA, 4001 bp, Homo sapiens
gaaaccctgtctctactaaaaatacaaaatgagctgggtgcggtgtcgtgtgcctgtagtcccagctacgtgggaggctgaggcaggagaatcacttgaatccaggaggtggaggttacagtgagccaagattgtgccattgcactctagcctgggtgacagagcgagactccatctcaaaaaaaaaaaaaaagtttataaaaatgttttagttgggggggctgcagtgtggtttttgttagtttgttttgctttttaaaccttggtcccagcccctttctagcctcatcactcaagctagtttagtaggcccttcccggaaaccatgggatcttggtggggtggggtcacaggacatgggtgctggcaggggacagccagctggacagccctggggccttggggagctcctgtgccccctaccacagagctggcttctccttggtcatcacagaacttcaatcctttgacctcagacactgaattttgggaggcgactgtttccttcactccactggacaccaggtgtctgggccctcctaaaatgctcagaatttatttcctatgacttctctccatctgtctcctctaactcatcttccacataccagtcgctaaagtggacatgcctttcccgctcacaagcttgccttgcccccgtgctgcccctcctctcctcttgacagggcctccttgacaggggtctaggcagggcctgagctgggctgtctccaggccgactgcacagcagggctcatataagcctggaattgaattcccacccagcagctctctttcctgctccacaatccattactctgctactctattgattccagtgttcattcactctctcatggttgattcattcattccaggatccaatcatgcccctgtggacctgctcactcactaaccttgagggccacgccggagaaatctgtactctcagggaataccaggtgatcctttgggttcagttcctgcgggaacaaaccctaactgtttagagcacagggttcccgttcaacctgtcccgaccccagccctcactccaccttctccttggccttgggggaaagagaagcaaactatcttgaggcttagctttctcctgcaaggattaaatgtaagaagggggaaatcaacaaatgatagccagtttaatctttgtggaatcatttcagcacagatgagggccatgccccaagtcacacagtagggaccacccaagttcaggccagagctcttttggcctttgccccctgcaccttcagagtgctgaggctctcatgggtgcggccaacacacagtgctggggatgggggctgagaaaatcctttccccagcccccagtggagcccacctgttcagtcagtagtctctcttgctgtggctgcttctgaagccaggctctcttcctgtccttttgagcagcatcactctgcaagctcctttcccacctgcctagtctcaccttcaggtcttagtccagctgtgacccctccccaccaacaatcatgacccccacacccaaccttggggccccagactagaagagctgagaactcagctctggactgaagggctagagcccaggtactagttcagggggatgaacactaacttgtcgtttaaccttgagcaggccacactctggtctgggcctcagtctccacttcaagattctctggccttcaggcaaacagagggcccttccagttcagaaaatccttaacacatggtgggaatgccatagggtgtgtggcctctgaagggggatggggagtgtcacatacctgggagaggaggtggctctccgtctggctcaggcttctgctctgctctacactcccccttgccttattccaggggacagctgtggtttagtggcctaggagacaggcagggagtgggaatggagcccaggagtggagcctgggattgggcgaaggccactcagcagttaattattgtatgtgagcaccagccaggcctccatggggtagtgggagggggtgaattaacagtgcaggcctaaggccagtccctaagctccacctacccaattttttcccaaacactgaggtctgaaaaaaatcttgcagcctgagctgccaggatcctttgagctaatctcatcagtttccaacccctctgtcctgttaggcagatgaggaaaatgagatccggaggatcaaggcaagggctagagcccaggcttccaacctcccagtcagctatagagagcaaggatctcccaaggccataaattgtagagccaccaactcccccaaccccattagcccaggtgtcacccatcaccagccacaaaatcacagatgttctgaatcttttgatcagatcttcaattgtttgaagggccaagctctccttccatccccaactcatggaccccctctcccggcaactcaggtatcctttctacagcacctgtgattctgggctaactcttccctccatctccaccccagtcaatgacagaagccttcattttttttattctctgagcccatggtggtaccacagatgggaaaagggagagggaggggcaggtttgggcaggaagaaacatagaacactgttttgtcgaggtgcctgtgtgcccttggcccggggaaggtggttgtagaggggaaagctcaggggaagagtccaggttggatgcagatgtgggaaccatcagactatgagtggcagtaagtgtagggaaaatgggggcccagtaatctgggcaatgccacaagaaaggacccaaggaggaggcaggcaggggagcctgagaagacagttggatctctagaggaaaatcaaccaagaaggaaggctctctagggcctgcaagcagaccaattcccaggagatcccagcttatgtcctgcaacagtgagccatacctgaatcttgtgacaacctgagaagtgtcaacttaaaatcaccagatctatatatttggaaacaatattttttcttatgtcaggttgtaacctgcaggctggtaagtggagcctttggctgagaccaaaagcaggcaatttgagggaggaagggtgggacaggagttttatgtaaaatgggttggctagcatacatattaatgggttataggaaaagctatgaatgttcatgaaagggagccacatgcatgtatactaagcaaacatacatgttacatacatcttgtgttcactttggggttgagatttaacattaatttttttattttttcatttatttatttatttttgagtcggagacttgctctgtagcccaagctggagtgcagtggcacgatcttggctcactgcaacctccgcctcccagattcaagagattctcctgcctcagcctcccgagtagctggaattataggcgcctgacaccatgcctggctaatttttgtatttttagtagagatggggttttaccatgttggctaggctggtctcaaactcctgacctcaagtgatccgcctacctcagcctcccaaagtgctgggattacaagtgtgagccgcggcacctggcctgttttttttttttttttttttttttgggcagagtctcactctatcacccaggctggagtgccgtgtcacaatctcggctcaccgcaacctccacctcatgggttcaagtgattctcctgcctcagcctctagagtagctgggattataggtgtgcaccaccacacccagctattttttgatattatttcttagtagagatggggtttcactgtgttggccaggcttgtctcaaattcctggcctcaagtgatctgcccaccttggcctcccaaagtgctgggattataggtgcgagccacggcacccggcctatttatatttttatttaaaaatagtgaaagaaggctgggtgcagtggctcatgcctgtaatcccagcactttgggaggccgagatgggcggatcacctgaggttaggagttcgaaaccagcctggccaacatggtgaa

SEQ ID NO: 914712 - DNA, 4001 bp, Homo sapiens
gaatctcattacttaaggctgacaagctaaatattaaaatgtgggccggcacagtggctcacatagtgcctgtaatcccagcactttgggaggtggaggtggacagatcacttaaggtcaagaatggagaccagcctggccaacatggcaaaaccccatttctactaaaaatacaaaaattagctaggcatggtggcaggtgcctatagtcccagctactctggaggccaaggcaggagaattgcttgaacctgggaggtggaggttgcagtgagctgagattgtgccactgcactccagcctgggcaacagagcaagactccatctcaataaataaataaataaataaataaataaaatgtgcacttaaggccgggcgcagtggctcacacctgtaatctcagcactttgggaggccaagaggggcggattatgaggtgaggagttcgagaccagcctggccaacatggtgaaacccccatctctactaaaaataccaacaaacaaaacaaacaaacaaacaaaaaattagctgggtgtggtggcgtgtgcctactcaggaggctgaggcaggagaatcacttgaacctgggaggtggaggttgcagtgagctgagattgtgccactgcactccaccctgggcaacaagagcaaaactctatctcaagaaaaaaaaaaagaaatgcgtattacaagtttctctcccttgcctccctccctttcctccctccctttcctccctccctttccttcctccccttccttccttcctttctttctttttttcgttctttctttcttttgacaaggtctcactctgttgcccaggctggagtgcagtggcacgatctacaatctctgcctcctgggctcaactgacctgcccacctcagcctcctgagtagctgggactgcaggcatgtgccaccacacctgactaattttttttattttttagtagagatggggttttgccatcttgcccaggctggtctcgaactcctgagctcaagtgatctgcccatctcgacatcccacagtgttgggattacaggcgtgagccgtaacacctggcctacaaattacttttcctctgctttttctttagttatatcatcatgttcaggatattaaaggggtggtagcaaaataaatgttatagggagacctcaggtccaatgtggtcgagagacacagcccaaagttttgcgagatgcatgaaccaagatgcttcaggagggcgtacggctcatttctgtaatcccacactttgggaggctgaggtgggaggatcacttgagtccaggaatttgagaccagcctgggcaacatatggagactttgtctcaggaaaaaaaaaaaagaatgctttgcacacagcctcataatgtgagagactctcccttcttgagctgtttagggctggcagaaaagaggccactatgcacagtgtgcagtttcttccctcagatctttggaggagtcattcccagtctaaatccctaaatcaagcaaccccaggatgggtcactccaacttcatttcccaggctctcctttgggcctgcttccttatttctgtaatgcggaaactcaacaaccaagaaggtgaactgttggcattgtaccgacatttggcacagtgtctgtgaaatagtcacccatattaatgcaaactgaagggctcctccacttcagttcaccagtgaatggggtttggcatttccatgtcctcgtttcctcttcctgagccagtccctcaccaccccagatcaccccctggcccacctgctcatgcaacttgtcctcggggcctggcttttccttgtggtgcttggcgttcatgcagacattgagaagctcagtcctggcccatgcaatccttgtctgagcctcccctactacagccacccacactagaaggagcagcagctgtgttgtcatccgctgagccatgtctgtccctgaagaaagagctgtggtcagtggcaccaaggaatgcggaggtggggccttaagttgtgtgcagggctccaggagggtggggcctggacggaagcctggggcagatagagccctgcccccatctccctcagttttcccagatccaatgaaaggtaggattagacaccacccctccctggcttgagcctcattgccttctccaggtggtcacgaggttcaggtgatataattcaaggatggatttgggcaaaatgcagaaatagccaggagtttgccataggtccacaatgccttattcaaatgtttcagggttaaaattttttaggatttcatcaaaggtgattcaaagaaaatataattttcatatacccaataatcaagtgtatattctggggtgaaacagttacactagtgggataaattaaaactatacataaactcacattaattttcaggtcagattttgacaccaaattacttcattgtaaaagtttacaaaaatgggctgggcgcggtggctcatgcctgtaatcccagcactttggaaggctgaggtgggtggatcacctgaggtcagaagtttgagaccagcctggccaacatagtgaaaccctgtctctactaaaaatacaaaatgagctgggtgcggtgtcgtgtgcctgtagtcccagctacgtgggaggctgaggcaggagaatcacttgaatccaggaggtggaggttacagtgagccaagattgtgccattgcactctagcctgggtgacagagcgagactccatctcaaaaaaaaaaaaaaagtttataaaaatgttttagttgggggggctgcagtgtggtttttgttagtttgttttgctttttaaaccttggtcccagcccctttctagcctcatcactcaagctagtttagtaggcccttcccggaaaccatgggatcttggtggggtggggtcacaggacatgggtgctggcaggggacagccagctggacagccctggggccttggggagctcctgtgccccctaccacagagctggcttctccttggtcatcacagaacttcaatcctttgacctcagacactgaattttgggaggcgactgtttccttcactccactggacaccaggtgtctgggccctcctaaaatgctcagaatttatttcctatgacttctctccatctgtctcctctaactcatcttccacataccagtcgctaaagtggacatgcctttcccgctcacaagcttgccttgcccccgtgctgcccctcctctcctcttgacagggcctccttgacaggggtctaggcagggcctgagctgggctgtctccaggccgactgcacagcagggctcatataagcctggaattgaattcccacccagcagctctctttcctgctccacaatccattactctgctactctattgattccagtgttcattcactctctcatggttgattcattcattccaggatccaatcatgcccctgtggacctgctcactcactaaccttgagggccacgccggagaaatctgtactctcagggaataccaggtgatcctttgggttcagttcctgcgggaacaaaccctaactgtttagagcacagggttcccgttcaacctgtcccgaccccagccctcactccaccttctccttggccttgggggaaagagaagcaaactatcttgaggcttagctttctcctgcaaggattaaatgtaagaagggggaaatcaacaaatgatagccagtttaatctttgtggaatcatttcagcacagatgagggccatgccccaagtcacacagtagggaccacccaagttcaggccagagctcttttggcctttgccccctgcaccttcagagtgctgaggctctcatgggtgcggccaacacacagtgctggggatgggggctgagaaaatcctttccccagcccccagtggagcccacctgttcagtcagtagtctctcttgctgtggctgcttctgaagccaggctctcttcctgtccttt

SEQ ID NO: 914713 - DNA, 4001 bp, Homo sapiens
gaacaagccccctccttagcagaggcacactccagccgtacttggtcatgcagcttgtcctcaggacctggctttgtcttgtggtgcttggcatccatacagacattgaggagatcagtcctgtcctgggcactgcacatggtggctacacagaccagaagcagcagaagtggcatccatttccagaccatgtctttctgtccctgcaggcggagctagggtagggaaaccaagtcctgaggggaaagggctccaagctgggagcccattcacctcctgcctcagtctccccaaccctacggtggcaaatgaggtcagaccctgttccttcaatgctggggccctgaagctccctgaggctagggtagagagggttgaccaggagggctccctcacccccaggctttaaaggctcaggagaactggcgttagtgagtgagccctgggggagtcttcccaatttggaggagatactttgcgccctcaccttttctctaggctttatctatgacaagtaattaaattcttcaggtctatcctctgcttccctgaacagagccagggacacataatgtcttcaccctctgtccagcaagggctctgtggttagatgatagatcacctggggtcttgtgccagcttagaaaccaggttagccttggggaaggcagtgacccagctctgccgagttctcagatcagcatgaggatcaagtgacagaacccacaggatggtgtttggttaaatgatacggaaatggaaagagcagtgttttttaagtagttttgcttcctcagactttttccttccctattctctgaaagccattttcctttccagcctcctcagctgtctctgggctaatgcagcagacctcaccctacctctcaaaaaacaaatgcagatgagaatgatatagactgggggtggggcaaggtgaggagggggtgaggaataaaagactatatactgagtacagtgtacactgctccggtgactggtgcactaaaattcagaaatcaccactaaagaacttatctatgcaaccaaaaccacctgaaaaacgatagaagtttaaaaaattcaaaataatttttttaaaaatgcagagagacccttagatctgagagacaacatgaaagtttcccatgttggagcagccagaccagcacttagtgtcctggaaggcactcaacaacaggagcagccctcgcctcctctgttcattgctgcccttgcccccacccccagccattacagagctgttcctttgggctctgtcactaaagagtggataatggatactgcttcctctccctctctggtaaaggtccctccaaaaacttactgaccatggctctatgtttagtgtcaagtcttccctcttccaatttcttccccttcaagttgccttccccacaggagccagcatgatctttctaaagaaagatgtggccgggcacagtggctcacgcctgtaatcccagcactttgggaggccgaggtgggtggatcctgaggtcaagagttcgagaccagcctgaccaacatgatgaaaccccgtctctactaaaaatacaaaaattagccaggcgaggtggtgggcacctgtaatcccagctactcaggaggctgaggcaggagaatcacttgaacccaggaggcagaggttgcagtgagccaagatcgtgccactgcactccagcctgggtgacagagcgagactctgtctcaaaaaatacaatacaatacaatacaatacagaaagaaaggtgtgttcctcccctctgcacaaactctccaagtctccccactgcccttgtcacccttccctccttcgggcatcttgcctgaacctccgttgctgctgggagcatacacggctgtgtctgagttggcctctctctaagtaggcaatagatccaggcccctaggctgtccccacagcctctgtcttcggtacagggtagacaacgcgctctggtaagcactgagtgaaatctccctacttagctattctccttcctctcttccttcccttccagaccccaccctcttcaaggctccctgagtctgtccatttagtcattcctgcttgcattcatctccttacttgttaatttactcattccagcatccacacattcaactttcatcaaaatctagagaattgctcatcaccagggggcatctggattttatagataccccaagtggttcttaggataaggccagctcgatggagattaggtctggtggaaaagaacccaggctttagggtcaggccaatgggacccaatgagagctccatctcttgcacaaccttgggaaaagtcactggaccttactgagcttcagtttgctcactagaaaattgttcacaattgtatagggaaaagcctggcacatactgagtaggcttaagtgacagctattgggttaatttatgggcagccaggtggacataggtagaagttgaggtataggctgggcatggtggctcacgtcagtaatcccagcactttgggaggctgaggcagacagatcactgaggtcagaagttcgagactaccctggacaacatggtaaaaccctgtctctactaaaaatacaaaaattagtggggtgtggtgccgtgcgtgcactgtaatcccagctacttgggaggctgaggcacaagaattgtttgaacccgagaggcagaggttgcagtgagctgagatcgcaccactacactccagcctgggcgacagagcgagacttcatctcaaaaaaaaaaaaaaaaaaaaaaaaaagttgaggtatagaagtcaagggtcacagaaaaattaaaattgtctcaaatatgttaaacagcaatatattaccatctggcatttctgaaaacataattaagcaatttttgatggccttttaaaaattgtggtaaaaacacacgtgacatacaatgtgccatcttaaccatttctaacggtacagttcagcagtgtcaaatatagtcatactgtttgcaatcaatcttggaaacttttcatcctgcaaaactgagactccatatccattaaacgattccccactttcactttccctagcccccgccaaccaccattctattttccgtctctgtgatttgggctactgtactgtaagttccttgtccaagtggaatcatgcaatatttgtcttttcgtgactggcttttcgtaatgtccccaagatttgtccatgttgtaaggtgtatccgaatttcattcctttttaaggctgggtaatatttcattgtatgtatgtaccacattttctttatttattcatctatcaatggacctttgggttgcttccacttttggctatcatgaagaatactgctatgaaaatgggcatataaatatgtctttaagacctttctttcaattctttttggtatatatccagaagtgaaattgcaggattatatggtaagtctatatttaatttttgaagaactgccacactgttttctgtagtggccacaccattttacatttccatcagcagtgcacaaaggttccaatttctccacatcctcatcaacacttatttcctgttttgggagttttgggtttatagtagccatcatgttgagtgtgaggcgatatctcattgtgactttgatgtacatttctctaataattagtgataatgagcatctttttccatgcttattagccatttgtatatcttctttggagaaatgtctattcaagtcatttgcctatttttaaaattgagttttctttttgttgagttgtagtattcttttatgtattctgaattcaccctttatcaggtatatgatttgcaaatattttctcccattctgtatgttgcctgttgattgtcctttgatggacagaagtttttaattttgatgtagtccagttacctatttttacttttgtttcctgtgctattggtctcatattcaataactcattgcctaattcaatgtcatgaaactc

SEQ ID NO: 914714 - DNA, 4001 bp, Homo sapiens
ggttagaagttcgagaccagcctgaccaacacagagaaaccctgtctctactaaaaataccaaaaaattagccaggcacagtggtaggcgcctgtaatcccagctactcaggaggcagaggcaggagaatcacttgaacccaggaggcagaggttgcagtgagccaagatcatgccattgcattccagcctgggcaacaagagcgaaactctgcctcaaattaaaaaaaaaaaaaattataactgaggacagggaggagaggaacctggcccaggttgtgggggagggtggaggtcaaggggctggtctggctctcccagggtctggaggtccaggtggggagactctagatagatcctgagagtggtggagaacgaaggagctatagcctgcacgtgggtctgaacctagacttgactaaatgtggaaaaggcaatcctagaaaggtaaatacaaggcaggtaagacaagcagaaatggtggagttttttcttgggaagtcactctaggccaggactcagaaaacctgagaaatcatgaatcaattgcataaaatttctgggctgaacccttgcacctagggtcaagtgatggcagaggcgtgacaggcctgagcacccaggagaaacaatagggaaatccatgggaggggagccagacctacccacctcccacaccctggcccacgcccagtgccggctgacacagaacatgcttccctgccagcccgacttcacacttgcttttccttggatgttccaactcttggtcttcctgcaagaccccttgcacatcatgggtcttagggtttggcagacatgggtcctgcctgtcagggtcaagggttgttgcctccaaaagagttactgagtacaatgagaagaactcccttgctatagtaagggctcaacaaatatcatcactctcatatagctcatggccctgagaatgatagtcatctgtctctctcaaaggtctacatccacaccatttcctggcaaggaggatgtgctctagaaggttctgaaaagcaaatgaagtggtgggcacagagtttccatttcagttttggagaatgaaagaggtcaggagatggatggtggtgatggttgcacaaccacatgagcatacctaatgccactgaaccgtacagttaaaaatggctaaagtggaaaatgtatgttatgtatttgttttttttttttaaccccgatttaaaaataagcaaatggaatgttgggagtgactcagatgtcatggggcttccaggctgtcctgtcttcgctttaacccacagattgtgtccacgccacagtctctccctaggcacatccccagccctctgggaatgtgaaaccttgtagggagcaggccaggagaccagaggaatgaaatacaagcacactcctgagcctggagttcaaattggagctcatattccccaagctgcctcagtggccttacctgtggcatggtggccctggccgcccctccccttccttgtcagcagcggcacccttggttctgaccacactggacctgccattgctcgtgccatcaccctctgacctgtgtgcatgctgtcctacaccaggctgccctcacctggccatacagctcgtcctcggggctgggctgtgtcttgtggtgcttggcgttcatgcagacattgagcaggtccgtcctggcccgcgcactcctgggctgggcactccccgcagcagtcaccaaagccagaagcagcagctgcatcatctgccaggccatgtccatctattcctgccagagagccacagtcagaggtagacaaggcctgagacaggggcaacagccatgtgattgtgtactctctccctcccaggcccagatctctgctgtccccaccctgcatcccctacagggcagctgagccaagaaatgcgctgcgtgtagaggtgagagggagcccttcccctacctggaggcaggacctccaccaacagcgctgtaggtccaggctctgacaccagcttgctctgtgaccttgtagggagccaccgcccttgtggacttcccctcttggatttctccagtgttttatgcaattcttttcaaatttgcacaaggaggaaccacaggtggtggcctgctgatgcaggagtgagactctagacagcctcaggcttctgcttcctcagcctgtcctcctaccccatggcagctgaggtttagatgcccagggaagctgagatggggacagcaagggccatggagctgtcagctattgttcatggtcccggagcagatgctgcgggaggcaaggaggtgggggcaatcacacctcacccttcaccccttctgggtcttgggaaattacctaggcagaggcaggctcagaggttgggggaggccaacaggtcagcggcaaacggaggagggggctgagcgagaacagtgggcgctatctcgcctcccacctctcatccccacttttccctctgtcctgttgcagggccttacctccattctcagcccacctgggaaggtggagtctctcccacctccccacctactttataaccccatcctgcctgcttggttagaccctctgttcgggaaggtgcacaaggctttgtctaggagacagctcaattgtctttcaataaggacccagttaaattatggtacatctacccagtggaatttaatgtggtaacaaagaaagagaaagctcctgatgtacaaatatggaaaaatcttcaagtgcattgttaagtggaaaaagaaaggtgcagaaaaatgctatgtaaaaaataataataataaattctctgtaaaaaaggagtaagaatgtctgtgttgactgggcgtggtggctcacgcctgtaatcccagcactgtgggaggccgaggcaggcggatcacttgaggtcaggagttcgacatcagcctggtcaatatgataaaaccccatctgtactaaaaatacaaaaattagctgggtgtggtggcacatgcctgtaatcccagctactcaggaggctgagacaggagaatcacttgaacccgggaggagtttgcagtgagccaagatcacgccactgcactccagcctggataacagaacgtgactctgtcattaaaaaagaaaagaatatctgtgtttgcaggtgaaaattctgtggcaaggtatgaaaagaaattaataacatggtcacctggcagtagagaacaggattaggcttgagacttttctctgtaaacctttccacattgttttgatttttggaccatgtgactataaatcttatttaaatacatataggtatgtgtgtatacatacataaatataccaaatatgaagtgaaaatactaagacacagaatgacctctctgacttgataatatgtatgtaaattttgataacactagaatgtatacaacagtacctttaagttaaggatactacacatgtgcttgcaaaagtatgaacatgaagccaccaagagttctggtccctggacatacatccagtaaattcgatgcagttacaccatatatatcccatttctgtgcacaaatggtagcatactgttctgtactttgcttttttgggtagtttcactataaatttattcttttgacaaaaaaacaaaaacctcatgaactcaagttatccacagttgcacacttgagtattactgtacatctgataacataactaaaattatttctttatgcctcgtagggtctaaacttaaaactatttcattagccgatataaaaaagttagtgggctgggtgtggtggcttacacctgtaatcccagcgttttgggaggttgaggtggatggatcacttgatcccaggagtttgagaccacttgggcaacataggaaaacttcatctgcacacaaaaatagaaaaattagccacgtatggtggtgcgagcttgtagtttcagccatttgggagggtgagctgggaggattgcttgagccctggaggtcgaggctgcagtg

SEQ ID NO: 914715 - DNA, 4001 bp, Homo sapiens
tgtgtgaccatgggcaagttatttaacctccatgtgcctcagtttcctcatttttaatattgttacaggtgaggattacaggatttcactgatgttaagaagtaccctttaatagctctgaaatcatagtttaattggcaatttaaaaaattttagtggactaggcatggtggctcatacccagcactttgggaggctgaggtagaaggatcacttgagctcaggagtttgaggtcacaccgggcaacacagtgagacttcatttctacaaaaaaattaaaaaattagttgggtgtggtggtgcgtgcctgtggccaggtcgcttcccagctaggatctcagtaggattgcttgagcccaggaggctgaggctgcagtgagctgtgattgcaccactgctctatagtctgggcaacagagggagaccctgtctcagaaaaaaaaaaaaaaagaaaagaaagagaaggaaagaaaattagtggcataaagttatagtgggtttttttttcaatcgatgaggtcttcgattccgtgaaatatggtaaatgatgtagcaagcgcccagcacaacgtccctgttcccattctatcagccagctatctgaggagtgggttgggatggggctcagtgttctgggagaagtgggttctagctctgccgctgggccctgggtgtgggcgcccaatcgtccgggaagcgcccacaagcccaggcaagtcccgacagcggtagcccgagcccaagcgctgcgggcccggcgtcccagtgaccccagttccgggtccgaggcaccgccggcggcatctcccactcccgggcccgggccgctccaggccaggaagggagggacgccccgggtgactcagccgccgtgactcggccgccgtgactcggcggaacggacgcccctccttccctcccctgtcgacacgtgctcgcagcccctcgacaggaaatgggcacctgcagcctcccgggtgccccccggcgggcagcgggcgccgttaggggctgagagtggggtcgcgagagtcgcccgcagcctgaccccgcgcacgtcccggaacctcgaggtctctattcgccgcattcggcaaagggatcgagggccggtctccggggacctggcaggttccactgcccggacccccctggactccccaggccgagaaacgatagggacttggcgacggaggggcgaaggacagacagacggacggacacgcggagggtcgcagaccgggccgggactcccaccctggcccagctgctctcccgacggatcccgcctccctcccgtgtggggaccctcaccccagcccagactccagatcccaggaattcagcccgaagcggagagaccctcctagccttcgaggcgaccaccctaggcgcccacgccccttctgaagcagggtggacgcagaagtcagaggtgggcaggaggagagaaagcgggcacggagacggagggacggacgcggacggcgagggagaagggggcggctgggagaaggggagttcgcgggtctctgctgcccgctgcgcggtgggggcaactggccccggacggcgaggggcaggatcctcgccccagcccccagcccggccccgactccggttccccgctccagtcccggagcgtgcgggagttgaccccggcctcccacgcgcggtcctcccgtgggaccaccggcgtcgggccccactcacctgctgggctgcctgcgctgcggccgggggctgcgcggggccgccgtacccgccgccgttcccggagctcgggccgggttccccgaagtctcggaacatgcccggggctggcggctctgcggggtacacggctgctgggttctgactcacccgcgccgtgcggagtcttttctttttatgaatgaaaagttctcgggctgaaccactgcgaccgcggggggtgggggcgttgcagcggcgcggtcacctccaggctccacccccgagacgcgccgccttggcccgtcggtcccgaacttggcgacgcctccccaagtccggctgcagccttttcaccgggatgggcccggctcggcgttccccggaggctgcgggcccgcccccctgacgtagctgcccatacatggtgtaacttcctcgccgcgcccaggtggagccccgggttcccctgcggactgacgcacctgccagagcccgcgccccgccccagccctctcgaggcctgggctaacctccgtttctgctcccacaaaatagcacgaaagaatcacatctctaggagccacgccaaccgccacccaaagcttcgtggagtgaggtctttccactggccttgttttaaggcttcgagtatatgaaaagtgaataaatgacaaaccagggttacaaaaatggtggcatattttattttactttatatttttgagaccgggtctctgtcacccaggctggagtgcagtggctcgatctcggcgcactgcaggctcaacttcctgagctaaagggattctcctgcctcagcgccccctccaagtaagtgggactacaggcgcgcgtcaccacacccaggtaatttttgtgttttttgtagggattgggtctcgccgtattgcccaggctgggtggtatattttaaatgtttgcgataaggtaatgctttgaactaaccccacataaaatgcaatataatagtattactcaggataatttcaggagctataacgagttttaattcagggccactacaggtgtcctgaggtctgataaacgccatcttcattacggtcagtgcctttcggaggcttgtggccaccagacttgtttggagagtatgtcaaaggtgagtgaatgtgaggcaggtatcatcctcatctctgttttacagatggggaaactgaggctgggagatgctgaaatgaattgcttgaagtcgctaagtgagtagctggcacaggttgccaagtcacagccgtgggcactccaagcccaggctcagccaagattttcaaagcccttacaccttcacagacaccttgtcgcacatccagaatgttagtgctgggcaccatcccaaagcttctctctgattacttccatcatagatgaggaaactgaggcccagatggagtactgagctgtcagttgtcacacgactacagaaagagggctggggccaggtgtggtggctcatgcttgtaatcctagcactttggaaggccaaggcagaaagaaccatttgagaccccatctctacaaaaaattataaaattttctggacatggtggtacgcctgccttgtggtcccagctgttctggaggctgaggcgggaggatggcttaagccagggaggttgaggctgcggtgagctgtgactgcgccactgcagtccagcctgggggacagagcaagactcaaagtaaatagatcaagagagggctgggctctcctgcttctccatcggtccttccatttcatcagctctagctttgccctctgggctactttccttgggaacacaggccagaagcctgtgggtgcactcaggacttagagccaggaagtccagattgcccctggggttctagtcccagagctaccattttctgtctgtgtgacactgggcaggtcaccttccttcaactgggcctccctgctgatctcacagagctgttgtgggatcaagtgagatcacagatgtgaaaatgctttgtaagctataaagtgttatgcactcagaaagtggttaccagcctggtgcctctcctttgcctttgagcgacccaatgcttgtcaccctcttgtcatcatcatctctgtgtgtgtgtgtgtgtgtgtgtgtgagagagagagagagagagagagaaagagagagagaaaggagaggagagtgtttttgaggcagtatgatccgtggacagaacacccgtgctggggtcagacagctctggggtctgggtttgaatgtggttaggctgctcaccagttgtgtgacctaggtgaggcaca

SEQ ID NO: 914716 - DNA, 4001 bp, Homo sapiens
aaaaaaaaaagaaggccgggtgcggtggctcacacctgtaattctagcactttgggaggctgagacggcggatcatggtcaggaattgaagactagcctggccaacacagggaatccccgtctttactaaaaatacaaaaattagctgggcatggtagcgcgtgcctgtagtcccagctactcgggaggctgaggcaggagaatcacttgaacccggggggcagaggagatcgcaccactgcagcgtgggcaacagagccagactccatctcaaaaaacaacaaaaacaaaaaaaacaaactgtagctgccaccacacccttcccctattcctgagtctccttctcctgttctttccccattgcagattatcactttatagcatactatatgatctacccatttattatacttctgtggattatctgtctgcccccagtagaatgtaaggttccttgtctgttctattcactgtgtatcatgagtgtctaaaacagtgccaggtcagttggaggtgctcaatacatatttcttgaatgaagaaacaagaaagaatgttcattagcattaattatggtggcaaagagttggaagcaatctagggtaaagaaaattaaaatgtaaaaggtgggacacccagccgatagaatactaacaacaatcagaaataatgaatcaggtctgaatttagcaacctaaaacaacagctctcaaaaacaatgagtggagaaaacagacgttaaatggattagggttggtaatgggagcagcagaggtaatggaaggaggggtggagacttaaggggcaaaaggaagagttaaggccgggggcggtggctcaggcctgtaatcccagcacttttgggaggccgacatggacaacatggtgaaactctgcctctactaaaaataaaaaaaattaacagggcgtggtggcgcacccctgcaatccaggctactcaggaggctggggcgggagaatcgtttgaacccgggaggcggaggttgcagtgagccgagatcgcgccactgcactccagcctgggcgacagagcaagactccgtctcaaaaaaaaaatttggaaaaaaaaaaaagagttaatccaagggtcttgcaggcgaaaaggtaccatgaatgtggggagtaattatgtcaactctccacacttgacgtccaaagaagaaaaagaaaacctaaaagatcgcgatggtcaactaagcatttggcaagtacggagcacttgtaggtgtcaggcaatatgttaagaggtgagaatacagccatggataaaacgatgaggcctgtttttttaagagacggaaaagtaactgaaatatacagtatagcaaatggcgaccagcgccaaggagaagacccagaagaggccttggaatgttctgggagcctggcgggtgacgtagagtggaaagcctccgtttttaggtgagaccagctgtcctccgggagcttccaattgagtcaggcgcgaacccccccaccccccaaaccactcccgagtagagttcgcgagtgggggtggagcgggggcggcggagctaagccgtcggggggggggggcgcggggcgctcggccccccaagcctccccgggaggtgggggcgaaggctggggagccgtctgccccggggtcccgcgagcccctaggccaccctccgccacgcccagccccccacctcaccccacccgctactcacgtttctgctccgctaaggggaggtgagatgtggtgaaggccagaaagagctcgttccccatgtcccagtccagcagtcccgggacctggccatggaggcgggcccagaagtcgaggtgttggagcttcacgtccaccttcggggctggcagaggcgcggcggcgcggagtggggacgcggagtgggagcgcggcggctgaggagcgaccctcacaggcgccttctcaaatgcgccggctcggattgagttagcttggcggcagctcaggtgtggagcggtccatttgacgcctttaatctcttcaggaccgcgccgaggaacgcttaagaagaccctccttgactctacccttacatgccgggggtcgaggacctggggatccggaagggaccccagatcatcttacgcatcctcgtttgcccaagccccttgccccttatttcattgaaaaggcgccatggtcaagtgatcgtatttatttatttttatagttttgctttaacattgatcctttctaccataatagtattagtagttactttctagaagttatgaaaggtttatggtttatccacgatcacatctgtagtagatggtggagatggaattacattggatggtgatttgattaaaaaaatttttttttgtcttttggccgcatgcggtggttcacgcatgtaatcccaacactctgggaggccgaggtggacggatcacctgaggtcagaagtttgagaccagcctgaccgatggtgagaccccgtttctactaaaaatacaaaaaaattagcagtgcgtggtggctcacgcctgtaatcccagctactagggaggctgaggcaggagaatcgcttaaacccgggaggtggaggttgcagtgagccgagatggtgccactgcactccagcctgggggacaataaaattaaaataaaaattttgtttttaataatttcagatttgcagaaaaatcccaagaatgctacaaaaaattcctgtatactttttcacccagattgaccaattacaccaattattatcattttatcacatttatatttttatttccatatatactacaaatacattatgttttgcttaacaatttgagagtaatttgcagacatcgtgtccctttacccaaaaatatttctgtatttcctaaaaacaaggatattgttttatgtatccagaaaatcagaaatcagaaaatttaagattgattcaatgttatatttaatatgcagttcttattcagattttaccaattgtcccaacaatgtcatttatgtaaatttttttttctggccgttatcccttttagcactatgcaatacatttaatatccatgtctgtttactctccattaatctggaacaatttctttctctttttttttaaagccaaatttagcaatagggggttgtataccaactttagtgacactaatgttattaataataagttctgataacccactaccatcagacaagccatctttacttttttgtttttttgagacagggtttcactttgtcacccaggctggagtgtagtggtgcaatcggctcactgcagcctcaacttcctagactccagcaatcctcccacctcagcctcccgggtagctaggaccacagttgtgcgacaccatgcccagctaatttttggtagagtcagggtttgccatgttgcccaggctgggtctcaaactcctgacctcaagtgatccaactgcctcagcctctcaacgtgctgtgattacaggcatgagccaccgcacccgggctctctgtctttataatctttcataacattgacatttttgaagagcactggccatttgttttgtagaatggccctcagtttggatttggctaatgtttcctcttaattagagtatgcatttttggcaagaatactacagaagtgatgtttcttctttttttaacttttaggttcaagtgtacatgtgcaggtttgctacatatgactcatgtcacgggggtttgttgtacagattatttcatcacctaggtactaaacctagtacgcaagagttatttttttctgctcctctccctcttcccatcctccaccctcaagtaggccccagtgtctgtgtggttcccctctttgagttcatgagttcttatcttttagcttccacttacaagtgagaacatgtggcatttggttttctgttcttgcattagtttgctaaggataatggcctccagcttcatcccggttcccacagaagacatgatctcattcttttttatg

SEQ ID NO: 914717 - DNA, 4001 bp, Homo sapiens
ggtgccatgcttatcctggatatccatcaccaccaccaaacctacatttatatcctatccataatcaagttctgcgggctccggcttccaagtaactcctcaatctgtcccctttcttcctctgccaccatcatcctaggccaagccactatcatctctcaactggacaaatgcaaaagcatcctaactgttcccactgattccccgcttccatcctaccccctgctgtgaacatgtttacaatatagctagaaatatcttttcaaaacacaaatttaatcacaaaccctcttgcttaaaaccctccaatgagttttccattactctaagaaccaaagtccaaagacttaaacacagcctgtaagatactgcacaatctggcttctgttcatcttatcctcccctacactccaggccctttagttccttgatggcaccttatttcctcccaccacagggaacctacatatgctctctgcttttaaactgtgtccacttccttgcctagttaattccttgcttgggaaagcctttcctgacccccagaccaggtcaaactctacatgatctcttggacacaactgcagtttgtattgttacatactctaaaatccatgaggggggaggctgtgtttaccttcaccactgaatctccagcctatcgcaacacccggcatattctaagtgctcagtaagtatcttaaataaatgaatccttttgccatttcatacctcactcaaactcttctcagcagcactggaatctttctttggtctggccttagcttacctgtccacactacatttcatgctactactcacaccgtctatctagatggcttttgccagttccttgcataagaacaatatttttctcctagtctgcactcagttatttagagactggaacacacacctttcttaagccagtaaacatcctccaaggctgatctcagttcccacctgctccatgtacttctaccgttatactagctagcagtgcaaagcattaagttgagttctagctaatctttttttttttttttttttttttgagacggagtttcgctaagtcgcccaggctggagtgcaatggcatgatctcggctcattgcaaccttcgccttccgggttcaagcgattctcctgcctcagcctcccgagtacctgggattacaggagcccaccaccacacctagctaatttttgtatttttagtagagacggtgtttcaccatgttggtcaggttgctctcgaactcttgagctcaggtgatccacccgcctcgacctcccaaagtgctaggattacaggccccgcgcccggcctctatccagtcttgaactggcctactgtctattgaaattttccctctctaggtacactctagccattttccagaacattcactgaatcccgtcttctcttcactcctttaccgcaacagcactaagtacagcatcctgaacacgggcaggacttaatgcacatctgtgccaccgattatcaatcagtctgactgtaagcttaaatggagaatgatgtgagacctgccacctgaaaagggccgccttgggagccatacacctgcacagcccctacaagctctggtaggtaagctaacccccttccccaagccgacccactgtcctgccagtgtgggccatggtttcgggtcctgaaggacacacagtcggaggttggggacaacccagaaccacaataccctctgtcgtcctcaactttacccagagaaaagcctcctctgcgcgtgcctggcctccgggtcaagaggccccggcccatgccgtgcggcagaaccctccgaatcataacccctctgagcccggaccctctgaaagctgcactgctgcctcgctattatcgcagccgtcactgctccgcgccaaacgccattcagacgagcgcgccaattggccagcggccctcagggctctgccccgcccaatgctctaggtggccgtctccccgtgacctctcctggagccccacccaggcccgctcccacccgccattggctggccttgcgatacgtcagtcctgcgcgcccccgggcggagatggggagggcacccggcgttctgagcggaagtacggttgagccgatttccggggccactggtgtgacgtgtcccgcgcttggcgcagcaggaagcggcggcgaacgcggcctgaattcccggcgccggccccagctcctctgccgctgccgccatgctcgacttcttcaccattttctccaagggcgggcttgtgctctggtgcttccagggcgttagcgactcatgcaccggacccgttaacgcgttgattcgttccgtgctgctgcaggtaccgtccccgtgggatcagaactccaggctcttctttcctgacccgatccatggtccccttcgactctattccgcgcctcctcccaccctccccgcccacctcacactgaccactcacgcgtaacccggactccgcttcgttttctcgtccccttcagactaccccgcaacttaatgacggcccccgcctctggtgtctcaactctagccgaattccggcgcctttgggattctcctccgctccctctatttatccccagcagcttggttttgttgtttcgagcctaggtgaaataacagatgggaaaacacctttacaaaactaaatggtgtatagctgctagtaatctgattgtttacatgactacttcccttttggctcccatgtgtcttgctctctctctcatctttttcccccaacttggttatcttatttctggtggaatgccagagagaagtgccccaacatcctcttgtcctggggacagatttgagtttgggggaaatgtttggctctttcccaaaggttatccaaacccagggcccaaacctgggttttctggggatagtctgaacactgagacatactctttctccaggaacggggaggtaacaactccttcacccatgaggcactcacactcaagtataaactggacaaccagtttgagctggtgtttgtggtaagtggggtgttgtagagggacgattgcattgttaacatagccctgatttttaagagaactctgattaattgcagccagtgtatatgatgacgtaactgaaaaaactagaaaggtagatgggggaaaacagcagctactgggcccaggcagggagcttggctgcctctcaggacagggaaaccggccaggtagctgaacctatctctgaaagccagggttgagttggcgtccctccattctaggctagtatgtaagcagatctgttggctgtttcttcccctaaacaggttggttttcagaagatcctgacactgacatatgtagacaaattgatagatgacgtgcatcggctgtttcgggacaagtaccgcacagagatccaacagcaaagtgctttaagtttattaaatggcacttttgatttccaaaatgacttcctgcggctccttcggtgagagacctgccttctctaaaatcaatttatttccatgatttgatgacctctctgaaggtggttcaaaggtggtaaattgatgtgttcaaagacattcctaatttgctacccagttctcattgtcctcttgggtgtgagagtcctttctctggaccgttatttttccttctgcatggggtagaaagataaaccattctcctttttgtttagtgaagcagaggagagcagtaagatccgtgctcccactaccatgaagaaatttgaagattctgaaaaggccaagaaacctgtgaggtccatgattgagacacggggggaaaagcccaaggaaaaagcaaagaatagcaaaaaaaagggggccaagaaggaaggcaagtttgagttctttggatatactgggacatgaaaggtgttaacacggtgctaaggactgaggtggtccttccttttgtcattgcttacctgcttctcactcaaatggtcaccatcctataatccccaggcct

SEQ ID NO: 914718 - DNA, 4001 bp, Homo sapiens
gagtttggggccgacatactcgggttcccatccttgcctggtcgctggccaacttcagggagtcaatttaagttgtcagttgcctcatctgtaaaagtagagctaatactcctccctccaagagtgtgtggaagggaagggcacggtttctcatctacacaagagaaggtgctcctcggacccccagtctgttatgctccagcagctactctcagagatcacaaaatcacttcgaggaggctcaggttcagatctacttctcaggcaagaactgaggcaccagaagctgcagtatgtaatcacctggagagcttccacagcctgcctgggacttaacctccctagggcccagtttcctccctatcaaatgaagatcatgatatgatccctgtttttttttttttttgagacggagtttcaccctcgttgcccaggctggagtgcaatggtgcgagctcagctcaccgcaacctccgcctctcaggttcaagtcattctcctgcctcagcctcctgagtagctgggattacaggcatgtgccaccacgcccagctaatttgcatttttagtagagacaggggtttctccatgttggtcaggctgctcttggaattctcaacttcaagtgatccacccgcctcggcctcccaaagtgctgggattacaggtgtgagctactacgcccagcctgatccctgctttcaaaaggctgtttgggagaaagaaaggacacagccgggtgtggtggctcacgcctgtaatcccagcactttgagaggctgaggcaggcagatcacgaggtcaggagatcgagaccatcctggctaacacgatgaaaccccgtctctactaaaaatgcaaaaaattagccaggcgtggtggcgggcgcctgtagtcctagctactcgggaggctgaggcaggagaatggcgtgaaccccgaaggcggggcttgcagtgagctgagatcgcaccactgcactccagcctgggcgacagagggagactctgtcaaagaaagaaagaaaggaaagaaagaaaaaaagaaatgacacaaagaaagtgaacgtgtcactttcttttttgtctatgttgcccaggctggtctcgaactcctgggcacatgtggtctgcccaccttggcctcccaaagttctgggattacaagcatgaaccacatcagccttcacttttcattcatataatctcatttgaatttcacagctatgttaaacaagctcattttacaaatgagagcgaggacccaacctggccagtaaactagtgacagagcctctgacttctgtgagttttccacatctgaatgtaccttattatttcttagtcgatacataaattatctttaatgaaaaagaagacaagccagagctacttctccagggctggggtcccaggagggtgtggaagaggagatgcgggtgggacccacctcgggctcccacggaggacacgctgcttcggtgggatcgctcagcggggccgggctgcccggcactgccttctgtcccgtccatctgcaaaggcaaagagaaacagcagttaccgggagccagggatggggggctggaggtctcctcaagctctcggtgagtacggtaagggatcccaggctgggtccgcaaggttgagcggcgctgcctggaggggccaagagtgcagaccgggcgctggtgggaggggtgcgggttgctacggtcaagaaccgggggtcgacctggatgcccaggcagggcaaggcgcacgcccagccggggacggaggcccgggccagacgtcgctgtgctctcacctcgcagggtcgcagagcccgccacctgagaggcaaggctcctgcctggaatcctgccccgccgccaagcccgccaccgcccgcactcgggctcccgctaaggacgcagctgaccgggaagcgacgcggaagccacggcgggaggaagcgcggcgcccgaggccccgcccccttcgacccgggggagccaatgggagcccagggccgccccgcgcggcccgcgcatgcccggacgccagcctcgcgtgtctcatcacgcccgtggggtggccgcgtcacgtaccagccccgccaccaccagagtgacccagagcgagtttcccttcacaaaggccccgactgttggcctgtaagagggtttggcgaagattcgagaatcaggctaggggcgttggcctgcccacgctgggtcttcgggctagttccctgcctgtgaaatggacacttcctggcacgtgccagggatccatgcggcgctggcagcggcctgtaccgtggcgctctcggcagtggtcaggagaatgagtcctggcccagactcatcctggacaagtcccttctcctctgggcctcagttttcctcatctgtaaaatgaggtggttgaactgaatgacccccaaggactatccctactctctaaatgattattaatatatgtctatgtcggccgggcgcggtggctcacgcctgtaatcccagcactttgggaggccgaggcgggcggatcacgaggtcaggagatccagaccatcctggctaacacgatgaaaccccgtctctactaaaaatacaaaaaattagccgggcgaggtggcgggcgcctgtagtcccagctacgcgggaaggctgaggcaggagaatggtgtgaaccccagggggcggagcctgcagtgagccgagatcacaccactgcactctagcctgggcgacggcgagactccgtctgaaaaaaaaaaaaaatttatatatatatgtctaaatcagaaaaccaggacagacactctgtttttccagggagcagtgacatgagcccttactatcttacacaacagcctgggagaccttgaggttttcccaggctgggaggagacttggggccccaaagaggcaggtgtgaaaccacctaccctcagggccatgtcactgacatgtcctggtaatgcaacatgtgtgcatctgagatgtggaactcagggagaaaaataagtccatggggcaccttctggggccagaggaaccagaagttgtcccaagtgacagcagtgggcttggtgatcaggaacagagggcagtgggttcactttgccctggttccctgggattggaaagcagctctagctcctgacccagtccagccttctttggtatgtgaaccagctctgcctgccctcctatgatccacactgccccacagctgagcccatgacatcacatttgccttgccaatgtgacttaaggacttgaggaagctcagatgtgggctgcagggaagggtgtccagtgggggcaggcatctccttcctggttctcagctctgggaccctcagaccaggacacactgtatctccatggcctcttgacccagctggagtgaagcaggagcagaagagttcagtgttgttttgaatgcttactggatgcggggcttgtgctaggtcaggggatggagactgaggggagacgtggccctgccctcagaaagtgtctgttgtggtttaattggtgagttaaggaagaggggaaagagaaagaagcccaggagaacagcacatttaaaaccacagcactttgggaggccgaggcaggaggatcgcctgaggccaggagttcaagaccagcctggggaacatagtgagacgccatctgtaaaaaacccaaaaattagccaggtgtggtggcacacatctgtggtcctagccattcaggagcctgaggtgggaggatcgctggagcccaggagtgtgagctcacagtgagctctgatagcgccatcctgccactgtattccagcctggacaacagtgagactctgtctccaaaaaaataaataaaaccacagaagatgacagcattgccttaagaactatgaaatgctacaggcaggaaaagtctctgctcacttgctgtgtgtggggcactgggccaggccctttcccctgtttcctgtgtcattctcatgcgtcctgagagt

SEQ ID NO: 914719 - DNA, 4001 bp, Homo sapiens
atatgcagtttgcatataagaatttttaatccaggtagaaattatttgtagtagcactttccagtggaaaaattatttatactgcgtagagaaattggggcttctgtttattttaatatcatcctaccaaatgtatatcccaagaaggtgcaataaattgtgtaataaatggagtttgatcaaactcatttaccgtcaaataaagtatcgttcatttaaaaagttgccattttcaattttagtttatagaatgaaattctgcatagataattaggggtgctgcagagaaaaaagaaagcaccatggaaactatttctctacttgtattaatgcaaggaaactgcaaacacagactagcaactgatgcctctatgtcttggttttctcaatgctataacgaagggagtgggtttgctgattcatttttgttctaacagtctgcaagaattgattgtgttctcaggctgttttttggcatttgtatttagtagggccaggaagacaatttttttaagtggctgtctatgtttttatgtgacttggagacatattttggtgtgattttgtgtcaaagatgtagtgtcagttaaagaaattgcctttatgagaatattataggtcctttatgattaaatatatgtatgtttccatgtttatctctctatgtgtaaaaacgtaacatagaaatactttttccctgtagatgcaaagttggactagtaccaaattgatcagattaaatctgaggctttcctaaatttacccaaatcaaatccaagcccaaacatctaagtgatatcgtggtcattaaccccaatcacaacacagacagtcttggctaaaggactcatggctgttacttagaatacataaaatattgataaagtagaaactaatgaaaccggcctaatacagaccttcaacacccttgcttccagcaaaacatggtacctaccctggtgtagcagtagccagcacaccaagtggtgttgatgcttatgcagaaacgacattcttctttctctattgcaatggtgatgttggtcagctcacagctattgcagcagattgctttccagcaacagaaaaggaagaaaaactggagtgtcttcatcctggtctgggaagcaaacaatgaagcccactagaaactgagaaaccaaagaacgataatcattatgtaagctgaccaaaccaaaaataattggtctgctcatcctcctcaatcacattttgcttcaaaagttttttttccttccttatgcctttttacttacatctttgtttcttggaacaacatttttccttgtccttcttcaatttttgggtcagggtgggaatatattatagatcaaaactccaatataatgatttaagcagaggaatatttaaagattagaatcttattgctgactgtcataaagtaattactctgataattgtgatcatcatatttgttcttccattattattttaaagtctatttttgtctgaaaagaaaaataaaattcttttcttttcttgagacagggtcttgctctgttgcccaggctggagtgcagtggtataatcatgaatcactgcatcttcaaccttccaggctcaagcaatcctctgaccttggcctcccaaagtgctgggattacaagcatgagccaccattcctggccaagaaaattctatactacaaaattatgtcttcatttttagaatctcataaatattttcttttgctcacatttgtttaaaataagaccatttcagaagagaggcatattggtctataaagtcagttacttgctaacagtgattacgttatattaaccatattttacaagccaggttgacaagcataaatttcctacacaacagtagtgagaagctctagttttgtcctccatgtcctgacaaatctgtaatttcaaaagtagctgtcaccacttgaaaacggtagatgccaagactcacctgtggtcggctgccttgcctggcaagagctgtagactgaatgaaatctcagttcaccttttatacaaaatcatgtgcaactaacaccttgtggatttgttgggtattaatatgaccaatgctagcctgaagcttgctgtaagtgaatcagtgtttagatagacagggagatcaagctttactaaagtagtctaaacgcagtagattagaaaaaataatgttactagagatgatgattttgtacaaattaaatttgatacagtagcacacccactcctttaccttctcaaattaattgtgactccagatttttcttttgtatctttaaatcaggaaattcagagtcctttccaagtattgctttgactctgttcaggagatgcattaaaaaatatggttaataaattgctccaagagcatatcaaaagctgtgaaggaagaaacaaacaaagagaaaacatttcatgatctggctcctgtctaaagtgtgaactgtatctctctttccctcccacattctggccccctaatcacaaatctttattttttgatgttttagcaagaactttctactttacttgtaattccataaatatgttgctgattcatatctttagatctttgcatgtaatgttcttcctgcctgaaatgtccttgcttcctccctgcctcctccaacaccaccctgaaccctggcaaattcctcaaccttcaacatccaggggagtttcacctgtcaaagtttaggatgggaggtgagggagaaccataatcactaccttctgtgtgtaaccatttataggctcttgtttcctccaataaactatgatctctttggagactaggattgctttgtttaataaatatttactaatcaaacagtgtgactggagcaaaaggacaacagcagtaatattagaatatgatgtcagagagataacaggagtcaaatgttggaacttgtagaccagtgtaagggctctggtttgtactctttgtgtaatgggacccattgaaggattttaagtagaggagtgacgtgacatgatctgattgagttctaaaaggactcctctgactgctgtgttgctaatataggggaaccaagaaacaggaagacccgttaggatgctatcaataacccaggtgagaaatgatgtttgttcaataacccaggtgagaaatgatgtttgttcagactagtatggtagctattggaggtaatgagacatgctctgactctgtatgcattttgaaagtagaaccaacaaaattttctgatggatagatgttgagtgtgagaggaggaaaagggtcaaggatggctctaaagattctggtttgagtagctggaaggataaacttgctatcagctgaaaggggatggctgtaaatgtcgaagtttgggaaaaggaaatggagttcagtatgcacatgttgagcttgagttgtttgtactacatccaggagataatgaagtttctttttcctctttccaaaggagactgaggagggccattgaggaaagtaggaatggggagaatatggtgtcccaaaagccaaataaagagagcatctcagggaggagccagtgacacctgtgtcagatactgctgacaggttaagtaagatgaggatcaagaacttcacaatgcatatgcgatgtaaagttcgctactgtccttggctgtaaaagttactttggaatgatgaaaacaaaaacctgattggtatgtgtttaagtgatttggaggagataagtcatagtgaatatagacaatttttccaagagcttttttttacaaagatcaataaagaaatgggtatttggttaatgtggatgttgggtaaaaataactttcttttgttttatttttattttttatttttgagatggagtctcactctgtcacccaggctggagtgcaagggcacaatctcggctcactgcaacctctgcctcccgggttcaagccattctctggcctcagcctcccaagtacctgagactacaggcatgtgccaccatgcct

SEQ ID NO: 914720 - DNA, 4001 bp, Homo sapiens
gggggcagatgagctactggattgaacccaagagtaatgtttctattctaaaatagaaaactgaaacttgatccttgaaacttaacttcaaggaacctttaggatattatgggcattgcctggggcaatgtcttaaggatctgtattactgcacagaaaacttacagccagtgtcagaattcattgtctgatgagagggcgctggagtactgaccctgcacttagtccttttctcctccctgctcctgtattaaccatgttaaagcatggttaaaactgagctcaggagtctgccagctgtaccacatatttatttataaaattaaaaacccctgctgggtgcggtggctcagcctgtaatcccagcactttgggaggccgaggcaggcggatcacgaggtcagcagatcgagaccatcctggtcaacatggtgaaaccccgtctctactaaaaataaaaaaaaatagctgggcgtggtggcgtgcgcctgtaattccagctactcaggagcctgaggtaagagaatcacttgaacccaggaggcggaggctgcagtgagccgagatcgcgccactgcactccagcctgggcgacagagcgagactctgtctctcacacacacacacaaattaaaaacccccatgcaaggtggcaaatgtggacagtatgttgatgtaaacatacttttataatagttatatcacaaaaatttgattttcagttttagacatttgatgtagtcaagtgtttgtgaaaggcagtgacagtcacagaaatacaggcctgttttcaaatccatttggaacacatttattcttgggatagtttggacaatcacaaggcaattctaaggaagactcccacgacactgcctaagaccaagatttgggaaaactgattccactgatcactgaaaaatttcttgcccagtaactgtcggtggactttatccaagaactgggggttcaattagtaggccaaactccacacctcttacagtaagatacataaaagataaattaggtcccctaggcgcaaggtcaggtgacacttcggtgactgcagaaggggcgattcctagagatatgcttcaaagcaagtgggacttagagataagcagagccgagaggtggatacggctgctcgagagggatctacccacaagataagccacctcccgccagcccccaaggtttgctattcgacaccgttacccagcagctccgccacacacaggcggacgggagctggatacctaagcaaaaaacgctggcatttagggccaaatgccggaggcagaggaaaagatgggaaagcaaaactccaccttcctaaccgcaggattgatcacacaggctggcagtcttgcaaccccaggatttcaggacaccaaggtctccttaaaaaagaagggtgtgcagaggcggccctggcctaggagggagcattctcagggtacagccgagaagaaccagctgccccgactttctgcgccagagaagtcctcggaaacctcgagcagcctccattttccagaagggcgcagggaggcgggagagcccgcgggtggccacacccccggcccgccccagcgcgcgccccgggaaccgcgcccggcccccgccaccgcttaggcccgcccgcgctcaccatggacaggtaaacgtaggaggcgtagagctccaggttgatctggcggttgatggcggcctctgagtcctggtggtagttctggcgcacctgcgaggtggacgcggtcgtcatggcggcgactaaggagaggcggcggcggcggcggtggctgcgcggcgctggagcggcggcgggggccttggggcagtccgagggtgcggtgaagaggtgacggagggctggctatgggcggccggccggggtggggaacgagcgccgggttccgtccaagcactgttgaagcaggaaaccccgacgactctcggcgaagaacgtctggccctgcgggtcgcttgtggtctcttatagccgcgtcggcgtcaggcccgccccggccaatcagcgccgcccgccccgagcccgctccttccggtgggcgcgggaccccgcccctgctgtgggggaggggcggccgctggaggccctcgcgcgctctggcggagctcgggagcggggaccggtagccgactgcctctgggacagcggtggcgtctctgtgcccgtttagtggagttggagggaagctgcgaggaggcgcaggaagtccacctcagaaccccccccccggtctaggggcgcccgggcgttggaaccggcgggggaagggtgcgggggcgcatggggtgatcctgattcggctcccattttcccgaacgggcaccctgaggctcctggcccggggcatggtgttagaaatcatagctgcggagaagcccttgtgacaccttgctgcagattgggaagctgcagatgattgggaaggtggaaggtggagacgcggtccttaggtggtcgagcgcattttctcttcctcagagtccaggaaggagcgcgatggagaagtggggcgcacggcgggtttcgggtccgcccctgcccttccgactcctccgaccacgtctgcctttggctgaaagcaaatatggctccgtgtgcggtttctgcaacaaaggctgggcgggccgggtttccctagggatggggaccgcctccccggggagtcgtgggggtgagccaccggggcctccgagagaatcgctggtgtcgcttcgcacccaagggacacatctcgggttagaaaggagaaacgacgtggatctaaaggcgaagcccatgctgaggacttttcaaaatggcctcttatcggccccactcacaggagcttcaggcttcggtggccctgtaggacaaccctggggtgtcattggagagaagctgacggggttaatggcgggtgacaggtgaaagagaccccggaggggtggggccggtgtgtgtggctaagctgagtcccaggcacagggtggatgtgaatttatgggtggcagagctagagctaggccctgcccttacctaggtcctggcttcgaggtccactgttctgtcgcgtcttttgacgcatcggtggaagaactgaatttcaggatgctcacaaacctgcagctggaagctagacttccaaaccttagtttaaaaaagcaactctactgaaatactaaaataaattgccgacggaattagggtgatttcttgttcacggtttcatttaaaaatgcacctatgttatttacaggaaaaacgttttagtggtgctagagctacaagaataaggtaaacagaaggatgctgctagaccaggagtaccttacccagtctgggataggaggaggtcggggaagccctccctaagcaagacacgtgagctgagtttgaagaaaaagttaaaaggaaggtgaagtgcgggagagaaacagggaagggaatttggagcagagtgaacagcatatgcaaaggtgtggaaatgtggaaatgcatggcctgttaaagctgccttaagaaaatatgttgcctggggctgggcgcggtggctcatgcctgtaatcccagcattttgggaggccgaggcgggcggatcacttgaggtcggagttggagatcagcctggctaactaacatggctaaacccttctctactgaaaatacaaaaattagccgggcgtggtggcatgcgcctgtaatcctagctattctggaggctgaggcaggagaatcgcttgaacctgggaggcggaggttgcagtgagccgagatcgcgcctttgcactccagcctggaagacaaaacaaaactccgtctcaaaaaaaaaaaaaaaaaagaaagaaagaaagaatgttggcctggaaagtacagtttatgttgggggatgctggttagggtggagaataggggcaagatcgggcagggttgtgttccataaaaagaggttaaacttgatcctagagacagcatagagacacctcattagctt

SEQ ID NO: 914721 - DNA, 4001 bp, Homo sapiens
catagagcaaaaatgggtgtttgaagaacttactcccatgatgcggcagtcaaggagatgcacagtagaggatcaaaaagctgacaacttggcctcccctgggtcgcttccaggggagcgcggcttcaccgctcgaaccagctggccaagttccgtatgctcttgggccggtccccagccctctgtacagcctggcacacccggcaccaaggctcgtcccagaaggaggtgatgtggacagcgtagctccggcgccagtggaagtagcggcgatagaccgcggggttgcggtcgaggaaaagcaggtacgaggccagggaggaggcacttgggaagtcgtccacgtggatgaaggcgccgcggggcacaaagcgctcgtagttggcacggtctgggcccagcaccaccggcaccgccccagcgagcaacgcgttgcgccagagcttctcggtgatataatccaggtgctgcgagttctcgaaagccaggtagaacttgtagcgggccactgtgtgcaggagcccaatttcgggcaccggctgccccggcccgccccggccgaacacgtccacggtcacatgttggctcagttggtggtagtagcggacccgggcctggcgctcgtcccagtggctcaccacccatgccaccagcccctgtttcctggacagtggcggggccaggcctgagggcgggtcgccggggtggcttctggggtagaggtagccataaggcacaaagacgtccgagtccgcccggtaggagagcgtccagttgaagaggttacttgccaggcttcgcagccccggggagtgcgagggcgactcgaagttcatccaaacccagcgctggcccgggggcctggggctggaggtcgccagggcttctgccgccgccgctgcctcctcgtagtccaacacgcgcagatccacctcctcggcagtgtgcgcctggatgccccagggcgggggccagtcggggggccccttcacgaggtcgcggtggtggaaaagcacggcctgagcctctccgtaggacgcgcggtcggtgagcaggcggcagccgctgatgttgaagcgcagccggcagtcagggggcggcctcggggcgctatcgcgccccccgaagggctcccaccacagcagcacgcccaccggtcgcgacggggttggcgacgcccagggcagcggcggcagctgcccccagcaagcgtaggtgatcagcgccgtacacgtcaagccggcggccgccagcacacagacggtccatggcagcccccggcctcggcgccacccgcgccgcccgcccgccgccgccgtcggcgagccccacggtgcccccatggcgcgaacaggcagcgctgcctccgctcgccacgcgtccgcaggcgtggaggagcggcaccggctctcatgctgtagctgcggctccagccgtcgctgccgctcgccgctggcccgggaatggaagggggcggtcccagaatgcaaaggccgcgggccctgccctgctcctcccaagtgccgggcggggcgagccgccagggcaaggtgagctggccaggacgcccaaccgggcaccgcccgtccctttcttccactgcgcccggggcccagccggcccgaccaggccccgggagcctcctgcggcgcctccgcccactccttctcccagcccgcgcccgagggcttccgggccgcgccccacaagcgcctcatccgctactcttgattctctctcaactgatccggtttccctctgcgcgcgcccaccgccctggccctcgctcactgtggcccgaaccctcgccttccagagggaaggcccggttcatccctgggaaggtacaggaggctcgagaccttctaaagcagctgccgcgcaggagcaggccctagaacagacggaaggcggacccggcgccgcggaacggaggatagcgtcggcttcctgccgttgggcctagccacccgccagcgacgcccgccggagggagggattgagggagggagggagtccagaggccgggggaacgtgcgagcagaggcgcggccaccgcatccgtggccaggatctcgtggcccgccgagacggtcgaattgtggaggcagcccgcagcggcgtggccttcagagtctctgcatttggtgaagaacttaagttttcaatgtgagtgctcataagaacatttcctttgcctgccagcccagtaaaggatagagaacaaaatgttttcttagcaatcaaaacatgttctttcctttggtcccctaccaaataagtctgacttgccggctcatagtagtattgcttgtaccaagacgcacaggactcataaaccaaagatgaagatgtgacccccccaaggcccttgtcgtcaaggaatttattgcctgttcagtgagatgaatgaatgaatatcactattaattttaccaagcacttaaaaaacattttctgcacccatgaaagttatgcaaaatagtttggatgataaaatgatgacgaagataaatattctagcacccaagttaagggtgtaaagacagtatcgcactggcctcttctaccttattaggcgacactggagacatctacgtctacagtcacttgagaaattttttacctacgggttgaatttgaatttctgggtgttcgctttggtttatgatattcaacttttattcaggggatttccaaatagatcaggggcggggctgctgacctaaggagaggagaaagttttgagagaagttttagtagatcacagctgtgcatcagtggagtcccactgatactaggggagaaatagacagtgctgggaatggggcaatcctgccaggtgtttttgatgttatgcctacagaaaataaatttgcgttagccatatgaatttaagaatgttttcattaaaaatcaagtataggccaggcgcggtggctcacgcctatactcccagcactttgggaggccgaggcgggcggatcccgaggtcaggagatcgagaccatcctggctaacacggtgaaactctgtctccactaaaaataaaaaaaaattagccaggcttggtggcgggcgcctgtagtcccagctactcgggaagctgaggcaggagaatggcgtcaacccaggaggcggagcttgcagtgagcccagatcgcgccactgcactccagcctgggcgacaaagcgagactccgtctcggaaaaaaaaaaaaaaaaatcaagcattgtgtgtaaaagcttctataaaagtggcttccgggtggcgctctctgcagggccacagcctcagtttggagactagatggaggatgttaggtgttctggctaggcccatcaacctagtaacatttcctcctgcacagtaaaacctttcataatgcttctggggttttttgtttgtttgaaaaacagaaattagaaatcaaatattttatttgaaattagacatttcagtgacttttttccactcttacttttaattaaaagaaaaagctataaatgcacaaattacttgtttaaacgaaataaaggaaaaagtgtattggcttctctttttatgcaattcaagaatccagccatttattcacattcttctccctcttcagttaaataagacatcacagatagagcctaacattgtgtctggcacgtggccggtaggcatttgggaaatattaccctgcttgattgcttccttccaccactcccgattttctcttaagcctccgaatgttccaattaagccatctttttacctgaagaatgcccgaggtctcatgcatatcaattttctttgtgccctcttacctcggtagggttgagaccacaaactgcccctactatacccttatttgatgtgggaggaggggatactaggtagtaaggtgtgtctggatgaatggaaaccagtcgtgacttcgcaaattgctggttgaaggtcatacgtgatcattgtgcatctcatacatgcacaaacattcacaggggactgg

SEQ ID NO: 914722 - DNA, 4001 bp, Homo sapiens
aggagtcaccgatggtgagccagccacaggaacagctggaattccctgtccttcccttcccagaggaccctcgagggtccaagcaggcgaggggaggctgggagcaggggtgttgctaaaaccattgccagcaggcttctgctccaggcggcttcagacacgctcaactggggaccaaataccgagtgtccgagggggatccgtgctgtctggggggcctctgaccactccggaagggtggctctctcctgctccttgattcctaccatggtagaaaaggccaggagaagcctctcccattagactcccagcggcctctctccacaggaccatttggctatcaggtgcttagcagctatttgggaaatgcatgaataaataaaacagaaccttaaagtttatcagacagaaggaggaagccgagcccaatgtgtagacttgttcaaagtcctaatgaaagctgagacagacctcctttcctgcgttaccatcctcaggggaagcagatctagttaagaaacattaatatatagtgctggtcaggcaccgggcaaaaactaacaaaccctaactcatctaaccattatggcaaccttatgaggcgtcaatgtcattctggtgtaatccacaagagggtggaagtgcagagaagaaattcccccacagttatacagcaagtcaggggtagagctggtgtttgaacccaggaagcagggggctgagaatggaggtgcataagccctttgatctgccacctctcaatggcgggagggaaggagcccgttagaggtaaggtcctgcccctgcctctggtggcctcccccggatttggagccgctcagcaggcaggtctcacagtggtgccctgcaactgagtacacttgccccggacagccagacggtggcctggccaggacgcttctgccacagctaagggccgctactctttcctgccctgccggagccccttctcgcacgagggaagtggagcccgaggaggaaggaacgcgcaagttagcactttccgggctgtgccaaactgtgcccctgagcagcagtgagacttagggtctgtcaagcccagctgtccccagcggccagtccctgggccaggaaaggacaggccaggaagagtcagtgcccatcctgacgggcctgaggtgctgggtgctcagggaggccatgaaggacccaggtcccacacagaaggccgtcagggctgtcttcccagatttggttcaggccttgtttaaggtcatatggggatttaagtgtcagagcaacagctagacgccagctgaggcttccccacacgccccaggaaacctcctcctccgtggccacctggccctgagccgcttgctgagaccctccctgcccagcaccctcccctttctgcatctggctcaaaacccacctctgtcagcaagtgcccctcttggtttccaggcctgagtcagttcctgtgacaggaagcctttggagagtgtgacttgaacttggcgggctctcaccccaaatccagcctaggaaggctgaccagaggggcctgctccttccccagccagatggacgccgtctgcctcccgcccaagttcagacggtctagcaagatgcattgaactcagggcgggtgtgtgccaggaggccgaggaggaacgctcagctctccagcttctatctgctgcctttctgccactcaagctatctttctttggggttaaagcagggtcctcctttaagttgcaaattttcttagagaggaggccgacaggaagaggggctgggtactctggaaggctgaggtggcaggagagggaagagtagggtccagctgaccccacaaaggcaggccaatcagagccacccagcattgcacacgcccgggcacgcacaccagcacactcaccaccgtccatcgacaacccagtcatttccccaggtgaatgggctgcctccactcccctcttcctgctgtctctgctttttggagagtgtctggctgcctccacggggtggccggggacgaggtgcgggcattaaacattaacagtgccaggtaatatttaccctggtcacaagaaaagctgcagtgtggatggaggggctccttctgcagggtgaggacgtgcgtggggaggcaggggcagggaggagctggctgagtttccaaaccttcccaaaggaaatttccaaagagaagggttgggatgggtcagcagtcgtgctgttctgccagctggggaagctacagctggggcggtgggaacaggaaagtggaagttgcacaatctcttcagtgtacactgtacttgggagtttctgggggcagtggcccacagtggcccccagcccaggcagggcccaccgcaccagccaccatggatgccgccgctgcagctggtgttccttatgtggtactggaggctttcctgcagtggtccctaggagcctggcccactgctcccccaccacatccctggagcaccgccaaagctgaccagcagtagatcctccagaagggcccttcatctgtcatcctattcacccatcaacgtgcaccctgcaggttacacctcattcagaagggcttcagtcatccccaactaatttctccttccctgccgccctggcacttcctcctaccaccatttggcctggctctcggattgtgtccttgccagtttaccatggagcatgcaggatccttaaggacagggcaagactttcatcgtggggaaaaccccctgcgtttatggtttaccaagcactttcctcactgttttttctcctcaagctttatgtttcccattttactgatgaggcaggtgtctaaggcacagagaggtaggggccttgcccagggtcacacagccagtgtgggggaagtggagactgacaatcaggcctcctgctgcaggaggcagatgctttccacacctcgcaggcagcctccccactccgctgtgacctccttcgccccaggactcctgtgccgggtagtcacaggtactgtagaatcctcgttgagttctagtccattgaattggcctccagaaaaggctgaagcccaatggccacaaaacagccaaggtcagtggccagcggacagcaggggagcttgagcccttctgaagggagccactgtatccatgaatcctccccaagcaggggcagggcttggcacttgagttcacaccctggccctctcacttgctaatggtgtggtctcagtcaatgacttcacctctctgtgcctcagtctcctcatctgtaaaatgggcgcagtacccagctcctagggtggtggtgaggggaagtgagataatgcatgcaaagagcatatcccagggcctggcacacggtgagtggcatcatttttactgttatatgtgtgttgattgaagaaatgacaagcattagcctttggcaaatgtttgctgttggacatggaaaagccagccaccctccaatgaaaatgggcacgaatgagtgagacggagagaatggcatggccctgcagatcaggcgctgcaatacccgttcagctcccttctgcttctggagccaagaaatatatattcgtgcaaacatcacagcagagccagcgtttggtgaagatggaccacgtgccaggctcttggaatgcactgcatcacttaattcctactaatggcgttttacagataaagaaacttgaggctgctcatttgctttccacaatagcccctggacgtggccagggcactgggtacaccagaaaaaacgagggcaggaaggtgaagggacttgcctgaaacacacagttaatggcaaactggaggtagaaagcccagatcctccaagatgtgctaccaaagctactgccatctccacacaagacaagggtgctccctttattatacaggattgtgttatcttattgcatttggtctgtatttgtaagcctccatggagtctttcgggaataataagagatgtaaaaataagtgggaagttaa

SEQ ID NO: 914723 - DNA, 4001 bp, Homo sapiens
cagggcctggcacacggtgagtggcatcatttttactgttatatgtgtgttgattgaagaaatgacaagcattagcctttggcaaatgtttgctgttggacatggaaaagccagccaccctccaatgaaaatgggcacgaatgagtgagacggagagaatggcatggccctgcagatcaggcgctgcaatacccgttcagctcccttctgcttctggagccaagaaatatatattcgtgcaaacatcacagcagagccagcgtttggtgaagatggaccacgtgccaggctcttggaatgcactgcatcacttaattcctactaatggcgttttacagataaagaaacttgaggctgctcatttgctttccacaatagcccctggacgtggccagggcactgggtacaccagaaaaaacgagggcaggaaggtgaagggacttgcctgaaacacacagttaatggcaaactggaggtagaaagcccagatcctccaagatgtgctaccaaagctactgccatctccacacaagacaagggtgctccctttattatacaggattgtgttatcttattgcatttggtctgtatttgtaagcctccatggagtctttcgggaataataagagatgtaaaaataagtgggaagttaaataaattcatctgtctgtctgtctgtctgtctgtctatctatctatctatctatctatctatctatctatctatctatctgtctatctatctatctatccattgacaacccagtcatttccccacccaaatggactgtctccacttgcctcttcctgctgtctttgctccttggtggggtggctggggatgaggtgggggcattaaacattaacagtgccaggtaatatttaccctggtcacaaacaaagctgcagtgtggatggaagggctcccactgcgggggggaggaggtgcatggggaggcaccaacagatggatggatagatagataaatagagagatagatagatagatagatagatagatagatagatagatagatagatagatatggatgatagatcgatcaatagatagatgaataggaagcaatagggaaagctagttgatggctacatttttaaactctgtgtgcaaggcaccgtttcaagcactttacagaaattaattcttttttttaagacggagtttcgctcttgtcacccaggctggagtgcaatggtgcgatctcgactcactgcaacctccgcctcccgggttcaagtgactctcctgtctcagcctcctgagtagctgggattaaaggcatgtgccaccaagcctggctagttttgtatttttagtagagacggggtttcaccatgttggtcaggctggtctcgaactcctgacctcagataatccgcccgccttggcctcccaaagtgctggaattacaggcgtgagccaccatgcctggccagaaattaattctttagtcatcacaatgagttttagaaggtaaagaaggcattattatcaccccatttcatagaggaagaaactgaggcccagataagttaaataacttgccagaggtcagatggccagagggtaggggaaccaagatttcaagccagcagcctggcttctgagttcctgcatctctaagggacggatggacagacaagtaaatgaggcagttggacagctgccttcccagccctcgcagctcagatatgctctgcacacacgttacagcaggccagtgactccgtatggagatgctcttttttggaaattctgcctctcttcctttctgcttttcctgcacttctggggagcttgtgggtgcacttgaaagggacggggctggcacctgtgttagagcctgagcagggaggaggaatggggctcagaggactcacccaggtaccacctgtccatggcaggagctgctggttgtgtccaggagtgcaggagagcagggaggtgctgcttgcctggggcctggatggagagtggcactccccctcttcacacttcaggtgagcccacaaacaggaagagacacagggagggaggaggggctggcaaaggagcccttacctcgtgcccacttgctggggcgggttggggcaagggatgcacgtgaaagccaggggagattttctgacctccacctggcacttgaggatgggcaagctgtcagatgcagcagagccaaccacagcccccgccctggccctctccctcgaggggctccacactgcagccagcccagggtgcccgaaaagggtacaggagccgggaggaatcaaggagcccactcttccccaggcccctgggctggtggcatgtgagggagacctttaggggcatgtgtgggtcccctgagctttactccgctgcacctctgccctccagtccagctgggccgttggccggaggtatcctgcccaagaccccggtctgtagctaggcatcccctgagactgggaggcacagctgcagcctctcagaggggtgggaatggtttccaggaccctgtcgtggcacctgaggcaccggccccagcttcctgtgtcgttctggcagttggcagagagatggggagcagctgcggggctgggagccggagctgtgatgggggccgctcctgtggcctgccctttcctcagctgggacccctcactcagcccgcagtgactcacccagcccacagtgactcacccaggctgtgatgtcaggcctgcctgccacacctcagagggctcagctggagacaccagcagcctaatgagtcctctgggggctgctggttggtatcagaggggaatggccagaagacaacactgctaggcccagggcatggtcagagccagaagccagcagggagccacagggagccccaccaggcggggcaggccactaggcagggtgtcctaccatgcagggcagcccactacactgcccaggcagtctctgttcctcggccaccaaggccttgcccacagcaaagccacagtgagcagtctctgtgtggctgacttgggaccacagggtctccgtcaggttcctgtagccgccctggcacggccaccccaacgtggacactgagaagcagagttaggaggggctggctctggccccagcctctgacccgggctctggtcactctgactcccgcctctctgtccctcctttgcaacactccctgtcctgaggggaggactcatgacgtcccagggagccctctcagggctgaaatagagaccaggaggtctaagaggtgctatttgttatcaggatgggctgagatcggcgctggggcccctgagcacagccctgactccaggctctctgcacctttccctccagaccaccctggaggcagggccagacctgtcctggggtggataacagctcggctggcaggcgggcctgtcccatgctcccaagtggaaacctgcccactcagcccagagcggctgagtggaaattccccaagctggggttagagaagtttacaaacctcgggactgggtgagacttagaggtacctggtccaaacatattctaagtggtccagaaaagtggagctctcagccaaatcccccccacccacaccgccagtatacacactctgttccctgcccgccaccagtgttgtgaaggaaggcatctctatctcagagcccggtgtgattgatggtccaaccagaaaggacaccaaagccatcccatcccaacccctccctttaaaagttgctccctctcctgctcaaaatcctcagagagggctcggatgatacgcaaaatctttgtgtgtccaaaaaagaagcccctttttttttttgagatggagttttgctcttgttgcccaggctggagtgcaatggcgcgatctcagttcactgcaacctctgcctcctgggttcaagcgattattctgactaagcctcccaagcagctgggattacaggagccgccaccacacccagtaatttttgtatttttgtatttt

SEQ ID NO: 914724 - DNA, 4001 bp, Homo sapiens
gtttccatggcaacgaccaggcaagtcacgtgcaaaaggctaagttgcggacgtagacatacacatccataatatgagggtggctggatccccaaagggggctcctttcagagagggcctgagatgcccactgatccatcttcaaagctggaaatcttagcccagccagacagcacgaagccacagagacaaaggaagtagtggcagagagcacactggtggggagaagcctccagtagccacggtcccgcgagcgtgcaggcttgcagcaggtgacgcggcagacccatgtttccagcgaggctgctcccagctcccaccctcgggtgcctcctctaccagccaccacttgtaagagccagaagccagcgctgggagctccaggctgcacacccaactctccacggaagcccgggagacacaataggggaggctctgccagggccagccctgctggggaaagggggcaatggcggaccccagggccccccggaaaggaaacaggattggatggataagacaagaaggagggaaaaaatgatgcactctcatgaatccccgagcgctagaatccttctttccctgcgcccccatcctgtgcccactgcccagccccaccttccccaagcaccaaaccagcaagttccattttgtgtcgctcataagtccacactcacacccagccacacgccctcgtccgtaattccccacgctccaccaagtgtccacagcttccaagtaacaaagggaaaactcctcatggataaagggtgggcgcagccctttccccttctcctgaaaaccctgaccccaagctcaaggcagcaccgagagcaattcccagccaccagcgtcacccccagcgccacagcctgcctcccctagaggctcctctctcttccgacgccgatctccttgtttacatccccagcccggtttcccgctgcccaggcggggaccgcggcgcagctgaccgcggaggaccgcacacacccactgaacacacaaaacccggcgctcccggcgctccagagatcggtccccaccgagcctcgcccctcctcggaaaaaggagccaactttgcccacctccccagccgcctacctgcacagccggtcccctccgagactcccaggaggacccgccgagtcccgaggagcctgggagtggcggggctgggggcagggcggtgggtgaggcttgagctgctttcccgcctcccctcctcctaggagtcgggctggctgggaggcgcgtcctgcgggggcggggggggggctcgctcggggctgggctcggggacagcccactccgtgctgccgtccgctggcttctgggtagcggccgcgcgcagaccccctctcctcctctccctgtccgtcctcccgctctgtgctcgcgcgcgtcctctgctcctctctcctctcgaggggcggagagatttttccaaagggcagtcaagctccgagaagcaacaggagactgccgccgaggaggcgtgcaagcgccggagcggatttgccatcagctgttgcttttcggtttccctctggttagggtgggaagggagcaagacaggcacaatgacagacctggtgtctctctgcaatagtaaaccccgaggaacggaaaaataggagaaaataacccagcaccagacacagcagcccacgttaattgggagccttggtaattaaggggaatgtgcaccaaaagcatgaatggctgtgtcgtgggcgcaggagccagctccagttgtagttgtcattttcagctagagccaggtggggagctggggggatggtccttacctgaaccatagatctgctgccttgaacccccttttcaagccccatccacctctggccctgccaggagcagtaccaccccgtcctcagcccagtccccaagagtcaaaattcatgatgacgaactttgaatgtgaagatgtaaataaatcctggctcggcaaccctgcctgtgacgcgacttggagcatatctctgcactcagctcctgagtctatttcctcacgtgggaaaatggtgattagagactgaccccatgggaggcttagctcatagtgagtgctcaagaaattggctcttactattaggggcagagcttgtaggaaggggcagaggccaggcacaagtgtcagtagccaggagccatgctgagatggaggctgtccagcctcagtcaaggtgtgtgtatggccgagccgggtggagggaggagctactgagaaaggctgtgattgtccaagcctaggtagggccacggagagttccttacaaaccccaagccggggatgatgggtactgctaggaagaaacctagccctgcctctgctgccctcagttctgggcctgttttctcatttgggaaaatagggagatggactagatgatcctgaggtctcttccagctctgccctagatgatctaattattttaataaaaggtcaggtctcaaaaccccaaggcaggaaatatacatgaactcaagaagactttggaaccagtaggggaaccataaatagctactgagaaagagcacccaaaaagcctcccctcaggggatagttctggccccttaatcatgggacctggctgaatggatgccactctggcccagtcctgaactccctggggttcctgtgaatgctaaagctccttctccaaagccagactcaaatcttgcctatttgcgtgcctaaccctttgccgttcctgtcttttcctctataaactgaggacagcattccaactgtcgttttcccttttcatgtattctaggtggcagatttaaaaccacatccctttctaggcccatgtccttaggcaggtacattcatccctccaaatgcccttgaatcctgccttttggccatctctctgtgctttttagagcacctactagtgatgacacgtcaagcccaggctttgcaagcctatttgggaaaggatagttcagaactccaaagccaagccaccttctggttcaaccccatttccagccagagagttctgaagtgtttggcccagtgacttcccaggtccccctacctaatgctgaccagcccaggctgcagagggataacaggaactaaatgtgcatgagaaaccgccatggcttaactctcaaatagtgcttcatcacgttccatccaagggtactgctggaagaatttggggtgttacagctacaaagcagcacgcaagcttgttctggggtgagtcacatctcccttctagcaggaaaataaacacatctaccccctgtgaaaaatgtgggcattcataaaaagaggtcgccagctgttccattctttcaaccacgtatggacaggaggagctactcttcactgagacctgggccaagatctgaggatatactgtggagaggaaagatgtggtccctgggtgagatagagatttagcaaatgttcccatgaataaacgtgtaattaaaacacagttcagagccctgaagatatagcatttgagaaaggtcaggagatgttaagaagatgaggtaaaggagccaagaattgggatgtcagggtgggaagatgattctgcctctggaacagaagcagtatgtgcaaaggccctgaggcagaaggggcatggtgtgaaaggagccagggtgggactggcccaacaattcctggtgattccagcttttatcctgggaagcactgatgggcatcatgaaaactgttctgagcaagaattggtgagaggttgggttgggatgttcctggtggaccctgcaagtcagggttcagggggctgtgtgggggcagcactaacatgaagctgagaaataagcctgatccccactaaagaatcctgcttctttacaagcccaaagaacaaaaaaagatccagggcagggctgcgcagccatggagaaagtagggtaagaaagggtggaaaccattcctgaaatactccccacccgccagaactggaaccatgggaagacctgg

SEQ ID NO: 914725 - DNA, 4001 bp, Homo sapiens
ggctggataaggaaggaaactgccctctctctcccctgcctcagcccagcctgagacttatttagatgtactgtgtgtgtgtgtgtgcatgcacagtgcgcatgtagggtgtcagtgtagcattgtagctggtgtgtggtggtgcggtatatatgcggtgtgtttggtgtgtatgtgtgtataggtatgatgtatatgtatgtgtggtgtgagtgtgagggtgtgttgattgcgtagtgtggtatatgtctgtatgtgtttgtggtgttggtgatgtgcagtgtgtgtgaagtgggtggtgtgagtaaggggccactgcaattgggtgtaggagccagatatctaggtctcctagccagggataaccagtatctaggcaaccatactggggggaggggaggagatatggaggtgaggaatgggcaggagaaagagggaggctgagaaatggaggagtttccatggcaacgaccaggcaagtcacgtgcaaaaggctaagttgcggacgtagacatacacatccataatatgagggtggctggatccccaaagggggctcctttcagagagggcctgagatgcccactgatccatcttcaaagctggaaatcttagcccagccagacagcacgaagccacagagacaaaggaagtagtggcagagagcacactggtggggagaagcctccagtagccacggtcccgcgagcgtgcaggcttgcagcaggtgacgcggcagacccatgtttccagcgaggctgctcccagctcccaccctcgggtgcctcctctaccagccaccacttgtaagagccagaagccagcgctgggagctccaggctgcacacccaactctccacggaagcccgggagacacaataggggaggctctgccagggccagccctgctggggaaagggggcaatggcggaccccagggccccccggaaaggaaacaggattggatggataagacaagaaggagggaaaaaatgatgcactctcatgaatccccgagcgctagaatccttctttccctgcgcccccatcctgtgcccactgcccagccccaccttccccaagcaccaaaccagcaagttccattttgtgtcgctcataagtccacactcacacccagccacacgccctcgtccgtaattccccacgctccaccaagtgtccacagcttccaagtaacaaagggaaaactcctcatggataaagggtgggcgcagccctttccccttctcctgaaaaccctgaccccaagctcaaggcagcaccgagagcaattcccagccaccagcgtcacccccagcgccacagcctgcctcccctagaggctcctctctcttccgacgccgatctccttgtttacatccccagcccggtttcccgctgcccaggcggggaccgcggcgcagctgaccgcggaggaccgcacacacccactgaacacacaaaacccggcgctcccggcgctccagagatcggtccccaccgagcctcgcccctcctcggaaaaaggagccaactttgcccacctccccagccgcctacctgcacagccggtcccctccgagactcccaggaggacccgccgagtcccgaggagcctgggagtggcggggctgggggcagggcggtgggtgaggcttgagctgctttcccgcctcccctcctcctaggagtcgggctggctgggaggcgcgtcctgcgggggcggggggggggctcgctcggggctgggctcggggacagcccactccgtgctgccgtccgctggcttctgggtagcggccgcgcgcagaccccctctcctcctctccctgtccgtcctcccgctctgtgctcgcgcgcgtcctctgctcctctctcctctcgaggggcggagagatttttccaaagggcagtcaagctccgagaagcaacaggagactgccgccgaggaggcgtgcaagcgccggagcggatttgccatcagctgttgcttttcggtttccctctggttagggtgggaagggagcaagacaggcacaatgacagacctggtgtctctctgcaatagtaaaccccgaggaacggaaaaataggagaaaataacccagcaccagacacagcagcccacgttaattgggagccttggtaattaaggggaatgtgcaccaaaagcatgaatggctgtgtcgtgggcgcaggagccagctccagttgtagttgtcattttcagctagagccaggtggggagctggggggatggtccttacctgaaccatagatctgctgccttgaacccccttttcaagccccatccacctctggccctgccaggagcagtaccaccccgtcctcagcccagtccccaagagtcaaaattcatgatgacgaactttgaatgtgaagatgtaaataaatcctggctcggcaaccctgcctgtgacgcgacttggagcatatctctgcactcagctcctgagtctatttcctcacgtgggaaaatggtgattagagactgaccccatgggaggcttagctcatagtgagtgctcaagaaattggctcttactattaggggcagagcttgtaggaaggggcagaggccaggcacaagtgtcagtagccaggagccatgctgagatggaggctgtccagcctcagtcaaggtgtgtgtatggccgagccgggtggagggaggagctactgagaaaggctgtgattgtccaagcctaggtagggccacggagagttccttacaaaccccaagccggggatgatgggtactgctaggaagaaacctagccctgcctctgctgccctcagttctgggcctgttttctcatttgggaaaatagggagatggactagatgatcctgaggtctcttccagctctgccctagatgatctaattattttaataaaaggtcaggtctcaaaaccccaaggcaggaaatatacatgaactcaagaagactttggaaccagtaggggaaccataaatagctactgagaaagagcacccaaaaagcctcccctcaggggatagttctggccccttaatcatgggacctggctgaatggatgccactctggcccagtcctgaactccctggggttcctgtgaatgctaaagctccttctccaaagccagactcaaatcttgcctatttgcgtgcctaaccctttgccgttcctgtcttttcctctataaactgaggacagcattccaactgtcgttttcccttttcatgtattctaggtggcagatttaaaaccacatccctttctaggcccatgtccttaggcaggtacattcatccctccaaatgcccttgaatcctgccttttggccatctctctgtgctttttagagcacctactagtgatgacacgtcaagcccaggctttgcaagcctatttgggaaaggatagttcagaactccaaagccaagccaccttctggttcaaccccatttccagccagagagttctgaagtgtttggcccagtgacttcccaggtccccctacctaatgctgaccagcccaggctgcagagggataacaggaactaaatgtgcatgagaaaccgccatggcttaactctcaaatagtgcttcatcacgttccatccaagggtactgctggaagaatttggggtgttacagctacaaagcagcacgcaagcttgttctggggtgagtcacatctcccttctagcaggaaaataaacacatctaccccctgtgaaaaatgtgggcattcataaaaagaggtcgccagctgttccattctttcaaccacgtatggacaggaggagctactcttcactgagacctgggccaagatctgaggatatactgtggagaggaaagatgtggtccctgggtgagatagagatttagcaaatgttcccatgaataaacgtgtaattaaaacacagttcagagccctgaagatatagcatttgagaaaggtcaggagatgttaagaagatgaggtaaa

SEQ ID NO: 914726 - DNA, 4001 bp, Homo sapiens; identical to SEQ ID NO: 914725

SEQ ID NO: 914727 - DNA, 4001 bp, Homo sapiens
gagctggaggatcatttcttaagcttttataacctagttctaaagttctgaaacttccaaagggatattttagcagcaacaggtctaatccccaccatctttccaaaaccacaaaccaagttttaaaatgacctatgtaaaaacatgcacctagtaagtaagctgtatgtctgtttattatctctcagaagttacagccagaaccacagatttcttttcttttctttttttttttgatacggagtttcgctcctgtggcccaggctagagtgcaatggtgcaatccccgctcactgcaacctctgcctcctgggttcaagcgattctcctgcctcagcctcctgagtagctgggattacaggcgcacgccaccacgcccggctaatttttgtacttttagtagagacaggatttcgccatgttggtcaggctggtctcgaactcctaacctcgtgagccacctgcctcggcctcccaaagtgctgggattacaggcgtgagccactgcgcccggccagaaaccagatttctgaagcctggacaactaacgtctactttttcccacaacttctctcttttctaaatttctaaaaatcacccagcctcaccaacccaaacataaccaatgttaacactttaaaaattttcctgtcagtcttttattatcccaataaattttttattttgcaggattataatcaccctgtatatgcaaattcttattactgtggaataaacattttctctatcattagatatgctttacattttttaatgactgcaaaaaaatttcttccaatataccaaccaccttcctgcagcttcttctcaccctccaagcattaaacgtgccttcaactgtgaggataagaaagaactcaagccaacccaaccactccttcatgcatgacctctaaaacgctgcgggacgtcgtgagaaggggctattcagcagaaaaaggtgcagtagtgtttcatttaataacaccccaaaaatagtggggagaaggaagttcggtgaaggatggtctccttatcactccctccaagtcttagctgcagctggctccctcccactcgcccaccgagcagtggcggccagaatccttggcagagataaccctcagctccactggggttaggggtctgggccagacatgggtgggcaagagagaaaaacggaagggcggggtgtaagagtgggttctttcccaggccagatgacttacacaacgttttggcttccagtccctgagaaagtgggggtggggatggaaatcacttttccaggagagctgtctccttcgggctaggatgatcaacttggcatgggctctgcaaagttagtttggagcgtccctccccaaggggtcccgccaggggtgggggtgggggcgcccacctgcagctggctggagcagccgtactggatgagcggtgtgaaagttgtcagctgcagctcggcgtccgtctgcagctcgtgcccaaccaggttgggcatcttggtcacgttgtagccgaggttctggcacatggagatgcggatggggtcgcagcgccgctcttcctcgtccccgaagccccgcgccggccccaggagcagcagcaactgcaggagcaaccccagactgagaccgacgcccccgggcgcccccgggacgctcggccctgcgccccgccaggccatggccagcatcgggggtagcagcggcagcggctggggctgctctggcagacacccccagtttgcacgggggcgccggctgcccgcgctgctcccagctcccgggacgggagtgtgatgcggcgacgagggggcagcggccggctctccagcagctgcgcgcgactgtgtgggattttagacgtcccgggccgaggccgagggacaggctgcgagggtcatggctgcaggcggcgagcccacaagccggcgccggccgcgtccgttcggcgtctccgcgaggccagccagcagccagcgctgcgcagctctcaccgccggagccctgcgcggcgctggaggctcgcggcgcggcggcggggcgggacggacagcgggcctctccaatggccgggcgcggtgggcagctaggggcgaggcggcggggcggggccgctctcccgcaggaggagtcaggcccccgccctccggccccctcctccggccgcccctccctccctccctcccctagcgccccgccccgcccgcctcccggctcttgctttcctcccacccggatctaggcgcgcaggggccaagcagggacgcagcccagtggctccagccacgccgtcctgcccccttctgcaggtgagaagtgcgccctgttccatctgccccctttccttcctgtctcctttcagctgtaacctaggccggtggccacctccccgtcaggcagagaaacgtacacaaagaattggggatttggatttacaccgattgtggctttcagtcccggttgtgtgaccttgagcaaattgctcaacccctcggcgtcagtctcctctgtaaagtcacttgggaggattagagataaagtgtagaaggcttagcatggtgcctggtactgcgtgagtccacagctattttcactccggaccagcggcgatcggggcccggcctctccccgcccccagactcgcccgacctgcgcagggagccgcccacctccagccgccagcggggaggcgccccagagctgcggagctgcagacccgccgacggtctcgcgctctgatttcctcaccgtatgaaatgaaattccacagggggattcgaaaggaaatgagaccgggactctccgtgcttctcggcccgccgcccttcctgtctcggggacacggtttctaaataaggttgggagggtgagagggcgggaggggagaggcttgacctgtgcactggggacgaggaaggcgcacaaccaccgtgactcctctctcccggcctcccgggcaccccctccccaccaggctgcacccctttttttctttgcttctgcttcggctcctagggatctggggatcatgtgacccaggtttgaacccaactttcctgtctcattaccagccccccgcggctttgtgctggtccaccctctctctgctttccagtcggccagtaaactcccagcaggtggattcctccaccgtttacttgttgcttgactgtgttgaagctatggtgcctctctgagcctcaaagtggccggctgtaaagtggggaagttcatatccacctcacacagttgttctaagagttcagtgagataatacctgtaaatcatttagcagtgtctgacacataataaatgctgaagaacttggtgattggggtgtgtgtgtgtgtgtgtgtgtgtgtgtgtgtgtgtgtatgtgtttccaaaacagctaggggagatcaattatgggacagcctcctgctttccagcctggtgctaaagacagctccagcagccccggaatgaggatctgggtaaaaggcttttcaccctcttcctgagatctttttgtccaacacttgccactgttttatgcatgtttttatcctcccatttcagccaattctgtggcatatggcagaggctagatgcaagttggaagaatgtctgtgccactcatgtgacactcatattctgtcttgtatttttagtcttcttatattggcaacgagacttgactgagggcaaaaatggaatcaacttttttttggtatttggctctgtgcctagaactgtgttggacacggagaagctgcattgtctccagtcatcatcataaactcccagtgaaggaggttccgttagctccttatagagattaggaaactgaggctagaaccacagtaatagaaaatgacaagaccaaccaaaccagggcccagaagaggctcttcaaagatggaaggcagggctattttcccagaaaaaattcccagctggaaatcaatgtactcagcaataggattgaatctctgtgtgcctgtgctgagtaat

SEQ ID NO: 914728 - DNA, 4001 bp, Homo sapiens
ccttccaaccacaaaattctaaattctacaaatgtgaacaatcagctccaatgaatgaatccttccagctttatggcaaatgagtgcttttttgactacgggttgtttttctttttaaagagaaaattgttttttaaatgtagcttcctgactgcaccaggtgtgaaatggtaaataaaagaacaagcagttgtgttgaccatctttggttgtttccttcaaagcttaccagactgatgtcattctggatgttttctattctgcttaccaagctcggttttcctagaaaaagtctgtagaatgactgccctaatcctaatcaaaacataccatcatattctaaaagctcagggctatctgggagattggtagctagctctcactgaataaagaggagtgagtagcccctttttcgtggataattctaggaactggcaagacagtctttctctttggcctcctggatgaacaaagatgggctgagaatcaatgatgttgccctaagtgacaagatgcctttattcacactgtgcatacaccctctcatggacccttatttttctgctcccaaatatagtattttgttcagatttctaccctttcctgtgtcattcctcctatcactttgaaatctttcttcaaaagtctaaaattccacaaatgaagatgaacaaagggaaagcttatatctgtctcatctgggaaccctggaaaagctacactgcttatgtgaagaggaaaaaaaaaaaaaaaagatgggcaggagtttagtaagactgggggaagagagaaaaggaaactccccaggaaaggaagaaaacaaagtatttaccacgtgacagataccaccatgataagtacttacacataaattctcatctgtacctcacaacctcacaacagatgaccctaggaaagggtgtatctctcaaagcctttaaccagtttaagaaatttgcccaaggtaaatctaggtctcaaacccagatctggctcaaaatcatctctttcctcatcacaatggtgatcagccgcatggaagcaggaagggataagcctcatttaaggaacagtaaacctccctcccacctccctactaccatgcccaagatatttttcatcttcagcaacattcaaagatgctctttcttgatgcctataaaatgaagtcaagttcatgtgcctggcattaaaggtgactccagttcagctagaagctcctgattatatctactatcttactttaccctgtaccccatgactttattcttgagtctatggtttcacatctctcatccaataaaggaagcacatgcttttattggatatattcatttattcattcaacatttattgaatgcctattatgtgtcatttcttcaatacacttttattgagcaattgctatgctctaggcatattggtaatattggtaaatggtaaatatcggagaatgacaacgagatatatttagggaataagtatagaatactaaatgctggtgtgacaggagataccaatgtaatcctcttgaataatcattgcctttagatgtgctgagctgaatcactagtagaccctgggattaaggcttaggtatagtttaagttcaattcaaatatgtcatcaaattgagatgatgaaagaagcaaccataatgatcctgcactagggtcatcagctccaggactgccaatggtttcttaaaagatatcatttaatgcctatcctcacgaatctcatcaagtagtcaacaatttcactttggttacacctaatgtcactcttggggtcttgtttaaatggtgactcctaaagaacaaatattcagaacctgctaggtacttgcccgccatactctttgtttcccaaaactcaccttttcatgatgataccaaaggtctaattccctcacttgtctctctattgctagcctcgcctttgtctcagttactcctctcttcagggatcttcttcatcccaccacttctcaaaatttctgatccaagttatcatctgaatggctaagtgcaatgtttaaaaatgcctcagaatctccaccagcctgtgtggaagggagacaaaggccagtgtgtgttgtgttcccctccctatggacaacaaactgtgcctaatgaattctggccagagccaaaacaatgaaattatttatctccacctcccctattgatgcacagcagaaataaatataaggatcaccaccttctgtgcaaatgcaaataagtatactcgcagaaacaaaaatttcaacctacaatttcagttttcctcaccttttgcttacactctagtgaatgctatcaacggatctgccctgaacctaccctctgtgcctcttctcaagatcattctcacatcgcattattcccagccttactctctgttgaaattaaactccttcttcaaggcttaccttaaatgccacctcctctaggctgttgtccttgatctttaaaatacaatataaaccctccctcctctaaaccccttcaacactttgcactttttttttttttttttttttttgagacggagtctcgctttgtcgcccaggctggagtgcagtggcacatctcggctcactacaagctccgcctcccggtttcacgccattcttctgcctcagtctcccgagtagctgggactacaggtgcccgccagcacgcctggcgaattttttgtatttctagtagagacggggtttcaccatgttagccaggatggtctccatctcctgacctcgtgatccgccggcctcggcctcccaaagtgctgggattacaggtgtgaaccaccgcgcctggcctgcacttcttgttagatatcacaaaaagacttgtgtggtagcttcttttttttgtaaattggttttgaggcccaggttcacatcatttagacatcctccatagttcctagtacagaacatgtatttagtacaagtaggaggctcttaagcacttgctgaaataataaaatactactttcaatgagcttttccatacattacttcagggtatgattatcccagttttacaaataaaagaggcccagaaaagtttagtgattcagaaaagaggccaaattttccacagaagctgagatacaagacccacataaggggttcagatgtgaatgtaggtacccttgagtaactgctcccaccttttattgaataacccactaagaatataaattagttacttttttgaggaatcaacttgtcaatatctatatcaagagtcaagaaattcataatctgaacagtttatctatttctagaaaaccaccatgagaaaatatctagagatgtagactgacttacacatgaagataaccactgcactgttgttaaaaatagtgatgagatgagtaaaatcttctgcttccccgttgatagactgaaaattcattttcctcccaaaccccaaagaagtggcaatgtagtacaagaaggaataatgtaattaggggagggaaggagagagggagagagggagggagggagggggagggaggagagggagacagaaggagggagagggagaaggagagggagagaggaataagggcaaaaagacagactagaaatttttaactattttcaaaagatggaaatagatgggattatattggtaaatgtacattattgtagacatactacaatgctgatgtatcataatccacccaaagaagccaggttcaggaccatggggaaaggctgtatgcggcagccactgctgcttcttgggaattacagcagcactgtcaaatacaaatgtagcgtgaggcacatatgtgattttaaaatttatagtggccacatttaaaatgtaaaaagaaacaggtgaaattaattttaatatattttagcctaatatttctaaaatattatttcaatatataatcaatataaaaatagtatacatatttatctttacttttgtactaagtctttaaaatctagtgtgtatttgatactt

SEQ ID NO: 914729 - DNA, 4001 bp, Homo sapiens
gttcaaggagcgataagtcaaatgtagatacagtgtcatactgtttgcaaattgtttcaaaaacaactttcaaggttctttagtgtatagtgttcaaacttgaaaattaagggtcactttttttttttttttttttactgtggacactgtattccactagcttgtatggaaatctatttgtatagataatttttggaagctcttcgggacaaagtttttaaattatttataaaattgttaatagtaaatcactgctccttaatcctaattaaaatattcaaccttcctaacgaactgatacaaccctgaagaggaaaaaagtttatttcttaataattatactttggctacatagacactcctaaaaatgagcttccgaactgagatgaacaattcactgcttcattcctcctataaatccacgtccactttcaaaactcatgtgctaaatccttagatttttttcccccagcaaacatctacctaagagcctgatttcattgacacacacttgtactccgcaacaacaacacttcctttgaaaaacagaatgtcacttcctcagtccagaggccagaagtcccttgattctgatctggggagccaagacaggaaattctggtaggcttctgcctctccccccatggacagccactggtgcagctgacagagggcagggtctattccgagctcccttgatgcactgcagctggaggcaacggctcccttccaggctgtgggagtgatcccggagttcggcaccacagcccgttaaacaagggcatttcatgggaaacggagagggagcagatgagagaccttgaaaccttccagcaaccttacccccacttccaaactcccgcgactaccccaagaccatttcggccaaatctcagtaactggcaccatcttgtactttgacctcaccaggcaaggcatcctctggggagaggggttaaaaaaaaaaaaaaaaaaagccagaactccacggctcagcgccacgctgttccacctcccccaggctgccagttccccacctagagggaaaaggctgttccagcgatctcagtaaacactgtcggttggcaacacctggccgcggagagcctcgatctctcccgaccccagacacccgggagctgcccggtcccaaacccgggccagccacggggaccaaactgcagtgtcacaccggggtcggggggaggcgcctgtgagagacgaacggaataaagggaaagaagggggacaaacaaatgagtcacttaatacaagggctgcacatgccgctgacgctgccggtgatgcagccgcggacggagggaggccggcggccgggaggggcaggcggagaaagggaaggagagggcgtgaggcgctcgccctttgtggggccgtccgcgcggccccacagcctacgcccccctttcccgccctctccccgaccctgcgggctgaagctgctcggggctgccgcggagccccagccccgagagtcaactctctcggtctccagaagccatcaatacaaaacttcgacactgtatttagttcacgagcagaccggcttgggaggcgccgcagccgcacccgcctggcggagcaggagccgcagcctcaacctgccgcccgccccgcccctcggcggcccacctgtgacaggtgtgcaggtgccccacacgcccccggccgctcctcgcccccggccccccgcggctccgggcccgagctccccagcctgccgcccctccgggagtcccccgcccctccgcaggccccggagcgccccccgcccgcccctgggcggccgcgcccgcactcacatagcgcctcaacttcttctcgggaggcgatttcctcagccagccggtgcacaccacgtcgccgccgccgctcatgctgccggcctggagccccccgccgggtcgcgcggacgagggcgcgggctcgggcagctggggcagcggccggcggtgcgcagctcgcgggaggccaggggcggggcgggcggcccggcggggactaggcggcgcggcgcggcgcgagcccggcagcctcgcgcgcgcccgctcccccgccccgagcgcgcgcaatccgcactctccgcccggccgccgggggagcagctgcagcaggaaggccggctcgctcgccacgcccgctcccgccgcgcccccgaggccgccgcgcacgcggacgcggggctagggacccgcgaggatacagaaagccaccgccgccggcgcgccccggagtctcgctttctcctgaggccccaagccgcgggcgcggaggccagggaggcgaccgcgcccctggcgctggcgggtgtgaggggaagggactgcgcgccctcggtcgtcgatcgatttttcaccgagcgtcgacggggaagggatactagggctgctcacatttccgatacattctgcgggtcaggttccggctgaaaggagggaccccttcccagcaagaagctccttaactctggcgtccctcggcgggaggaggagacggacctactacgcgccggagcctttgcttttgtagcttacaggattgtcttcagtattgttcctattttatggacagcctaagggcaagggcttgtacaaagccgagccaattttccaattcaggtgtgtgggggaggaggggtcccggtcatctgctattcaaaatgagggcattgccttaatgggatcgacctgggagcctctcattgcctggaaaccaagtccagctgactccctcctacactgcctctgggaaaacacagtttagtatagaaaattcgcatgatttgtagaatggaagaagcaaaactagtcaatgtatttcataacgaattggaaggcaaggtcaagtgcagaagaacaagaaattggggtccaaattccccaacgttcccgctcattgacacaggctatgagacctctgtttgtaaatataatggtatcccagatgtacgtggaagcacacaaccccagcacttcagcgggaggggggagaaaaaaatcttttgtacgagctcttttctcatcacaaagtgtctctctaagcagcattaaaaggcaggtcctccctaacttctctgataagtggatagtaacctgtttattcaatggggaaccgtgctgtgtggacagatgaattggagaagcagcatcttgcagtgccccacacaacctcagactaaagctgttttgtttatttctgtctctgtgcagctgagttgtttcaagcagttggacatcatttggtccaaaagatcttgattgggttgggggaagttcaccctcctcaatttggaaaagcgaatcccctaccacgtacttagctcttctagataccctgggagttttagcggtcagtcccctggatctaacatttcactgactttcttcaatatccagtgtgctgctggatgggaagtaaagccagaactggtaggctgggaccacagctcccttaaccttacaatttagggatccttaagtcacgtatgaagggccaccaccagaatgatggccattttaacttctggctttaagtaccttaaatccctgtaagacaaacaacacttaacgtctgccaaatcaatcaggaggcggtgacttccaaccaaaataaaactatcctgacttcattcacatctgagtcatggtgccaagtcccagagattgcagagtcggagaaatctgcatggtttggctgcagctgaggtttgtgatgcaagtcaggcatacgtatgccctatcttcccccagaagagtagtcttacgtatcctttgatagttacatgattcaatacacagactggaagactgtttagcaagagttagtgggggttaggtcatattctgccagaaattccttaaagtcttattttgtttgcttaggaaaagatggtgttatttacaatttcatgtggaaatggaaaagtttgatgtttcttgtttggccaatggcaggagggaccttgaaatatgaatacaaca

SEQ ID NO: 914730 - DNA, 4001 bp, Homo sapiens
gctttccttggcatggggagaagagcaccattctccccatttgctgctccgcggggctcagataggccctgcgtgctgttcacatccttcctctggcagaaggcagtacagggaggcttttaaggtggatggtgaggtgtggaggggaaggtgagttacaggagggaaccaaggcctcctcttgtcccctcctttggaggaaagtcagaaggcattgctgcacagaccaaggatgtggagaaagtagaggcctgggacaggggcgggggcggacacggggaggtgtcagcctgcagtgtcccatctagggctagggctcacctcaggcagcaggggacaccgctgacacaggtgacaacaacaggacagggagagggaggggacacaggcttgggcaggcagggtcacctgaaccttgttttgaggggagcctgtctgggctgccttcaggcgatctggcaattcccgtgtggagcttggagaaagggaagagggaggcaggatttggggtccgctgacctagggtgctctgcaagccgaggagttgagtgttttgggagacccgggggcctggggagaggcccagaacagggcctgtaaggactgcaaggcgggaaagcccaggagaacttgagcaaagcccagggtgggaatctcaccccgggacagggcggcagagccggggcaggagaagcttctggaaagaaccgtacacagatcaagtgtgcagagcaatggagacgggcaatgaggtcaagagggaggccagagggtctgcccagccgcaggcggaggggcaggagccagggttcaaagcgaggggcaggtggggtcaggagtggggaggccatgctgtcagtcacttacgtgggcccagcaggtagcccgcgctgttcagggtccagcctcgtttttccttggccttgaagggagaaaaggggatcagatgccagggctgtgcctggagcctatgctgaatgggtgcacccaggctttcccggcatggcagaggacttagaacaatgcatgtgcttttggatagctcgcgaaattccaggtttacccctaagtcggctatatttgacatgaaaatggaaccactttatttacgaaatacttcacttgagggcctgagcccgcgcactctcagcgcactgcacctgctttagtgacgctgaggccacgccagtggctcctagccctccattctaactaagccctgcggaacgggcgagcttctcgctttcccgaggcgctgacccgaagcgcagagctctcccggcggcctggttatagcccggggctgttgatacactcggagaagcgcgcggggggaatcccagggagccccggacccttcccgcgacgcccgcagccaggacagcgcccgcctttccactttccacccccatccccgcgggcagggcggaggctgcctcctccaggaagccctccacgcccggccggctctgatgtccccttcgctcggaggagacgcgccccgcacttaccggcgaccagagccccgcagaggcagaaagggccgcggcgaggaggagggaggcgagcaggagggcgctgcctcgggccatctggaagggaaggacagggcgggcgggtcggaacccggagtgggctgcgccccgaggcaaggagtgccggggctgcggggaggagcagaggcggcggccgggccagggccctggcagaaccgtccctgggcagaggaaagccgaaggggaggcctcccgggggcgcagggtcggcccggcgccagtagtaccttgagctgcggctgcgcccgggttcggagcgtcggggtccgggtgcggtggcgggtctgggcggcaggtccgggcgtcgggccgggtcgggtgggctctggcggcctggggcgctcaccgcatggcgcggccggcagcaggggcagaaggcgcgggccgggtccctccacgtgtccgccgcccggtgtggccgccgccaccgccgccgctgctatatatgcggcgcacccgggagccgcccggagtcgcgtcaccggctcagcgcccgcctcctgcaccctcgccgagccccgagggcgacgggagtgacccgagctcgggtcctctgggccatcataggcgggtgcggcggagagccccccctcatcccgcgggagagactcccccaaatctgcagagagaaccccaaaccctgtgggagagaccctaatcccgaaagacagagcccaatcgccccgcgggagagcccccagacccgtggcccaagtcatcgctgtggcgtcaaccccactgctccccccggggtcccagccccagagcaagcctgaccccccacaacgtcccacgcctgcggtctccctgcagcttctcctcccagcccctaccgctgcaaaagccagctgagctccgcagcactggagaccccagagggtgacgggcagggacgactcctcagtccgagccagccccagctgggaggtcatggggtacccggggaatggcgggcaacacttggccctgcgccctggccggcttgtgctggggctggagcgaaggttcaggcctcgggagccgtcgatggcggggagggcaggcgttcccggctccctgtgcccagcgacctccctcctgtttcactaaaggggggctgtggatctcagggtctgcttggccatcccattgtgggagctgcgggaccgtcgagcatccacaggcaccagctcagaagctcggcctctcagtgcctcccctggctgcctggtccagttgtaagagggagctttaagcaggtccagccattgggcaactggttaggtccagagggagagcagcccagactcccagaggccgccaaggggtgggcggtgggcagagcagcagcaagaggctgtccttgtgcccaaggcaaagacatcccacaggaacaaggccctccttggctcctccacaaacccttcctgagctggggccaagtcccgaaacaacccaggagagaacccaagcctaggctgttccttcaccccattcccaggcatcaggggagcacaggatcccaggcatcacacttgtacagtgtggcacctccgggcttccgaagagcacggggtcatctgctgaaaactcgcctgacctcccctcccactggccagacaccacccaagtcctcaacagcagcagctgggttaggatctccccacccactgggctcaatatcagatgggttgatgtcacatctgtgggttgatgtccacagggcacaggacgaatgatgatcatgacagtgtcatcttacctgtcctctacactttagtcttgggaacctttgcacagacagctacaggctgcccccaggagagatccgtctgcctccacgtggctggggaaggacaactgggctttcaagaactctggcgaaggccagcggctgctggagaaggtgcagggctgcagcctggtggctgagtgtctgctgtggtttatgggaggaagaggaggagacaggacttggggaggggtcttaggaacagactcctggcacgacagtggtgaggggtggggtgttcccaagggcacagtttgacttctggtcatccctatttcttgcagcctggggagaggagagtcaggcacaggggaccctaactaggactcacaggctgatttcggagcccacagtaaaccctgaagtggtttcctgccgggagtgggggcgtgggagacagtgagtcgccatgagagtctgggccagccgtgggcagaaggacagccgagaggcggaggagcagagggcacgttcctgtgactctgcagagaagtgacaatgatgtcctctcatgccccatgtccttgtgtctagatgacatcagggagtgggcaggggctgggctcatgggtgcctcttggctacctgagaaatactgcaacctttggcccccggtggtagtgggagccctgctaccatcccagagctctttcttgctttctgctgagaacaaa

SEQ ID NO: 914731 - DNA, 4001 bp, Homo sapiens
tggctggggctgcttgcaggaggaagtgagagcccttggccctctaaggatacacacctttttcctctgtcactcctgctgcttagagaacttggtgattagacagaagtgtcccaagatgggaagaggggagtctacatccacctttgctaaacttgcagaaaccaccctatttctcagaggattcagggtcagccaaggaagtcaagcctagctatgggggacctttcccgagggcagagcttctactggccgcacagagagagtgacaggtgcctggtatccccctctgtcccactcttgggcctttccccacttccctacatggctgagctctggggagctagccaggccccagtctgaggcctgcttagggacaggggacagggcatcctcagtgcaggaattccctggacaccagcccctgaaggcgggcaccagcttctgtatggccactgtcaatgacagggtgttcatcacctcctgatacagcctggtccatttctgagcaacttacagcttgttcaggttctttccgggacagccaggattaccctgccagtggtagcacctgcttcggcctgccccttacacctcccattctgcactcttggtagtgctgccctcctagagcacatagaacatttttctccatgacagaccttcaggtatttggaagcagtaaccctgtctcctctgggtgggcactcggccaggctaaacattccaggtcctgagagagggtgctgctcggacactgtgggaggcctgccttcccttggcaatttgactccaagatgcctgttttggagatggggccaaggcagtgcctctcagggagggggccactgggctgggtttccatcggattttctggctggtgtggggtgcatgatggtgctgctggagctgtgctttagagcagtggccctggctcctgccctcagatgcttcacacgactccccattgtgcctggtgtcttctccatagagagagttctcccagctatcccaggcaggtcaggacgcccaggctcatcagaatgtcagtgctaattttagtcagaacaatctacctcacgctgctgcccagttttgcaaattgctagcttttctccagggaaccaaagaaatagtagagccgaccaaagctttgaaaatgggccggggtgcccaccctcctaaaggagccctttctcctctgtctcctctgagctctagagctgaaaccgatgcacttagaggaaggggtgccctggactggaccacttggacctgactgctggatggcccggagactccatcctgtcctgacttgagggatgggacagcccagtgttgagggacgctgacccagggtgctccagaggaggggcgaagggctgagggggtctgcaaagtactggcctgggagagcaaatctttccacctccctctttttcctcctcccccaccccccagcctgcaccaggtctgcccctggccccccagcctcctctctctctcatccacccccgcatcatccctgccttggaattccctccatcctcctgtctccattactgcccacccgcaccatacctcccactccctcaatttcatcccagcatcccccagggatcctgccagtgggatctgatcaccataggggataggccagattggcccgctcaccctatcttctcccactttccaggggtagagcgcccccctcctcatgctttccaaccactaggcccccaagacactctcccgcccgcctctcggcccccatcccggtctggtccactcccacccctccaaccccatgccggccactgcagtactcacaccgcacgcctgggctctgcctctggcccgggttgggggcggccgccgctatctctggacccttgtctcgaaatccgcacggggtccgagggtgcccggggccctgcgcgccgagtgccggtggcttgcctctcagcgcctggatgggatcaggtggcagcgtccgctaggctcgctcctcccggctctgcccgccccccgccccccgccccccatcgcacaccggaggaaggcgaggggcggggccaggccacgagcaagtaggggagaggggagagaggggaaaggaagggggacgggggagggggggtggttccctggcttgcccgctggctgccgtgaacagtctctgggtggcatcttcagatgcagttgtcttactctggcaaccttgcagagttggacactaatgtggccagctcccttctctcactcaggcagggaaactgaggccgggaaggtgtctggatactcctgcattgctgggtattctggggcaccgccggtcatacgtgggcttctgggtgagccagatgctggtacacgtgcaggtactcacatcctctgtcctcctccagtagagaagcagtgctccagccttgtctggtcccatctctgcccacatgcccccttcccttccagcgtgtcccccataccctctgatgtagcttctggctgctcacccatttttcctcactaggactccagacccactcactcctgaccagagctatagtgaggctgggacccctgcctaggcacctgccaccaggcatcaaagaacccaagttcaatcctggtttgctcttaaatcccagagtcaagaggcaactccctaagccctattgcttccagctgtaaaatgggaagctgttctgaggtagcagagataatacacacgaaggctccatgtgaacttcttagtcctcagctcccatcacctgggagctgggcagcagcacctcccaaagccatgccagacatcaagagccctacactgagttctgtggctggcctgcacacctgctttctattttgctctgggcctggtaaagcaaggatcctggagctgggtagccacccaaaggtgggactggaaggggctggatacgcccttctaggcccacataggaaatagtgtgagggtccttgttatggttgaggaggaggaaatagggactctcagagtcagaaggactgctggtggccccagtttggcctcttgggcatgtcaccttctctgcccatcaatcttccgctgtgtacaatatcgtgggggaggaggatcttgagaccttgcctccttcccagggctgttataaaatgagactccaggccgggtgcagtggctcacgcctgtaatcccagcactttgggaggctgaggcgggcggatcacgaggtcaggagatcgagaccatcctggctaacgcggtgaaaccccgtctctactaaaaaaaatacaaataaattagctgggcgtggtggcgggcgcctgtagtcgcagctactcgggaggctgaggcaggagaatggcgtgaacccaggaggcggagcttgcagtgagcgcagatagagccactgcactccagcctgggcaactgagactctgtctcaaaaaaaaaaaaaaataaataaataaataaaaaataaataaataaaatgagactccatcagcctttagtttatcctgcctcagagaccccgcccccttccctagcacctacacatgccttggggccctcagcctcagatgacctgccctgggctctccagttacagggagcagaagagccttcctttgggctagaaaggttctgcctgagtgggctgacaagctggagggaagggcgctgtttttctgtcttcgttactgtcctttccgggtttggcttctcctctgggagtgtggctgcaggagcctcccatagtgatattgatggaaaggggaaaggtcaaggtttgggtaggaggaagaggacttcccacccagtgctaggatgtgagccaacctttctcaacccagtccttttccctgtctctcccaaacctcaccttcccccgacctggtgccccattctttttttttccctgttcccagcttcttctccactgggggcagttggcaaaatggagctggagaaaagatctgaaggggatgtgtagggggaa

SEQ ID NO: 914732 - DNA, 4001 bp, Homo sapiens
tctggacacctggggaaacaccaaattcagacggaggagccatctctactctggcaagagcagcaggtgcaaggattggaattcagacatccacgtgtaaacaaaagggagtgctcctggcgggggggtggggggtaagccttcagttcaattcgattttgccaaggtctgccatgcactggcccctgagcctggtgggcctgctaggtttacaggggaaccaagctcggccctgcccttaagaagctcacacacctggaagaaagcagggggcgcggggaggggaggaagtgtggacgtgagcgcgcgcgcgcgcgcgtgtgtgtgtgtgtgtgcacacccggcaccagtgctcctggcgcccggaactccattccctcccatgacagctcattgaccaggtcgcctcgggagagcgccctgcaacccccaccctccctttggacccccgcgctggtctggagcgcacccaaccagcgtaaccttacacttcagacccaacccaggtctgctcagccccggctgctcccagggcctgagagtggagctacagtagggatcggccttcacccggtcccgggcggctccgcggggaaggcgcagcccagggcgtgttcttccagtcttgggcggagtcatcaccacagtggacagagactccagcgctacttcccggcgttgacacctgctcctggagagggtcctggacccgcgggctgtggtgggggtagggactgctataggttcaagcggcttttcaaccacagagggctccttgcattccctatcgcctaccaacgggatcacagcaagactggggctggggctgatacaacgcaattttcctagcctcgcttgtccggcagcctgcgggtcttaactgccaatagtcagggccgccgcgcgggcatctcgcctgacgcctacagtggccaaaaaagctcgtttgcccgcgcgttccctcttgtacacacacagacattcacatgcacacacactctgagccggacttgtgtgcgatcccgagagcccgcgagcaaccagcccagagtcacacgcacatttggacacgtgcgcagcgcgcccccataccgccagctagctgcacacatccgctcgtgcagccctgcgcacacacgtgtgccccggggaagagcgcacggccgcagacagaaggtcccgaacgcaggcaggagctcacacgcaggccccacgactaccacgcatctgcggccccagagccccgccgtggctgagttgatgcgcaccagccccagcgcaccccgcgccgcgcggggcactcccgggcctcatgggcgacccaagtttccggggcgcccgtaccttgaatgtgctgcttgatgacattctccaggtggtccagccgctcaataatcttcagagtgtcccctttgtcttcctccagcttcttgtcgggcgccggctcctgcccccgcacatacacgctggcgatgtagttggtgacccagcccacgtagagcaggcagatgatgttagtcatgccgctcaggatcacgcaagtggacaccaaagttttggtcttcctggtgcacaccattctgggctccttcctccatatagagctcccgggggcccttccttgtcgtgcgccccgaactcccccgcgctcgcaccccgtagcacgtccggagccgctgggcacctcagcacctgagtcccgaggttctccaaagcccggtccgctgccggtgtagccgccgtgcccaagtttgcagctcctgccgctggccacccggagagaccttgacaaaggaaaccaggtggatttttttccaaattaaaaatccctgaacccttcctagaggggtcacgggtagccggcagccgcgcgtccagatgtgtacgtctgggaaactttgccactgcctgtgtcggcggccacgccgcttcccatcgccagcgccggctgccttggcggtccgaccggcccgcgctgctaggagaacagcggcagcggcagcggcggcggggagagccgcgaagcagagcggcccggccccctccgagcgacaagcgctgccaccaatcgcgctccggctcgggagaggggccggtgctgagcggcagcggaccaacggggagggagcggggggcggagtccagctcccaggccccacctgctggccgcccctggctcccgcccccagggacgcgcccgggcctccacccgcgcctgcacaggctgccccagacctgaagctcccggagagggcgcgctgccagtcccagcccttaggtcggcagcttcctccgttaggggaattccatctcttgctcttgggcaggaatctcctggttttgtggagggggtggggggttcgcacgggtcagcttctttcatccgcccggggcttctcgcattggtgccaccagtcgactcctggaatcttttcttggttgccaggacgctgagaagccaaggaagtgccagccccagcggcatccactccttccttggcctcacttgggcctccaccctgccctctgcccttcagccaccggcctcctgagtgtgtccagacctggccctaaacctggctgaaaggagccaaccctccggcaacctcccagaagcaacattggtgacctattagatgactctctcgaccacttcttccccccccccaccccccaccccccacccccaccgcctgccccaatttttgcccctatctaggtttttctttaagtctgtacagctcccaggacatggatgtgtcctttaagcccagttttcatttatgtggaaccagggtcatccagtgcataaagaaaccctgcaaggaagtgccgctgaggggaactgaggtctgtgaactgtaaagcccttctacatgttgtttatgattgctatcatagagggcggtgggagagacctgtgactgagcacaggaggaggccagacgcagacagtgatactgctgtgtttgttcttactgccaatgtttactcatattatcctcttctgctgaacaccccgttctcagcacctgaacggaattcctttaaacaaagactttttacaacatagatttcctgcctcttctccatctctgagttgctttatttttttggcctaagccagggaggcagcctgctgcatgcccactttgttgtgtgccagccttccaaccagccacagaaatactcagggcagctccatcctgggatatcttctggattcaaatgactggccccacaagagagggagagcacaaaaccaaagaaagggcactttatggccccatcagccaagggcccttctaccaatgctttgtttacaaaacctccccaaagatgctatgaaaacagataccaactagggacccgggaagatttcccttgatccatagctggaagagagaacagtgggtgtgggttggcgtgggctggggtatagaagggggagaagaatcgtgtgtatggtatgtaggagatacatacatgagaggagagaatgtacacaatttctgaaaaaatcaaggtagagaaatctgcctccaggagggagtaaaacttgtctctcccttttttctcttccagaggtataatccagctcacaaataaaggatctgaactttcttctggttggacagacttacaagcaatgcccttgagtacaggctaaggtgtaatctttccttctgttctgccccctctcccaggaggagccctggaagttcagcccttcttgggatcttcctaaaccaccacaggactagaaagagaaggcaatactcattcttttcacattcttaatggaaaaaaattaaatcccaagtttaaaaaaatgagggtcaagaagaaaacaaagtgaattgtgtgatcttaaattttgtacagctgatcctctaagataatgtgtaactgtagaggggatgaatacaacaaaagaagaatgctgaacaggttctcctctctgaaaagtcacaggtttgagttgacctgttcaaagaatt

SEQ ID NO: 914733 - DNA, 4001 bp, Homo sapiens
gcaggagaatcgcttgaactcgggaggtggaagctggagtaagccgagattgcacccctgcactccatcctaggcaacagagcgagaccctgtttcaataagtaaacaaacaaataaataaataaataaaatttgacaacctataataaggtaactaaagacagggtctattatacacattgtatctagttatctagcattagcttcagcatctgcttgaaagctaaaagaaaattaccagaaatgagatcacagagtgtactatgatctcatcacaggactctcctccagctccagaggaatgtacgaaacaactgttccacagcaggccagacagaaaaatgaagaaaacactaggcactgtggtttaataggccaagcagaataaatgctaccacaaaactccatagcaaggcatgcggcacaggtcctgcagtgagtgacctgagtgactgcaacaggcactcttggccactgacccacgtccacctgccaaaagcagcagtaaatagaagtacagtgagttgaggccgggcgcggtggctcacgcctgtaatcccagcactttgggaggccgaggcgggtggatcacgaggtcaagagatcgagatcatcctcaccaacatagtgaaaccccgtctctactaaaaatacaaaaaaatagccaggcgtggtggcgggtgcctgtagtcccagctactcgggaggctgaggcaggagaatggcgtgaacccaggaggcggagcttgcagtgagccgagatctcgccactgcactccagcctgggcaacagagcgagactctgtctctcaaaaaaaaaaaaaaaagacgtacagtgagttaaataccctctggggccctatttgcacagtctgtaaaattggttcggaaagatgccaatggagataggattcctaaagcatctttcagatatgacctgttggagggccctaaggaattcacggcggccttgaccaccccaagagaggtgttcataggccaaagtcaggaataagctgcagggcaagttgcacgcatttattgtttcagatcacaggctccgagggaactgagtttatgatccacgctttcttcatcgctttggagagtacacgcctaccccaccccagtatatccgttaggtcctagtaaacatttgtggcactggtgatatgtttcgaatctttttttttccccagtaatataaacccgagagcgtggaccaagccattcgattacatgttgtgtttgagcaacaccatccacgccgtgagcttactggaccctgggccgtgcccagcgaccgtggacactgaactaagccagagctggtgctcacgtgaagacaagggcagaggaggattcggagctctacagggtagagccagaagggtagtacaggcttaactgctggcccggtgcttccagctcagccgaggggccgcggggccgcaggctgcattccccgaggccaggccgcatcttttcccccgccccgacgaccccgcgcactgcaggaagggggcggcgacgttgaccgccgcaagcagccaaaggagggcggcggctgagagcggccaagaccaagaaagacgcacagctgtggctttactaaaccgccgggcgggagcccggagccccacaggcaaggcccccagcgtcgctcggatctaccacggggagaccggaggcgtctgaggccgcctccagaggaacaaaggttcctcacgaggccgggggtggcagagtgtcaagagacacacaggaaggagtggaatgggacttgggggatctgggggcgtcccgggcgcgcccccagattccgggctcctcaccgcctcctacgcgccgccactgccgctaccgccgccatcttgtgcagagtttgctccttgaccccaaacctcccgccccatcgcgcgcgctcagccacgtatcctagttcccgccccttccggccttatgattggttcgacctgagcgccgccgggcagctgtctcattggtagagtgcgcactccaaattatcgcagggggcggggcttcaggccaggggcgggaacgtccagagccaggcgctgtcagactttgcacgctctcagcatgacagaagcactggactggttttctcaagttggcaaattttatttagaaaaaaaaaagtgggagagaaaaaagtgacagcgctctttagaccaaggacttagaagagaaacctccacccttccggagcacgttagtcccttccctctctcactgctcaacctccctgggcttccagagcaagaaaaggctacgtcccctgtcgaaggagagtggacggtgaaggtgcctggaaacggccagagaaaagacctaggcggtcgatgttgcggtggaggacactgtgcagcacagccagatggggtccaccctcacctccaccctccctggagaagtcccgaatgaagcgaccccgctctgattggaagatgaacttctgaggcaagggcccatgctcccggagaaaaccccagacactgagcagcagcagacgcacctcgaaaggtgccagttggctaaatacttcatgcatattacccagggccggaggcaggaggcttccctcagccatgacagccactaaggtgcaggatgcctccaggtgccagggggagtgggtcgtgtcagggtggcgagaggcttcccaatggcccaagagggcggccagcagcccccgaagcagcacggaacagtagcacagggctgggggtgcagctgctaccagctttaacagctcaaagagcaggggctgttcgcggaagcgccggccaatgcggagatcccgctccacggtggcccgggcgtgttcctcggggggccaggccagctctgcaccagctgcatcgggacacacactctccaccaaggtcactgccactgctttggctgcctctggactcaagatgggtgccccccagcattccccacattcagtgccccctggggcactgcagcagtgaaccaggaggctgaggaggctctgggtgttatagatcacttcctgctgatttcgtgactggacaaacttgggtggctttaagccacggccgatgactccagcatggaaaactgaccaaatccctccaggacctggcacagctgcagtgtgcctccggttagtgtccaacagggaggcagaagccaaagaagctgaaacaactgagagagtctcattgtccccatctacttgcccaccaaacagttctgtgttgcctcgatgtaaggctccttcaaccagcagctgcaggacagccttgagcccagctggggatgtctgagacaggcgggtgagaagctgacaggctgaggccacacctgggggtccatgcagcctcagagaggcaaagaagcggtgcaccccagcccttaccagtcccaggagctgggagggggataaggcttcagaaggaaagggacaaatggccaggagagaggcagcagcttcagctacttcctcctcaggatgtagcaggagaggagccaggtcagacagatgggctgaggcagattccccaaagtgcgcccctagggctgcagggccctcgccaccctgctgttcccaccctactagcagtgccaagttgcgcaggaaccgggccgtgaagggaggctgtaatgtccctgcatgcacccgagccagacagcttcggaaagccaggggcaggaggccagagaggctgaccactagccctgcatataactgggtggccaaactcaactcttcagggcttcgggctcggctcagcagatggcccaaggcctcaggtccacagctaggccgggtatagacagacagcaggcccaagagctggtgctgccagaggaagcgcttccgttccaatcgtaacgtctctccacacagctctccaacatggtttttgagcgcatctaaaaagggcaccaagcggggaggtgggggcgggcctagcaccccttccccaggagaccctccccggtga

SEQ ID NO: 914734 - DNA, 4001 bp, Homo sapiens
ccaagatgctaaaaaattccagggcaatcacatgaccttttgcacctggtgaaatatttttttgccatgtgaacttatttcccagtaaagcacagtccataacaccacagcatagtgtttagcaataaagtaatgaaataaacccaaacttcagtagcattcaggctgaaatccaagctaccttttccatgtaagggaccattcaggcagccctgtgcaaagtctccaatgtgctttgcaaaggcacactgtcccatgcctcatccatctgtcccttaccttctcttaggcagtcaaaacccagacacccatgttggagagaaccaccagagccaccaccttcaccgcagttagaggaaagcattccttgagaaggagttcattgatcaatatcaaagacaggctgggcaaatcagaccccagctgcagttaatcagtgtccacactgctaagagtttggagtaaagaagcacaggtcttgttctctgccttgcctctgtgaatctcaggggatacgtggggaggaaaagtggacttcctctgccaggctggtacatccaaactgtctaagcctttattttaatactaggatgtcaaatgggtgttcctgtgcacaagcagatcttatttccttggcataagatctctcatacacaactgatctaaccttgttggagagggttggaggagataattttataagaataaagttttgcaaactcttcactgtaagaagatcacggaggtgagaggatgaagatgaagaagatggagagggtaaagactgtgatttcaaaaaggttaactgggaaaagaattaacaaccctcccccaacctcaattgtttttagaatgtagaaacagaatctgttaaccctcgcttttgctccctcttcattcaagacaatggaaacttcttcggatacctgggctaagttaatggtaatttaccatactgagttgacagaatttaattttgccagtataaataatgtctccaaagcaaaattgcctcctttgttccccaaacaatttcagattccagtctcaactttggactgaacaaaaagaacgataccacgcaaaatctccccaaagtgtgttgatatatatcggctagcgtttgtttattcacataaaactcaatttcatcaaactcatcagacacagtgagtatcaccccagatcacacatgtggcgctctttcctcccatcctggcctcaacgactcaagtaaaacattcaggatcagccctttaagaccattctggctctatcccaccccaccataacagacaatgctgagcatgcattacagatactcttgtgcacgaatgcatatgtgtgcatttataatcgatgtgttcattaaaaatcctcactctgtccctggttggcagagccaccccagcgggcttacgtgctgcggttgtccggggtgttccgcaatagggataaggaacacatggttgtttccagagaatcagaaagtcaccccctgcagtgaatacccactcttagagaaagagcctgtccaactgtccgcggctcttcactcttccccgcctcgttcctgaggttattttttaatgacctctcccctcccccgccgccccgggtgcagtagacaggcaggggctcccgtgagccccggctgcggtgcgcgcacgctgcggcggcgttggcgcagaactgggccagccagtcgtgctcacccccgcgtcccgagctgggctgctggcggctctcagaggcgcttgggctccgggctgggctcctgcagcttctcggggccggccccctccaggcacaggtcctgcagcagccgctccccgcaccccaccagcctggcggcagcggcagcagctacagccgcactacccctcttcatacttctctgatggctccttttagtgctgtttgggaaaacgattttttctccctgccagaaacagatttcctacatttcatcagtcctcatagaccgagcggaagtaaaatgcttactttttttggtggacgcaaatgcagttgacactgatttacccttcaaacggggagagattgtattacaagcccttggcagcaattccgaggttggggccaagctccagccccctccttgtcccccagacactaacctaagagagaaaaggtgggggctggggaggggatcatatttaactctagaggtttaacagagtcaatagctttagcacaatattaaaattgggtgttggaaaagtttttgctttcctggccagtgattttgcagacggaggcacgagctttccagtaacttcggccactcttcattccaaattgaacattttgatgtcttacaattctctttaaatatcagatttttagaagaggctgtactcacggctgtttttgctttaccaaaggaaatacaattccacccttccttctttcagcctcagctcagcattatgttgaatgtcagagacaattgtctccaactgttgtttattagtacgtgtattctgagatgaaacgtcttccatgaagtggacagatgttcaagtgtctgattcacctctaatgcgcggggaccgcttgctgagtgtgctgatccccacaggttaccacctcccatggagcataaataaaatgtattacactttttattttgttttgttctcatgttcatcagtttcatgtatattgccatccaatgtttacaatggcagtggtacaggtattgtgatccttgcttggataccatttttataatgatgagttacctagccccactcccaaatagaaactacctgtacatccacaagctaaatgatgtggatgattttagatataatttaaaaaatattcacatttcacctttattattgccattatctggcagaaactgcatcagttatttgcttctagtggcaatacatttaataaagaagaagagaaaaccgattgaaaagtttggagtccttgaactccgaactttttattttagttcaatttgcttttgcagctatcaggtccacatttcctccttagctttctaaaagaagggaaaaatagttattcttaattttaaggagaaacagcatttttaaaaggtcaacataacagcttggataaacataaataacaacaaaacatacagaactcattactgatgagttttagtaaacgaatctgaatgataaaatttcttaaaatgtgatcagatctgagtattcctagagccccaacaaagaattttgagtgtctgaacacatacaatttagtaaaaaatcaaatgttcttgataatttttcctgatcaaaacatcatcagccaataaatgctaatttaagaattatccaaatatgtaatgagttcaaaaaatttagcaccttgaactttcaaaatcttacatcctatttctccccagatatgaatattcttgtcacattgttcattattggtgttataaaaagctaagagtaaggcaatgtttttgttgattcaggaacaatgctaaatacagtttggggaaaaaaaggaggcttacagaggaattgggaaagcataatcattcaaaattactccctctccatgctcatttcttccaggtatttttttttttgtcttaaattttgcattatgtcagatcctctgtctctcagaaagagcgaaaagaaaaatacgagaagaaataaataatgtgttttttctttcattaacatctaagagttgtactgaatattttttttggtgacaaaagagaagtaatacaaaagatttctgaagagacacggatacagtgtttttattttaatttttttagcatatgtaaaaattcccatttgatttttatcttgtttttcaaaatcaatatttctatttatatattctgatcactcactgatatatttgtcaaagataatcttttgtctaagtattttcttagtttagtgtggactcaacccaaactgttcaccttaggaaaatgtagtccaactgaagcaactatagct

SEQ ID NO: 914735 - DNA, 4001 bp, Homo sapiens
taccaatgcttatgctgcttcacactcaaatgtttgttgaaaaaaagaataaatttatgcacaaaatcaaattaagtttcactgaactatataagtagaataataataacaacaatatagtgtttactagggccagatactgttcaaagtactatacatattttaatcattcactgccacagcagccctaaaaagtagttactactattattaccactgtacagatgaggaaaatgagggacaagagaggtaagtaatttgcccaagatcatactgctagcaagtggcagaggtagggttcaaacacaggcagtctatttccagcgcctgtgctcttaacttttattttccactaccatacttgtgattgcctatatctgaaaactgatagctcaaatttaataattaattactaatatgacaatcattagtgaaccccaaaaagacagaagagagagaaaaatccatctgtttaggcttaaataactccctttccttgatggagataaaaggcactctgaatgaatcaattactgaaaggtgtagccccttccttctgggggagacacttccatagcactgtgaagggtctttctagggagtgtcttcttctttttctgacctatctgttggtgaagggtacaatttacatacccatattcagtagccttggttagactacagagttgccaaaattgtgtgcacaccatgaagaaaaaagaaatataggataaagaaatcctaggataaggactaaaaaataaataaatacaaaagccatgcaaaaatccagagccatggagagcaagcaaaaccctgataaaatgtgctaaacttctgccaaaccttgctaaaatttcagatggacagggtgcaccttactaagctcttagtttcattagctagaaaatgaggataacaactcttaccttgacagatgatttaaataataaaatagtgttgatgaaatctcccctgcaaatgatatgctcaaatcttatatcttataaagtctacagggatcttttttctcacatttaaattaaatttattctctataaaaaacttagtggaaatagtgctgctatatatgatgatcctttaaacatgtgattctatttttcacatagttgaaattttatcctgggaatatgaaagcacaacagcaacaaaaggagaggaatctttaccaggaggtagcatgaggtcagcaaaagtactgttagactagaccttaaaaacaaaagcaaatggaaaagaaaaattttagttcagggtgggatgactctagtcagctcatttggaaaaagaatacatgattttgttcctgagtttgggtattcagcagttttagaaggtgtgctgtaaaagtagggcaaagaaatccagatttagaagccagattttacagacactgtggcctgtgtacaatgtcaaaagagtaggtcaaattggtcagctgcatgaaagaaaagccaaaaataaatcagaccagcatatagataaaataagcaatctgactgcatatttccacatttgagtgcatcatattggaattactaagcacagttaatatgacagacattgggaaattcacttaaattttccacctgcttcaggtttcccagatgcaaatgtcaaataataaaagtctttctttccaaggtgctatcacatgcttaggtgaaggacactacaggaggaaaaataaaacaaaaactgttgtctttgctcacaaaatgagatcttataaccttacctaatagattggttaaccacaaggccagatcttctttcattggtagcaaattagcttcatgtctgctggctagccattggctatactgatgcatatcagagaggccaggtccactgcgtacctttgggctcagagcagtgcacattatttatccacttgtaatacctgttttggaaacaaaagagcaattgctttttatacagacttctctcacaaaatgttgtcatcatgacattataatgaactggatccgcgggttttctgatgacagttcagtttattaattattaaccccatgaaacactatttgctttatctgtactggccctctcacttttggccaaacacttagtaggaaaacagcagcaatcaaaggtcaaatagaaaatcaaacaagaaactccaagtttgtatgaaacaatatacttggaaagagccagcttctaagcaagaaattccacatattgaaacacgagaaaaagttaaaatgttagtgcccaatttgttaactcccattgtttgggctatttaaaaccatagattttcaccaaattttatgactgaacactggcaatgacagcatttttacaactcactgtaaacacatgatcattacccttaaaaatatagcctaaaaggttaagcaaagtacttcttttttggagacggccaagcaatcatggactcacaatttagagaactgggtgagaagcaggggaagaggtacacccaaagactctctaccacacttctctcttgcagtcaaagaaaccaaaaaaagaaaaataaaaaaaaaaaataaaaaaatagaggataagtgacttcaccaagatcatacagctaggtcatgacagaactaggcttgaacctgagtcttcatattcccaagaccactactctttctgtaatgacacatttttacaaaatggaatagccaagaacccatattgatgataacccaagcactgcatcatagttctaacaaatgctgccagaggtgtttgtttgtcctctgctattgctacaacaatctctttctctttcttgttttttatctttccactttatttgttttacatgctgcgttttgtttgaaagtatctttagagtagaagtacttaaatatcttacatctataaaaacaaggatgctttcattaacctgatcatattgtgagcagtgcaatcccctacttgggttgtagaaaaggtatttgaatatatatttggccttgaatatggcatttttgtttgtttgttttgtattttttagtagagatggggtttcgccatgttggccaggctggtctttaactcctgacctcaagtgatccacctgcctcggcctcccaaaatgctgggattacaggcgttgagccaccatgcccggacagaatatagcacttttgtatgcattatttataggatgtaagactacggaagaactaatgaagcagttaatgtaatagtcatgtttaataacatgcaggattctacgctgtatataaatatgcttatgaaataaccagatgcattatgactgtatgacaatgaaaatgaaaatacttgcaataggcaagaggtaatgtttatatgatatcatgaggttttcagtgatattgcagtatttatggcattttaaagttaccaataagtaatatattctccttttggttttattatttgaaactctacacagtattcctttccagttaacctcaaactctaattcacttaacataagttaatttattttaaatattgcttttgaagaacaaataagacactggtgtttagaaaaatgcaaagtgggagcatctctcaaatattttgctgtagtaatagaaaagactgttgggagtatgagtaagtacctaaaaggtatcataaatatagtatttaaaagcacaatttcatttctaattaaattactgtcgagtaatttttgaaaaaaataccataaattttctctgaaaacatcttatatatatctatctaaagtcaaccattgaaaatgtgaactgctttcaatacaccttgtcatacattattagattgtcattatgggaatcagaacaccactttttattatttcatagttaataatgatgttatccatataaagtcctaaagttttctccaaattctgtgattaaacatgaaaaacccaaagcattttctgccccagttaaaaaaaaaatatgtctagtcctagaaaaacaaaacttctccctgtagctggt

SEQ ID NO: 914736 - DNA, 4001 bp, Homo sapiens
cagtgctccaaatcgaatacccttccaaaatctggaaagagaaaatgccattttcctagctgaactcaaagaataaaccacccaggaaagttctagatatctctttcatcattgtgagttcttcactcttttgtgattcattttggctaattaatagtatctcacaaaatatacattttcaaccaatgtcatggatacaaaatcttactctaaaggtctaatcagaaaataaagtccacaatttcaacagaaaggcaatttcagacctcgtaatgggacctccaccttgggttcagtagagcaacttatccacaaattgaaaagcaccaaacataaagcaaaatgacacttaatggtagtttatctaattccataataaaaatctttaaattgaaaggaaccttacaataacgatatattcaaactcctcgtaattaataaggggttggtagcctaagaggatattttgcccacagtaacaagactgtttagtcataattattaaaagtatcctactcagctcttgtgatccttaatttagtgtagtgctgactctcttttagagatctctttcttatcccacagtcccatcttgatttgtcttgggtgaaatgatggtgtagttacaaataacaatttcttctcaaatcatgatttaaaaaaacctgaatgggaattgattttctatattttcatgttgttagggatattttaaagttttaaagaaatcatactaaaacatccttccaaacaatttagcataggtttttttaacccctaccagattagcttggaacataattaaaatagaaaaccatctgacagtctaatgacagtctaatgactattgttaacaatattaacaactagaatatttaaggatttacatcaaaattttatctaagttgagaaaattcttttctgttgttttaatataaagatttctgttttagttaactataatgtagttaagaaccagcagggttctacattctgtggaaatatatacacatatgtgacatggtctcacataaaggagtaaaattagcaaagttttaattgtattgatgctgaaaacatttaatacagaaacttacataagcctcttacttaattttgacagcagattattttctactgttactccagttcatttctctagtcaaaaaacattgagtggaaaccttcctagttgctcaggtttaaagaaacagttggatcctgtttggaccttaatatcaaaaccacaaagataccaaaccaaccttacaacatgccctgcagttttaaacaaaagtctctctgtaaacagttacagcctcatcatgccttctcaaccaaggtaacttagttttccaaagtttccctgagtcttcaatgcagacttccagtcttgaagtaagatttctaagtaacacacaacatacttagggttaatataagaccaggtatttcaccatactcgaaagtttgaggtttaactgaagtttctaaccaagatgctaaaaaattccagggcaatcacatgaccttttgcacctggtgaaatatttttttgccatgtgaacttatttcccagtaaagcacagtccataacaccacagcatagtgtttagcaataaagtaatgaaataaacccaaacttcagtagcattcaggctgaaatccaagctaccttttccatgtaagggaccattcaggcagccctgtgcaaagtctccaatgtgctttgcaaaggcacactgtcccatgcctcatccatctgtcccttaccttctcttaggcagtcaaaacccagacacccatgttggagagaaccaccagagccaccaccttcaccgcagttagaggaaagcattccttgagaaggagttcattgatcaatatcaaagacaggctgggcaaatcagaccccagctgcagttaatcagtgtccacactgctaagagtttggagtaaagaagcacaggtcttgttctctgccttgcctctgtgaatctcaggggatacgtggggaggaaaagtggacttcctctgccaggctggtacatccaaactgtctaagcctttattttaatactaggatgtcaaatgggtgttcctgtgcacaagcagatcttatttccttggcataagatctctcatacacaactgatctaaccttgttggagagggttggaggagataattttataagaataaagttttgcaaactcttcactgtaagaagatcacggaggtgagaggatgaagatgaagaagatggagagggtaaagactgtgatttcaaaaaggttaactgggaaaagaattaacaaccctcccccaacctcaattgtttttagaatgtagaaacagaatctgttaaccctcgcttttgctccctcttcattcaagacaatggaaacttcttcggatacctgggctaagttaatggtaatttaccatactgagttgacagaatttaattttgccagtataaataatgtctccaaagcaaaattgcctcctttgttccccaaacaatttcagattccagtctcaactttggactgaacaaaaagaacgataccacgcaaaatctccccaaagtgtgttgatatatatcggctagcgtttgtttattcacataaaactcaatttcatcaaactcatcagacacagtgagtatcaccccagatcacacatgtggcgctctttcctcccatcctggcctcaacgactcaagtaaaacattcaggatcagccctttaagaccattctggctctatcccaccccaccataacagacaatgctgagcatgcattacagatactcttgtgcacgaatgcatatgtgtgcatttataatcgatgtgttcattaaaaatcctcactctgtccctggttggcagagccaccccagcgggcttacgtgctgcggttgtccggggtgttccgcaatagggataaggaacacatggttgtttccagagaatcagaaagtcaccccctgcagtgaatacccactcttagagaaagagcctgtccaactgtccgcggctcttcactcttccccgcctcgttcctgaggttattttttaatgacctctcccctcccccgccgccccgggtgcagtagacaggcaggggctcccgtgagccccggctgcggtgcgcgcacgctgcggcggcgttggcgcagaactgggccagccagtcgtgctcacccccgcgtcccgagctgggctgctggcggctctcagaggcgcttgggctccgggctgggctcctgcagcttctcggggccggccccctccaggcacaggtcctgcagcagccgctccccgcaccccaccagcctggcggcagcggcagcagctacagccgcactacccctcttcatacttctctgatggctccttttagtgctgtttgggaaaacgattttttctccctgccagaaacagatttcctacatttcatcagtcctcatagaccgagcggaagtaaaatgcttactttttttggtggacgcaaatgcagttgacactgatttacccttcaaacggggagagattgtattacaagcccttggcagcaattccgaggttggggccaagctccagccccctccttgtcccccagacactaacctaagagagaaaaggtgggggctggggaggggatcatatttaactctagaggtttaacagagtcaatagctttagcacaatattaaaattgggtgttggaaaagtttttgctttcctggccagtgattttgcagacggaggcacgagctttccagtaacttcggccactcttcattccaaattgaacattttgatgtcttacaattctctttaaatatcagatttttagaagaggctgtactcacggctgtttttgctttaccaaaggaaatacaattccacccttccttctttcagcctcagctcagcattatgttgaatgtcagagacaattgtctccaactgttgtttattagtacgtgtatt

SEQ ID NO: 914737 - DNA, 4001 bp, Homo sapiens
gtttcttctttgaggaaaaggaacgtctctgtattaccaatacatagcattgtttcttgaatgcagctggctctcaacaatcatctgttgaattcatctgcctctccagctatcaaatgttttgttcagcaattaatttattgattcattcatcattaattggttcatttagtcatcaatctaccccattggagaagaaagggggaatcagagttaaagaataattttttttaagtagctattttgttctagtaaaatgctagggaatttcacaagctactttcatttgatttatttctcattagagccatatgagttgggcatcaacctcatttttgcagaagaaagctcagagaggtaaaataattgattcaagatcacacagctaagaagtggcaggggcaggactagaacccagatctgtgtaagctcaaagccaaaatggaggttatcattatggagaaggtactgctttctctgaaggcaaagaagtctccctgtgttagttttgtccttttcaatacgtcctccacacaatcaaataatcattccaaaacacagctcagactacttcatcagcttaaagtctttggggattctttattcccaacatggcagaagtcaaattcttaaaaccacacaacattggacccatctccctctctagcttcttttcccctcacttcttcacattcatatcctctccttcatctaaaataaaccttgtatcagtctccaaactcattatgccctttgactactcctccaataccaattcttccaccatccccaattctctacctatccaattcttaatcacccatcaccttctaaaaggtggccctccccttggtatgtgcctgtgtacatgcgcatacagttacagcacttctctcactatattgagattgtgtgtgtacttatctttccccacagtagactgaattccttgagagcaggaaccatgcctgaagcacttgtattatccccagtgactagcatagaggccgaatatctgggcaggaaagatacagtggggacagaagaacattccttcctactgcagggaaacctcccatttcctacccctttccttgtgttccccacctcaggtataagaaattaatgacccaactggtctgattctgggaccctagttggaccatgtttacaaataagtaaaggtacatgattttgctcttctgttctcatttcagtgtgctgatcatttaatcacttataccatgtagctcaccaaagggttccaacatatggcttacaaatagaggccctaaaaaaggctagtccacgtgccaccactcagccttactagagttcttcctcagggaaaatcaccactagcttgaccaataataaaggagcaccttgtttctcacttgctgtttttttctcctgcgaagagaaattcacagaggagagcaaattacaattcaggcatccctgtaatccgtaaccaaaaatatctaattgcacccaaacatcactttttcttcaagattcactgaatgaataaatgcaaaagtgaattaatgaataaacataaaagaggtagtaaggaaaagtaaagaataaaagtgaaaaatgaagtgaaggaaagaaaatgaagaaagcaagtacatgtttcagtaagtttaacattggtgcaatacttttatggaagaaatggagccctagcatccccagtcctggagaccataaagagccctcatggggcccagcagtcagcctatgctccccgcatctgagaaaatgtggtccagctccttatcagtctgtacccaagtgcagcaacaaaatccaactttagttttttcccattgtctgaatttccagaggcaactatagcagccagtaaggaaggtgacaaagcatttgtggttgaagatgcgtggaatccatggattaagcttttttggtttttctgtcttattcctcttgtgctcaatcctgttgaccttcttaaacatgattcaccctttagctggaaagacaaataaaataatcaggatctagtgtcgctccccttaatgtaccttatcccaccattctacagaaaattttatcaaagacagatggatttttaaaaaactgtttataatcaaaggtaatatactggatttggggcagaagaatagagtttcttcctacctttccctcccactaacttgttgagtgtttactgtgatcactgcatcactctaggtttagttttctcacctctaaagtgggacaatattccctgtcctcaccaactaataaatgctgaaagaatcaaattagataatatatgcaaacgtgcttctcaaattgcaatatgctgttgaaataacttgagacgttaaaggcacgggtgaggtacatgaaaataccatcgttgactaataagtgactcagacacacagctggctgctccttccctttctctcctctcccatatggaatcagttagggttagcttcaattatgaatgatggaatcttcaaaacaacaatggctgaaatgtgacaagtttatttttcctttgccaacaaaaaatatttcagagatagaacaaaatatgtagcatgtggcttcacaatggcactaagaacacaggcacctaccacaacctgcacctgtgtacatcatcaaggagcctgaggacaggccaacatcacctggcactactaccaccaccaatgcctacccacacatgccagctggggacctatagactgacccacccatcctattgctgtcactgctagcaccagtgcatgttacctgggagaccaaagattggccccctaacactactgccatcgctgataccacacatgctgcccagggctccaggtcccacccacctgccctgcacactgctaacactgccagtacccaagcaagccacctagagacctaaaaattggcccacctcgacctgctaacaccagtgcctgtgtacactggccaggggtccaaggacaggaacaatcggcctgccaccaccaccactggggcctgaggattggcctgcctgatttccccattcccagcaaagtctcaccacagcctgtgctaacaaccagagcctaaaccactgacaaaatcatagacaccactgatattgattacagccaaagaaatcccagggagactatactactgcatgaacccagaataaaaactaaagtgccccacccaaccaactctacagatacatctacaagaaaaaaaaatcttcccctatgaaagccaacccaaaaaattagaaaaggcaactgttacagcagatgtgcagatatcaacataaggacacaaaaaacatgaaaaagcaaggaaacatgacaacttcgaagtaatgtgataattatccagcaagagattccaatgtaaaagaaatgtgtgaaatgcctacaaataatttaaaataacaatattaaatatactcaatgagatacaagagaacacagataaataatacaaagaaatcagaaaaacaattcaaaatccgaatgagataattcaataaggagatattagttcagaacctgaagacaagtcatttgaaataacccagtaaggtgaaagaaacagaaggaggggaggggaggggagggaagcgggagagagaaagaaagagaaggaaaagtggaaggaaggaagcctggctgggcactgtggctcacacccagcactttgggaggccaaggtggatggatcatttgaggtcaggagttcgagaccagcttggccaacatgatgaaaactcgtctctaataaaaaatacaaaaattagctgggcttggtagtgcacatctgtaatcccaagtacttgggaggctgaggcaggagaatcacttgaacctggaaggcggaggttgcagtgagccaagatcgcaccactgcactccagcctaggtgacagagcaatactccatctcaaaaaagaggggaggggaggggaaaaggagggaagacggaaagagacagagagagaa

SEQ ID NO: 914738 - DNA, 4001 bp, Homo sapiens
gcctgccataacctattttaaagtggcacttggaaccatggatgcatcaagaggtcacaagtgactctgcaaccctcctctgcttcactctaggttccaggctctctccacgtcatgaaaggagatcacaggtgtgaaattatttcatcaaagagctttgtttagacatagagattattgcgaggatttgaagccccagacagaggtctggggtagagggaatcccaagcccctcagtcaccttgtcttttgggatcccctaacccttccacccccagggattgagcttcagacttccacagacctctcaccacgctcctccaccttccaggggctttccaaggtggtttccccttgactccagggagttgggcatctctagggttaactaggcctagccaaggccacagggcccagaccaaggccatatcccctccccgtccccacacagaataagagcccacagagtccatgccaagggctctttcacaacacccctctccctacatgccttgggggcagcagaagcatcccctgcctgggaataaagacacctgggactgtgccccagccctgggagcccccagccttgagaccttgagcaggtcccttccttcctgggcagaggtatcctgcaggttcccctgcccagaagaaaatgaggttggaccttccatttgggccaaaggcaatgcggttgcaggcattcctcggggccccagcaaccaaccacactaattctcaccacagcctcatacatggtcgcccagatctcacatcagcgatagggaaagccccagccacctatccagaagatcctaactggggaggagtgtgcataccttgaaggatgctcaggaaggttttctcaagtctacttgtggctcaaggactcactggctttaggatcggacaactggcactcccttcgggtgggcctcagtgtccccattagtaatgtgagggaggtgagtcacgtgagccacatctccagccaccccagaggggctacatctccagctctgacagacccttacttggggatctctgcagtgaattcaccaacagataagcacgtctcaggacctccagagtgtcttagagaccctggagtctgacacacaagggccaggagctgctgctctcacatcctgggcccacagggagagaagctttggaactgggaagcttcccacctctaccctcaactctgagtcacctttcctcgcgggtgacatggccagggagcgggaggcaagaagaagccacttcctcagctttagcatcagcgctcaagtgctctgcctcttccccctctatcctctcccgcttccccagtctcctccccgcagtgaaaggaggtcactcagccccgttaagcctcagtttctccatctgcaagcgccgataataatacacaacacctatttcaggagtagcagtgaggcttaggcggggcggggcggggcagggcgcgaacccgcacacaatgggcgctcaataagtacccgttttctttctttcccctccccttcccgcgccccctcccagccagttccagcctctgcttgtttcccctgacactccctccgctggcccccgcgctgccgcgatggggtcggggaccgctcctgccgcgcatccggggctctcacctgcagccttggctctcgcaggccgccgggacagaaggggacccctgtgttatcttcggggcaggcgctgaacccctcacctgaggcgggacgaaggtgacagcctgggctcgcggcaccagcccggcggttcggtccgactgtcctgcccgcctaggacccctcaccgagcgcacgacccggccagggcttcccgggcgctcgcgctgttccaagctgttccaactgaaggttggggtctcgtgaagccagaggctgggggggtccggggtcccgtgcaccggaggcgagggcctggggccacactgcgctagccctggagctggggttccgaccctcactgacggaaaggcgcggagcgaccctgcaaccacggaccggtacggcggcgttaggagcgtcccgtcccggcgcagcgggtcagggccggggctccgcgcgtcccggccgcacgccccgaaccgcggggctgggacgggcagggcagggcaggcgccggcggggaggcgcggcggccggagccccgcggggaagtctttccaggtcccgactcggctctctctgcaaaacggggcgaacctcggcgcggcggccgactcccgagctcccggccgcggctccacttcctcctcttcccctgctccctcgccgctcgctcagcgccgcgccgctgccacctccgctgtcatccccgccacccacccccaccggagccgcagcccgagctcagccgaaacagcgccgcccagcgccccagcgccagcctgcgcggccccgcccggacggggcggagtcagcagagaccccgcccccggccggctgcgggcaggggcggggtgcgcgccctctccccttcccgggcctcgcgcgtggggccgcaggagccaatccgagggtgggagcggagcggcgccctgcggaaagcggattctacctcggagagggcggggcggacaatggagaggtgcggctgcaagaggacaatggcggggctgggggttcggaacgggccgaatcggggagggggttggcctcgggacccggaaggagggagaggcgagagggctggcttgcctgggacgggggcatggggactgctgtgcggggattgcgggggtcacggggaaggagcaggggccagtgtaggaaaagaagccggggcgaggcaaggtggaggatatccggggtcaggggtcccagggacgctggagcgagccctcctgagtggtgggatgccaccgacaccttgcttctccctagcttctagtgctcggcgctcagaggtgagagttgggctgggaagtgttcagatttcaggaaacggtgaaaaataagtttttggaaatgagcgaatttgtcttccacaagcctcccttccctgcgcccatccccgaggaggagcgtcgtggtcaattttaaaaatacgaactcaagagcagagttgtgtgaggacacacacttcgaatcgtgatgcatctgcagtccgctcccgccccttcccaccccgcgcgttgggtgcaggagccgtctttattttctatttcattttattttgagacagggtcccgctctgtggcccaggctggagtgcagtggcactatcacggctcactgcagcctcgaacttccaggctaaagagatcctcccacctgtgcctccggagtagctgtgactacaggcgtgcaccaccacatctggctaatttttaaattttttgtagagacagggtctccctatgttttccaggctggtctcgatctcctgggttccggcgatcctcctgcctcgacctcccaaagtgctgagattataggtgtgagccctgtgcttggccaaggagccgtcttcagtgtgtgcacaggaccaggcgcagagaaggtgttggagggaactgatgtatgaatgaaagttgaatgtgtgccgcgggggagtggggtagggaccatgtgaaagccgctaactggcctggggagctaagggatgttggtggcacagtacagtctctttgtaaacctcacaccaaccttatgttgtgataggtaccccatttcacagatgaggactcagcacagagaggctaagtgacgttcccgagaccacacagctggcacagagttctatccacccatcattatcaaattctagggtaaagctgtgtggctttaacaggttactctccctctctgagcctctgtttcctcatctataaaagaagaataaaggtgctacttggcagggaaccaggtgagggactgggcaggcagcaggcttcagagggtgaagcatgggcattccctgcaaaagaaatggcatcagactatggctgagagactggttggaagaac

SEQ ID NO: 914739 - DNA, 4001 bp, Homo sapiens
gagattttattattattatcattgctattagtagtagtagggttattgttactacaatcatctgcaaggtgaggctgagcagtatccagtgacttgtctcagatcccagagttatgacgtggcagagccagaaccagaaggctgctctttcgacgtctagtccagagctctccctgctttactgacctcctccatgaatgctctgacttcacacatgtttctttccaggtaccttccaggtatgtaaggaaaggtgtttgggtagtttatttacagtcagaggcagcattggggtgggaaggacgctgagttggaatctggaggtggtatgtgatgtgtgagattcagggagagtgcgagcggctcagatgtctcaccgttgttgtcgctggacatgagctggtaagtcaggagcttctgggccttcaagttgtaggctccggccagattcatggcaatcaggatgctggggtttgggtaggctgatgaagtcaccgagttctccatgagtacttgtattccattgaccaagggctcctgtgctgagggaacggctgagaagaggaaagccatttactcaccttctaaccctcattccttctcaaaaacattatccccgtgtctttgatgctttttctttctttcttttttttttgagacagtgttactcttgttgcccaggctagagtgcaatggcacgatctcggctcactgcaaactctgcctcccaggttcaagtgattctcctgcctcagcttcctgagtagctgggattacaggtgtgcaccaccacgccaggctaatttttgtatttttagtagagatggggtttcaccatgttggccagggtagtctcgaatttctgacctcaggtaatccacccttcttggcctcccaaagtgctgggattacaggcgtgagccacctcgcctggccatctttgatgccttttaggagaacacttgattagcattagtgtcctaagtcactaaagagaaatggagaaaatggtgagattttacttttgaggacaattagtttctacatcttctcaaataatccatatccttaagaaagtgatttttaaatttagtaacttcaagcaatatggctcatgacatttctcatagtttctatcactttcctggaaatcactgatttccttgcattcatttttttccttactctttcatgaagagtattaaagatttgggatataatttatcctcagtgagtaccaaaatctctcactagtatgtagtggtgtctggtcacaatagccactgagtgtctgtctttgtaccatcaaccattattcctgcagtagtacttccatctctattatttttatttattgattttttgagacagggtgctgctgtgtcatctaggctggagtgcagtggtgtgattatagctcactgcagcctcgacctcctgggctcaagcgattctcctacctcagctttctgagtagctgggaccacaggtgcatgccactgcgcccagctaattttttatttttatttatttattttttttgtagagatggagtctcaccatgttgcccaggctggtcttgaactcttgggctcaagcaatcctcctgcttcagtctcccaaagtgctgggattacaggtgtgagccactgcacctggccccatctctcttaataaaaaacatatagacttgtctctcaaagaacttatgctattaagtcaggaaggatgaacagcacacaatcacactcagacttacccattttggaattcctatagtgattgctattttcaaccactcagtgtcagaggtcacagccccttccccagggcaactgcttccctgacctccttggaaaaacatcatactcacagcatgaactctgggtctgggtactagtcccagctgtagcccagagaaggctcaggaggtagagggcaaaccaggccatctcactctctcgtctatgtctctcatccacaggtaccgcgatttgcaagtggaatatttctttaccttctcttatatgtgcttccctttgttaaataatctgtccccaacccagcctctcctaactgcccctgtgctgacctctcctttcctgatacaagtaagtaaattttcatttgcttatctaagtttaccgactatagaccctccaaggtgtctgaaggtgacttctaggttgcacagtcatatgagaaacctggggctgggtatgcagtgaaggcaatgttgagaaaatgtcctttaccaaaggcctgggtcagacatcaggaagtttggataatgtgctagtatcaacaagacctcttctagcccttattgtatccaatcagttaccaggctgctttttagtaactacttcactgggatttaggccattcataggcatcagctcattttatgatcctagacacctgctttacaacatgtccttttaggctctcaggcagggatctgccaggtgacatctggctttgtgaaattaatgatgtctacctggacctggattctagcctagactctttgaagttgtttgactttaggcaagaaatggacctcggtttcccagaaatggttttgtttgatttctctttccttatctggagataaaagccatctcaaacacccaaagctttcagatattatcttttaaagtaagtaattagaaaatgtgagatccattaagaatacatatttcagatgtgtagctacattataatgcaaattatacttctttataagggagaactgaaaatggtatgttgaaattataaagaaaggagttttgtttgtttttttcctgcatgtaaagtagctcattttaaggggatattctccagtggcgcccatcttagcataaaagtcaaagcccttttcatgacctataagaccttagaagatctggctcctggtttcctttctgacctcagctccaggcgttttcccctttgctcacaccgctcccatcacacagaacttcttgtgccccttgaacacatcagctacctttgcacatgatgtccccctcagcccaggaccctcttcttttaaatagcctcatggtggcttcctcacatccttcatgtctctgctcagaggtaagcttttagagacgccttcccaggccaccctacataagatcctacatcctcacctccactgacacccctcatgcccctcgcctgctataactcattgccctctgtcgcactaagtgtgtggttgtttatcgtttgtttatctccctactagaatgtctgctccacgagggaggggctttgtctctttggctcactgctctatccttagcccttacaacactacctagctcacagtagaaataaaatactttttgaatgagtgaattaatgagcaaatgtaagacatgggtaataaagcattttttcccccttgggaaacatgggtgagttttgtgagatgagagcacagggtacatactggggtgtgctggacaacttctaacatggccctgtgttttcacctcccggtattcatgccttgtgtagtcctcttccctagagtgtgggctggcctggggccacattctattataatgaatataatgcagcaaaggtgatgggatgtggttgcaaaagaccgatttccctcttgcttgccttctctctcttgcccttcctgctctcatgaaggcagctgctaagtgtgagctgccttatggagaagcccacatatggcccctgagagtagcctccagccgatattcagggagaaaagaacccttccccagtgagctttgagatgaaggcagccccagctgacatcttgattgcagccctgggagagaccctcctaagccagaggacccatgtaaaccctccctggactcctgacccacagaaactgtgggataataaatgttgtcttaggcccctaagttttaaagtcacttgttatgcagcaatatatatccaatacatggtacatggtggaagatgaggctggaaagacagtt

SEQ ID NO: 914740 - DNA, 4001 bp, Homo sapiens
ggagaggcaagaaaaacatccttcccaggcaggccaaactgttttcacagaatttggttgcagctctttattctctgttgccattccacctgctccaatggcccaagactgactcctagtgcggtcaccccacctaggtggggacacagttacctcacctcaaagaagctcaggcgtcttcccagctaggtcagctccctgccacctcacctctgtcccaccaaacaataacaaaccctcagcctccttcgcataccttttcctggggactttttgggtgtaccactcagcccatctcaagcccacagtgctgccccaaatagtgacctgcctgggtcccctgcacggactcctgtatccctgaccaacaacaggcctgcagccgctagcctttctcttggcagcttgcacgccttgctaccctgctgtatgcaggaggatctgctgccgctgctctgagtaattcttctggggtttgcgtaagccttgcacagggaggaaagctgagcatcccacaggagccagggccaatcttcagagaggaatggcttagagatcttaggcaggacagaaaacatcttgggaacaaccggagaagttaaatgcctgaagttttctgggccccagaatgagaagaaaatccgtccttctcccaaacaatatcatgacgtccccactatctcagaaacaagaatccagtcttgacaaggtgtaaacatagagtttgtcagtgtgttcttctggccacaaaggacttccagatatttatctccatcaaaaacttccctgtctcccaggggaagtgcagagaaactaagaacttagtttctctaagtaaaaaagaagcaaatgacaaagccgagcggcgtagggcctgccaccacttccaaccgttcagttcattcgatactgccggtcggcttcccactggaggttttgaatatggaaagtgctgacctgaaagatagggtcagggctgtagaatccttaaaataagcacagtttagaaaaatgctgggctagggcacccagaaaactttttcacaggctgtgggtaaatcacagtatcactgaagccactcctttgccataaacaacatttggaaaagggggagaggaaagggtgagctggtaacaggtgaatggtgggaaagtggagagagacgacctatcagtcctactgtgcaaataaatcatggcccgggatcttggaggcccacggacactgttcttacgaccctgccaggccagctggctagaccatacctgccaggctgaagcgccggcctctgcggaataaggcgcctcccagaggcttgggaggaaaaggggggcctgggggaagggcagagggagctctccgcggagcagtggggacggggccgcgatggggtgcgtctgagagggctctgacggctggagggctgcgggcgtccacggggggcagagcccggcgtcacaggcgcggcggggtgggcggctcggggcacagacgccggctcccgagggcacgccgggtgtcgcccagaggcctggatcgcgcggcaggagtagagtgcctgcagccgcaggggaactcgggggtattggggagctcccagaaagaagcagctggggctgctccccccgggaactcgggattcgcgggtcgcgggaggagagaacccgaggtgcggagggctggggaatgtggggtccggcaggtgctgcgcgaagctctctctcacctgcggagcaccaggaagcccaagacgaccagcagcaggagtcccagcgtgcgggccggcctccgccggaggctccacgtggtcatcgcgtgttctctaagcgcggggacccgggttcccactccagtccgcactcagccgcgcgcgggagcctcgccgcggggggcggagccgcgcactggtcgcctgggcaaccggcccgccggcgctcattggctggggctcgcggctccgcgcctgcagccctaggcctcgcgcaagcgggggcggggctggccggggccggggcggggcctctgtcggggggggggcggggcggggctggtgggcggggacgaggtctcggtaggagagggggctggcgggggcggggctggcggggcggggccccggccgggggcggggcggggacaaggtctcggtaggggacgggtctggccggggcgggtccccagtgtcgtggagcggtgcagagtccgccgtctttctgctcgcgaggcgcaggcgggtgcgggaatgctgcgtacctgtcaaacgccgaggtaaagtcgcccctcgcagcgctacatcaggaagaacgtacaaaaggcgtccgcaaagcaggggcaaccaacagaatcttttaaaacaattcagattctgaagcaaacaactttttcaataacaaatcatcctgtgaaaagccaggattttgaagaattgtatctggacacatttcagtgtggttcatgtctgaggagggggggttccaaatattttctgtctttggtttctgcgagtcttactctggccttgactccaagggcttccaattttttattttaaaaaggtccatataaaactctcacattttaggaaaggaagaatatcattcttattctgaaacagaatgtatgtcccaaagaacatgatgtagtatttcggtgcaacttacactgtagcaatcacaaacccaactcctcccgggaacaaaattcagattttactgaaagaaactcgaggaagggcaacgttttccagagcatccgggtttgtcgaatgtctcccttgccgcatgctttgaattcatttcctaaacgggggcatagttttgaacttgtaaagccgacaggaaccaaatgaaattgcagatcttggaacaaagacacagacttgggtatgaagtgtcctttgtctagcgttaagcacatatttagtcaaggagcaaaagttaaatcaaagagaggcaaaaacaaacgaacaaacaagaggaaaaaaaccctggcagaactggggaggataagctgggcttggagcaatccgggtctgacttaagcaccgcaaacattcccagaggcgcgcagagggaggcccactcccgtggacgcgctccaagcccgctccttttctccattgggtaaggctatgattgcttgatggctatgaagtctgtgatggaaacatgttggtttaattggaatataccagctagccccgaagcgtgtggagaaattgtcaaaggctagcccctttgcctgcaggggaccatccgaaagacatgcaccccacattcatcctctcacttctggtcacgttgaacagtggcagaatctatcaaatataagggaattctcaaatggtttaagcaatacaagcatctccatttttcttcaaacgttagcaaaaacttaacatgggttgtgaaaaccgtgaactccttggcccacccttgtatccttcgtttttatttgtgcgagaaaaatatacataactgagtgttttcaaaaaaatttccccttaaccttgtgggatgttcagaactagggacacaccctgctcacagtctaggaacaattttactttatctgggcttaatgataccacagaatgctacaaagttagcactaacccgagatgcgtcttgctcataggctgagacttttttttttttttttgagacagagtctcactctgttacccaggctggagtgcagtggtgcaatctcagctcactgcaatgcctcccgggatgcaagctattctcctgcctcagtctcccgaataggtgggactgcaggcacccaccaccttccccggctaatttttgtatttttagtagagacggggtttcaccatgttgcccaggcagatctcaaactcttgacctcaggtgatccacctgcctcggcctcccaaagggctgggattacaggcgtgagtcaccatttccagcctgagacttttgttttttaaaacattaggccgggtgcggtggctcaagcctgaatcccagca

SEQ ID NO: 914741 - DNA, 4001 bp, Homo sapiens
gccagagaagtagaagctgccgtgagctaagatcgggccactgcactccagcctgagcaacaaacagaacaacaaactgtgtctcaaaaaaaaaaatttttttttgttttaaaaacatgcatgtatctgtaagtacatatttatctgtaagtgtgccttaagcttatgtcattaaactgagtgctcccaagggcgcctggtgttccttcattagacagacagaatcctgaggaaataacctcctcccttgagattctcccactaacccctatccaagtctttgatcacagagcaaactcagcatgagactaagtgacagctggacgcttaagcattaaatgtatgtgctggaaacgactgtgcggaaggtaagtcctcacgctgggcccccaaaatcggaggctcaggttcccggccaggatgcacttgtagggtaacgagatcctggaggtgaggggccggcactcacgtggtgacagtattgaagccacaggccttcagcttcagcaggcggtccctccagtactccctgggcacccggaaatagtggatggagcccccgaagatcaggaacttgtggccctccagtgtgaagtggggcttaccccgacctgtgctttcagttccaagtcccacagatcgattcttcagctccagaggggtcagatgagaccaattaaacctggagggggcgggcgagggaaagaaagtggaaagggagagaggattcgggagagggctcggaggcacggctgaaaccctagcgaaaagaagtttttgttagtaggacgtgttctgtgcatatgttagtaggacgtgttctgtgcatatgttagtaggacgtgttctgtgcatattcgcgatactattttctccaagaaaggagagatcgctcccctccctccccagggatgtagctctcaagcaaacctaggctgggacggatgcgctcttccaagcatgaagttctcttcctgcttaaaccgaggagcaaaacctgatgagataaatggcaggaaaaagatgcccgccattctcttccaggagagacacgggctgaaaggagaaaggacaacagtgacaaggggaaggttccggccccaccgggctgcaagggccgggaagctgtgccgggggcgctttagaggccagagccagggagggggcccgcgacacaggcgggtcttccaggcgggcccagggccaggacagcgcggcatcacccggccagtcctctgcagccaggatgaaggccggggacagacgttcagtcctagaccctccagacagggctgggcagtgccggtgggtgcctgggagaggcggaggcgggcgcacttccagcaccaggttcgggaaggacacggtgcccagccgctggagcccctggcctgcgtgccccaccctgattttctggcatctggtgaacggcccctccgcagggtgggggtagccaggggatctgccgaggaaagctggggacagcgggcttggtggcgcggcccggcgcggcgcgtgcctggggcgcgtggccggccacagaacccggggagggtggaggctcccgggcacgcgccggggtggtgggcagcccgggacggcagcggcgatccgtcacctgaggaggggcggggacttcatcgcggccaggccgaggcgccgagggtcccttgcggcttccgcccctctccgctggccccgacgccgcgctcgggccgggactcgagccccggttccgcggggcaggctcaggtctgcgcgctgcgcctgcagccgaggcagaaatccgtcccgaggcgcgggcgccgggtccgggtcccaaggatgcgcgtcgggctccctcccgcggggacagccgagctccgccggcgctccaggtgttcccgcagtgcgtccgggcgcggacgcctctctgccctcggaggggaagcgggagggcccttggggtaacgccccgacctcgggcttcctaacctgggtcgacagccggctggcacagggaggcctgcgcgggagaggggcggagagagcgcagcgcggggcacagcgggcggtctccgtgccgcgcgcgcgactggaaacggcgtgcagatcctaaaacgagggttccacagagggccacgaggggcaggagagagtccccggagaactctagctccccgacacggctacctcttggcaaacgagcgagaattggggcgcagagccttgggagggccgttccctcggcgggagcggcccgagcacagcctcacagcagatgcgagcgcggcgggcgctttggtgacgaagtagcgggacctgcaggaggcagaggcctggtggggccgtggacgccacgccgagctgcccagacccttccagaagacagtggggactattcaacggtttccagcagaaactaagccaggtgttcgttttacggagattgctcggctgcagggtggaggctggatgagaacaggcgtcctctcaggtaggcgctcgtggtggtaacgctgcccaggaggagggcacgggttccgggaagacttgcgaggttaaaccggcagctccggagaactgagcgcaagaggtcggtgacacagagaggagtccgggaggccgcatgtttcaggctgaagtcacttggcggggacgtttattgagatgcgaaacacaggaagggatagaggctgcgcagagggaaaaggcgatggactcggttttggaaacgctgatgtgaagtccctacgatgaaaaaagaaatcttccgatttctccctttgaagtctttgcttcttccgttgcaaagaacacagcctatgacatcaggttgaaaccaagaatgtagttctctgaaaatactgtgtgtgggggagggagtttatcttgtctcattccttacaaggatactttgctctccgacaccttagctccctgaaagtttcctagatcgtccatcttttcctcattttttcgactgcaagcaatgaactgttaattttttacagtttggttttacagccacacactttattcttctttgtcaagtttaaagtattctagggcttgtgccttcccacataaaatttagaataaacttgtctgtttctacaaaaagccatgttggtatttcgagaggaattgcaatcaacctatggatcaaattgagaattgtatccttattatgttgaatcttccaacccacgaacatggtatgtctgtctatttaaatagttttttttttttcacttctttcatcagaattgtgtgattttttcaacatcagatcctatcacgttttgttaggtttatacttaaatatttcctttgctctcaagagatttaaactgttattatttttatttcagtttttacatgtttgttgttagcatacagaaatgtgattgtgtttctcatgttgatctcatatcctgtgaccttggcaaactcacctattaattttaagaggttatttgtgtattacttggcattttccatgtagataatcatgtcatctgcaaatatggagagttttatttctacctttccagtctgcgtggctttttattcctttttttgtgtgtcttagtatgatgactaaaatttctgtgttgaataagagcggcaggaactgacactgttaccttgtccccagtgtcagctggaaaacattctgtttttcactattaagtatgatgacagctataggttttgtgtacatattctctatcaagttgaaagagtttgacagctgggcctgcagtcactagaaatgctgtggtgctttattggaacaagctatgtatcaagaattgtgattttctgcaggcgttgctggaggaattttgacaaaggtagaagaatcaaataatggattattggttcatttgaaagatgacatatcctgtgtccttttgccatctggggctcccctctgctgatggagtatttgagaacctctatgaaggagccctggagagtgaaagttcccccagatttctgtgctcattaaacct

SEQ ID NO: 914742 - DNA, 4001 bp, Homo sapiens
taacaaagaggtatggctctcatgcttggttggggtaaactgaaagctactgacactgaggttcttccaagaaatctgacacaataatggtagctggcagcactgggcaatgagtagcattcccgggcataaacttcagaatctttgatcctggtccagttattacagaaatggaaattaatctaaagaaaacaatttaaaagaagaaaacaactctaggctgagcatggtggcttgcacctgtaattccagcactttcagaggccaaggagggaggattaattgagggcaaaagcttgagaccagcctggtcaacacagcaagaccccaatctctacaaaaataaaaattagttgggtatggtgacacacacctgtagccctagctactcaagaggctaaggtgggacgattctaatagttttcatcatgccatgcaagtaatttgctgttttgtgtaagcagaaaaaaagaatacattctgcaaatcagacctcattcagatctttcccactaccttgcttttactgcagctacttgaatgggaaggagaggaagattatgcctacataatctgaccacagtctcacagagtgagttttgttacaactcttccagaaatttctgagttgcagcttgtaatgcagaccttgtactaagttggcaaaaaattctgatgtcagttccagtggaatctaaccctggactcacttgagcccacagcaagttaaaggttacaatgagttatgttcataccactgcactccagtctgggtaacagagtgtctctaaatacaaaacaaaacaaaaactctaaacagaattttataaagtcacatgaacataagcaagtctgaacaaaatctctatgtgcctcaataggggaagataacataaaatatgttccaacagagtgatgcaaccctaaggcattaacataatgcctacagacataatatataatatgtatagacacatgggagagtgttcaaataaaatgagaaaatataggacacaaaacagttcacatacaacacataaagttcaaatttaagagagaacaaaggcaaacaggaataaataagtaaatggtggtagtactgttgtagattaaatctttagagtaaaatttgttttctgtataatttaaataaacaataaatcttgtctgtattcttgtcttattgatctacttatttcctctctcactttcagtgcaacaaacttcttagtagtagtgtaaggaaaaaactgcctcccttataatgtgaccaggattaaaaatagtaatttttctggtgtctccacacactcagtattctattcatccacctgcttccaagaagctctcagatctttctttattcatttattagtcgagagcacaaacttctaaggattttcatggtagctagcaaactgccattgacaaaatagttgtcagatatgtgtttcttaagtggaagttactccttttccttgagcatagttgtctgcatattctgagcataacacaatacgggcactttaatttgactcacttaagtggaagaggtgtcacaaagcaataattacattaaaaaaataaattttattgtggatatttaaagtatacaatatgatgttatgagagcatacagatagtgaaaacattaccattatgaagcaaattaatatatctattacttcacatagttacttattttttgtcgttgtttttatgtaaagagcagctaaactccactcatgtagcatggatcccatatacaatgcaattctattaactatagttctcatgttgtacattagatctctagacttgttcatcctatgtatctgatactttgtaatgagtcctcacctgaaaagctagtctctgcagatgtttccgggaagaaacgatgagcaacacccttctgggagatgaaatttctccctgatgcagccagttcagcagagtctcgcagagtaaattttgatacaccacctccagaaatttctgagctttggcttgtaatgtggaccttgtactaggctggcaaaagaatctggtgtcagttctagtggaattcagccctgcctctcacgggcccatgttgaagtaattggctctgcatggttgagaggctggctgtatgcccctgagcttctctttttaaaacatcacaatgctttttgtcctcacaggtcatggaaataccatgaaaaccaaagctgtgtgaaaccaacaggccagatactggaaggagggtcagattatgtaggcactaccctcacctctttcccattcaagtatctgtaatagaagcaaggcagtgggaaagatatgaatgatatctgatttgcagaatgcaataaaatagcaaattacttgcatggagtgatgaaagctgttagaatcttcctttttaaagacaagttgtgccccctcccatgcccattttgaagctgcagtgaaacattctgacaatgattcaatgtgagcacttcttagtctcacttttatagagaaggaccattgagatctcagcatggttgaactggttagatgttaagcccagagctttttcactccgaagtcctaattactatactttccacttgctcagaaaagaaaggagggttcacagcaaagataatttgagcctcaatttcactgtgtaaaacagccaagatggggagtttgacactctccaggtccttgttctcaccacctcattcccaggttagtaaatatctttattgtagaggaagcaacagacactctaatcagaggagcagggacacaagaggctaggttgagaaagagggacaaaaagtgtgtgtgtgttccttcacttaatggatcagcacagagcaagttttcacatatttttctctgtactgtctaggagccctgccactcctagaacattaattctccatcttttcccctgagattgaagtcattataaccttccattactctttcttcaaagcgactgagattgttctatcatttattaacccggtggatctcttgactccaatagggttcatatctcacaaaggatatatctaactgcaacaaaagagtggggtactcctttatcccaagcccagaaaccagacccctcctattctgtcactttagctcctacactcacacagccaggcaatagaccaggattcagtggtgtctctcaccctcaaatctttgactagagtctcttaacctccctgggctgttgccctagctgtaaaaagtgtgttgtactaggtaaccaaggatttttcttgcttttgtttgactctgtggttcttattcttactatgttatatgtgataacagacataaacctcacacattttgggatcagatacaagggaaaaggttcgggagctccagcatcagtcttagtattctaagtggtttttctctggggtctgaattgaagtgctagcaatgatgacagaggtagcatagcagagtggcttgcagcatgactacccccaaactaacaggctgacatcttgattgtacgacttacctattgtgtgaccttgagcaaatgatttcaccttttcttgcctccatttctgtatcaataaagggaattaaataattccccttaggaatctttgcagggtcttaaagaaaaattaagtggtcctcctgtgtcctttcttacctaagcagggcctatgcttaattggaattcaggatacttgattgcccatgccctcagatccctaatgaatttcagaacgtgactgattttgtagtttattcagatttttctcatcactactgtgggagcaatgctttttccagccttataaatcctaagtagcatcagaactaagattgtcttttcttaatttagatatgtatagtcataattgcttagacaacttcccgatatatggtaagcacatagaaatgctttatttagtaaataattatttaatacagtgcattatgcatatacaaatgcgtgcatgaaatatttagtgaatatt

SEQ ID NO: 914743 - DNA, 4001 bp, Homo sapiens
gctgttcctgtcagacctagaaaaaaacatcataatttggggggcattgagtacaataccaaaaagaagtttggctcagcaatagggaaaaattagctctataatatacgggtgaaacattacaaaaaaagaaaactgcaggccaatataaagataaatgcaagaactaacaggtaaataccagttatgcaaggttggtttaacttttgaaaattatatcactgtaataagccaattagaataattaaaatttctatatatacatagaatcatctcaatagacatagaagaagagtttggtaaagctgatatctatttctaataagaatatcagcaacctaggaataaaagggaacttcttaaatctcatgaagaacacttatgaaaaacttagaggtaacatcatacttaatgggataggactgaatgcattcccaagactagaaaaaagtcaagaatgtctgctctggcagattctattcaccattgtgctggattgttgggattcacacaggatggtggcagaagtattaaaggaaaatattagggaaagttatagggaatagtcacaaacctttttgaaaggttgaaaggttataaagcttgtaataattgaacaggctgaaggcagccatttcttaccttagagcattaggtcatagggtaaatactagggacaacacaggcttccccagttagatctgtttaccctacctccattaagtaacctttgagacagatggccctcttgggggtagtttgaccaaggatattgccccctaatggtatttactttaaaccagggtacctgagttttaatcattcctagaactactctcttaaccatgttaattatccacaagtgtgtttactcaaatcttctgttgttaattctacactaaataaactcctagagtctgagctactcagggcaagctgcagtgacaaacctcttttggtttacaggcggtcagacactcagcatgactggcaaaacagattatctgtgtgtcagtgtacattttattcatccgtcgtttgggtcagggtctgcgggcagacacaggtagctactgccctgttgtgagaagcaatacctcaattggtgccccatgtgaggagagctgtgtgaggacagtcaggggtctgcagaaacagaccttccgcagttggagccccttgtaaggcaagctatgaaggaagtgtaaggaccgctttcatgaggaaagctgcaaaggaagcctgaggaatgcgacgggcccccaggaaacaaaggtgaagaaaaaccgcgtggtcaagtcagtgagtaactagtaagtcattggtgcccactcaaggttaccaagttctggggaaagttggttcaagctgagatttcatcatgggacaacagttattagcacagcagaaacattatataaaagtattacaacagctgcttaaggctagtggagcttcagtttcacaggctcaattaaggcacctaatcatgcatgctagacaaattgctgtaatgcaaactgttaaatcccaaagtccatggttcccagaagaaggaacgctagacatagagctccgggaaacaagtggggagagatcttaaaaacatcagttgcaaaggcagcaagtcccagtaacagctttaacgttatgggctttaactagagcagccctggctcagtcacacacggaaaagcctaaaaaggggcaggaagaggaaacattacctgccttatcacctcgtcttccctgggccctaatcaccaggcggaattaacagagaggaaaaggaggtcttacctgagcttcctccaatagataagaaaaaaggcagaggatacactacagttatcagttcccgtcttaagcaggctgaattaaaagaagatctcttagcctgcccagtaacgcaaaattggcaaagcgatcagatacctaaagggttaaaaaagggcattagaagctagagctgcattgccaagcaagcagtgagaaaaaactaaaactccgcccacatggcagcagaggcaacgaagagctaagccaccattggagctagcctgcaggggaggggcgagaggcacatacaacaaagtcagcccaaggggaggctggggtccaccctggccaggaacagccaatgggtgcctgcgggagggagccagcacaggcaaaaagcagcgcttttacaagtgcaaagcagccaaagccccaggacgcacctgcctgactctctagctttgcagacagcccacagcaaaatttcctgtgctccttgtttacaagtgacatcccaaattataattctctgctaaaatttaagtaaaatgtaagaatttgaaaaacctcttttcagataatagccactgctgttatctctctcctacccccgaggtagctctacaaatccagtttaagtaaaacagtagcctctgaagggagagagattaaggagggcccatgaattaaagaataattaaaagttaggcatgtaaaaccacacattacccttagaggagaactttaaacctaattaaatgatatttgttcaattaaaaggtgaaaatattgtgcccttctcaaaaggtgaagaagagttatatgtaagtgtagccaaaacatgcatgaatgactgtcttaacccactgattacagatagtctttgattcatacttgctaaaagagtcccaaattaagttccccagttagtgagtcactgttttcaagactgttttccagattaaagtccataaacttggtcagcctgagaactccattgcaacatttaagctattctgcctgtggctttaagcacatggttaaaatatataatttaagtctctgcttctaaagatgctttcagattttctttttaaacttcacgttatttatttcagcttgccatcttaatgattaatgcagtcaattgctaagttatgactcgatatcatcaaaattcctttaagtaaaatgcaattcaaagccgtattgcaatcccccataccaaatgctttaacactgtttactgatgggtctggtaaacatggaagagcagtagtctaatagagaccacataatccaatcactggatctaggtttactggcactcaaagagctcaggttactctgtgtatttgttaaagaacttttacagcctcaattaagtttactctggtgcacactctgtgtactctttttctgacttcggcaattgctggaccaacgtacacatcctgtttttattacacatattcaagcccacagctcactgcctggcccattggcttatgtcaatgaacgagcagaccttcaggtgatgacatcactgctaggcctagccacccaatcgcatcaatttttccaccaaaattggagaaacttatctaaacaatttcaacttactcagaggctggctacaacaattatcctacaatgtccagattgccagctcacaggcacgtcccctccttcaacaagtgttaaccctagaggattggaacctaagcagttatggcaaacatattacacacatgcctaaatttggaaaactaagatatgtgtgtgtatccattgataataacactcatttaattaatgcacatgctctgcctgtagagtctactcaagatgtcattaaacatcttttaacttttgcatttataggatagcccacaaagattaaagctgataatggaccagcttatgccagctgacaatttcaacaattttatcacacgtggaatattcaacattccacaggcatcccatataactccaaaggtcaagcaatagtaaaaaatcagaaaaaggggaatataggtaaagaccctgcaacactactggcacaaaccttgtttacccataattttctaaattcagatgacaaatttcaatcagctgtagaaaaacactttgctaaaacctctcaaggcataaaaccagcagttttatggaaaaatgtgaacagtaataaatggtgtggtccaaataaattattaaca

SEQ ID NO: 914744 - DNA, 4001 bp, Homo sapiens
aaaaatcgttgtaaaggacacataacacaaaactaaccgtttaaccatttttaagcgtacaatgcagcggtattgtatacattcatggtgcttatccatttccagagcctttttgtcatcctaaatggcaactatacccatgaaatcacaattactcattccctctctccctagcccctggctaggggtatatatatatatacccctatatataatatatatattttatatatgtatataaaataacttttactttatttctctaggaatttgcctattctgggtacttcatatatcatggaatccgatgatattggtccatttgggtctggcttatttcacttagcataatgttttcaaggttcacatctgttgtattatgtatcagaatttcattccttaactaaaataatttttcataatatatggaaaataagtttaatgtccactaaagagaaattataaatttgtgaatgacagtctgtaaatatgagtagcacacagtcagtggtcactgtgaagactacagaaaagcaattataatgaataatgggtaaaaatatcaaaatatataacttttacatatgtacccaaattatgtttgcatgtggacaaggacttgaagggaataaataaacatgaaaattgtttttgggtggtgaaagtatgtgtgatttatttcttatttgagaattttagtttgtaccattgagatgtttttatttttatgcaagattgaaaaaaacatggaaggcaatggaaccatagttaaatatgagaattatgaaaacagaataaatgctatatatttttttcttttttccccacagtcccatcagctatcaagtttctttatttgtagggagaaggaaaaagctccccattcaccacaattctgtacatgcctcatcctgtcacccacagcagtcaacaaagagtgcaaggcagattattccaaaaagaatagcagttgacatccaatagtgccaaaactgtttttagtcaaagagactttactgagagccctcatttataaatgtacttggcattgttgtttaaatgcattggcattgttgttcatttggaatgttccactctaagtatctttagtaatgttttgccatttctgtaagacttggtatacagtcctaatgtataagccagaaggaactcagttttacagaaattaaggatcccatttttatctaaaatattgtctttattcttaggttctcttgatgaacttagccagtgatttttttcctacctaggcgcacaaaaaaaaaaaagaaaagaaaagaaacaaaggggtagaacacaaaaatccctgtgaattttcaaaagccaaattttataactcctgcaacattactgcttactaccagttcctttctgacccagtgagatgtaagaggcctctaactggatccaggccagttaattccaagatcaaatctgttcctagacccagtctgtttcctgttgtgactccaaacccagtttggatcagaaatttgctccaagcaactcagagagctcaaaacaccaacgtgtgaagctccaaaatgcgagagggagcttacctattatcctcagccactctgagagatcaatggacacaattggatcctgcaggtaccttccgtgttcacttcgcgctcctggggatactagaagctccacttcagatccttcttgtgacaccatctgataaaagaaaaacttcagctgaattaaacttaaaggagtttcattaagcaacaaacaatttgtgaatccggcagcctacaaaatcacagcagattcaccgaggctccgggggtgcctcgtggtcaaaatgaatttatagacaaaaaaggtaaagtgatgtacaggaaccagaaatcaggtacagaaacaaagagattggttacaactgggcgcttgccttatttgaacacagtttgaacattcagcagtctatgagtagttgaagtatggctgctgggattggccaacactggagtattgttacaggtgcacactactaaattaggttttcaattttgtctgatgattaagctacgttacagtttacccacaaggactcaaatgaagaagtacagagtccttctcaggctgtaattagtttgtttcaacagtttgtagcaaaatttattgaaaggattgtctatacatgctatctccaatccccctcctaacctcatctaattgggtttttgctgctaccattctactgaaacactttttaaaaccatcagggatctctgtgttattaaatccagtggtcaattattgcttctcatcttaatagatcatcctttaatggacttggtttccaagacaacacactctcttgttttttctttaactttactgactactttttctcagtctcctctgtggacccttctttcctccccagtttcttaattttggatcacttcagagttcccggtgatcccatctggtcccatagctttaaaatcaatctacctgccaatgactaatacatttaaattactactcaaattttttccaaactcaaggcatatgtatctaacggcctgtttgacatctcttggattccttccaatagccatctcaaactcattatgtctcaaatcaatcttcttatccaccctctccacccagcctacttcacctgtagtctttctcaacttagttgatggcaactccatttcttcacctgttcaaagaaaaattcttggagttattcttaagtatcttttcccctcccactttacatccaatccattatgacatcctgctaattctggctgggagaaaattcttcatggcctctcacatttctgtatgtcttatgagcagagacattgacagccttttctcctgactatcttttcaaggatgtttctaaagaggacagcttggaagctagagatattgctttcttctgaagcagagggtaggtctgcttactgatcagtataagaaagataatgtccccctctggagcaaagttcagacaggtttgcttgcagttcattataaaacatccaggtgacctaaattcagggttccttggcttcaacacacatctgttgcacttgcaacattaatctgcctttctgtatttcctctgtaggacttgtggagcaaggatgactgacacaaacacaaaaatcattctccctgttgaatgagtcataaaactctgtctttgacccagaaagcttgtgttatctgtcagcattcatgaaacattgccccaagtagggtaaacttttatatgcttcacagttcttagcagtcttttctggatggagaatgcctttagtcttccgtcaataacaaatgaggatgctccttttaaaacaaaagccagattttgtcatgtctttgtgcaactcctgcagcaactcccaatctcatttagagaaagaggtacaaattgtttataacagttctctaagttagactccagtcacctccctgacatctgtccagtcaggtcctagacctcactctctttggcctctctgcttcaggcacttggctgttctttttcttctgcctgcattctgttttcttattagacctataaaaactctattaccttctttaagtcttcacctaaaagccacctgctcaataaggcctcctttggccatcctattaaaaattactactcctcccctttgggtatatacccagtaatgggatggctataaatcatgctgctataaagacacatgcacacgtatgtttattgcggcactattcacaatagcaaagacttggaaccaacccaaatgtccagaaatgatagactggattaagaaaatgtggcacatatatacaccatggaatactatgcagccataaaaaatgacgagttcatgtcctttgtagggacatggatgaaactagaaatcatcattctcagtaaactatcacaaggacaaaaaaccaaacaccgcatgttctcactcatagatgggaattgaacaatgaga

SEQ ID NO: 914745 - DNA, 4001 bp, Homo sapiens
ctgtgatggaaaggtgtccagtctggggtgggttcctgccttgtgctctgagctaccaggacaggcttcagtcacttgctcccctgaactggaaaaagccagttgaaaaatgaatgaatgaatgaatgaatgaatgaaacattcataataaaacaaaaattcatgaagtctatgataatcatacaaatgaatgacaataaacaatgctgtgccaaaggactcagtgaggccaccatatttgtgattgaattttaacttcatagaggcaagaggtgctccttacaacttttgctttgcaaacatttatttctcaatttaacccaccactactgtgaccaccatcacacagactcaccaaaaattaggtaaataattatcttgtttttattaatatttattaaatgtatacgcagtttccatttagttcattgttttatattagaagtgtttgggttctttatttataagtttggtgatgtttttgtgaccagaaatatgctgtaggaacttaactcttctttatactaattagcttatggtaaaattaattttgttatatgttgtttcatttgaaattgcagtttccaagaacctattgacaatgttaagtgaggactaattttatatgggagtacacagggttagaaaaaaagagcagagagttggcaagttatttttgaatgtctgtttcctggaagaggtaaaattttttcctatttccaaaatcactttttagcagtaagtgggtgagggagtatgccaagaaagtgtcgagaaaaagaagtaggattttatgggaaacagttagggtttaaatggcttttgatgttaatgggagaaagagtggactagaattagcaaggactagcaagcatgcttaggataatgtaaagatggacactatgatttggaagtgttactcaacaatatattgagctcagctccctgagagtagaagcagagaagacaaattaaaacaaaccaaggttggttttttcagggctggtgtagcaaaaaagataaggtacaaagcatttgaatatatagaaatgagagattgaaacttacaaactgtagcatccaggagagagaagagaaaaagtaaagtaggttggagaccaataaagtaagaaaatatagaaaaagccatggaagaaagtacttgatgaagtcaaagaatagcaatgttaatagacagggaaaaatgtacttaaaaataggagattgggatcagatattagactattagaggttaagatgtcagaggcactcagaggtagatcagtttgggatgtagggctgttggcttcaactccaagtcaacagagtaggagccaagaagggaatgggagtttcaggtaccacagacatgaataggatgtagcagaagtttgttggagagaaacattaggataccagttgccaaatgtttcaatgaatggagagaaatttggcagagggcaacagaaaagcattgttttattctagccacatgacacagaaggaagaaggaagatttttctatgcaaataaaccactaatactttagaagcaggattggaggcaaggagaatattgattttttttttctgctaacagtattactatggagatctagagggtgtcagagaaaggtacaagcatattgataacttataattcaaggaaagcatttggacattttacaaattcaaaaggatacgcactggctttttctgaagtatttccagtttcaggtacctaaaaggttttgaagaattcattctcaacattgagaccctggggagtgctctttccaagggtttgcaggggaaaagaaataaattaacaaatacaaatgatttagaacaagaatccaaattaattgaactgccaagataaaaaggctgttctaaataattctgcttacctgaagtttctttgtagacctgtaggcacactgcctgctgcagtttctcagtatggcaatggaaaggtttctgtagctaatactctacggactgaaacacaataaaattcaactgactcacgttgtcactgttaagcataaagcttcaggaagttatgggttcctgtagattaaaccagacgttctgtccatagacaagaaatcacaggctttgtagaccagaggaggactgagaatatgttccatattgagcagcttctacaattctaagaagttttactcaagaagcttttgatttatatataacctcttgtagctgaaaggctattctagaacaatattaagtcaattttccattgttggcaaaaatagcacagctgcagccttatttaaatgatgtcagtagagcaaacaaagagttggaaagtttgatttcaatgcaaaatacttggcttaatactttcaaccatttgtggcttggaaaaagccaaaaatgcctcaaggaagttactgtaataatgagaactcagtttcatataccttgtcctctggttgtctaaagtggagcaacagggaggggcattgtaagtttaagaagaaaaatcaattactggagaaaagtttcagggggactggaattagctttgtagtggaatagagacaaacattgtttttcaaagtgtgttcctcacaccacctccttcaagatcaattaggcttgtttgttaacaatacaagaacttttccagatcaggtaaatcagaggctcccagagtgcctggcaatctgtatgttataaaaagctatctaaaagaatctgatcaacattacattttgaagacattgagattaaaacatgggaaaatataagttataaaatttttatactgggtgcagtggctcacatcggtaataccaactacttgggaagctcaggcaggagggtcgcttgagggcaaaaacttgatacaagccagggcgacctaataaaaccccagtctttaaaattttggtttttaattagccagatgtagtggcatgtgtctatagtcccaactactcagcagactgagatggaaagattacgtgagcccagaaacttgagatcgcagtaagctatttcaccactgcacttcagcctggggaacagggtgagatactatctctaattaaaaaaaaattcacccactttctggaagtgaaagaaacttcacaaattgtaatcatttatagcatgagaaaagcaagagttatttttacacaaataaggaagctgttgctgagaaaaaaataaatgtcttcccccaggtcacaaaactaaccagtggcaatgtctggaacatgaggccaaatatcgaattattttaatgacactatgattccatagagagtgattctctacccttaggcagtttatatcttcttacaaacctaaatcatctactccagatgacatataaaaattatcagtgataatttaatactatctacacattcttgctatgtaaggcattgagttttatagttttagttactctactttttgaaccaaaagtggttcacataatctatcaaagaattttacatattcataattgtaaacgattattttgttaaatacatatcaaagtttatagagttatacagtaaactaatcatcctttttaaaaaatggtccatttcaactagtcaatacatatgttttattccataattgacagcaaactgtggatagttgagagaacacatattttttttctatactgagtattacttaagtaatttcttgagccattaaattttttttatatagtttataatggggaggagaagcaaagcaagtggcagaatagaaggctccactaatcatttccccataccccacaaggcaccaacttaacaactacacagaaaaaaataccttcatgagagccaaaaatcaagtgagcactcatagtacctggttttgacttcatatccctgaaagaggcactgaagagacagtaaaaaacagtcttgaatcaccaatccccatccctcccaacctcagtagcagtagtgtggtgcacagtatatctctgggcacgggggt

SEQ ID NO: 914746 - DNA, 4001 bp, Homo sapiens
gagtggctgtgggcgcagccatcttaggtataaaatcggctccagtcgcggtaactgaagccaagctccgcccctaccctcctaagagttcctctgctgtacgactgcactcccgcaccctcccctaaatcccccctcttcggcctgtttaccttttaacttggcttcgttgcacgtttgtgtgtgtgtgtttgctcttcgcagcctcttgagcgtcttttgtacttaattcttacactgtggacgctctctcgcgcccgccatcccccgacccctctgatctccgatccttgacgatgtctagcctgcattgattggcccttttccctgggtatggcagatctattgcttgatgatcctctccccccaagaattctaacacaggagctgtcctgaggctctggatgactttattcttcaaatggctttaccctcccagtagctccaggtgagactgagagcaagaacctggcccatccctctccattgtctgagcaggtcaccgagggaagcgggcaggacgcgctggcagagtctgacggggccctgctgtgggtggagcaaagggtgcctcatatctctggggtgcttggggtcggccacaaaggtggtaggaaatggggtcgacagataggtgagggtgggccttgtgcttcagataacctcacatggtcaggcaagggttagggatgggatgcaaggagcctaaggggctcacaacaattactgacctaaggaagggcccaggagagggaaaagggaggagttgtgagaagggacaggggagctcagaggagagcacagaagaacttcttctcccggaaggggttctccgaagtgggcacaggggtgatgaggggatcctcacaggcgtgggcatcacagtaagtcatcaggtctgctgctgccttggacacctgggacacagccaggaagggtattgttagccaggacctctgaaggggactgcagcctccctccccaaatgggttctcttttgccatctccagggctccttacgacttgtcttctccctcatcccccccagaggcctggggacagctctctctacagagccccagactcctcccctgacctcagggagtgaaggaaagaacgcatctcttatcttgagctttgggaacctgcagcacagcacagcctggccaactaatgggagccagccagggtcccacctacctttatccgacacaagctggcttcaatcttaagctgttccaccatcttgcgtgcttgcccaatactcatagtgctgttcaccggggtctcacctttcatcctggaaaaaagagggacctctcagagcacagtctcagctggaggcccccctccatgctcactccacaccaacctttacaaggctgtggtcataccccaatattttgttcccctcctatcctcctcctcctcctccagtggactgtctcatccctgtattcctcatggaaaaaaatagggtgggatgaggtgctccccaaactccctcatggcctgggccacagatcattaaaccttacacaaatgatttaaggcttttcagcccttcaaaccatgtgtgttcccagctctgaagacctcaaccaaccctgatgaggagggcacatcacccctgtctgctccagtgagccccaacaggagaaaaacaggccattacttacctgaagccacaagcggcagtagcagccctgggtgtagggtcagtggagggtaccaaaaccttctgcctgaaatgggtgccccacccagtagggagttgcagctgaaagtatctgatgcagaagcagtgactatacgaaaggaggcccctggggagggccaggccagaggtctggtctcagtttctgcagctcaagcactgtctggatggctggtacctgaaggatgaaggatgctagaaggagctgctcagatcctggagcataccaactgcctggccagtgggggagcctagctgcctgcatccctgcgcacacccccactgtcgctagttcactgcctgcccctcccccattgcaggcatcctgactctgggctagagacctccccaacagagctgaggccaaggccgactccccctctcaaatggcgtggtctgggcctatgacggcccctgcagtggagtctgtactggctgcgggggaccctgctcatttgaaaatctgacatcagctgggcagtcgcccccctcctcctttcctccctctactctgacacagcacttagcacctgaatcttcgtttctctcccagggaccctccattttccatatccaggaaaatgtgatgcgccacaggtatcagcgtctggatcgccacttcacgttttagccacaagtgactcagtggaagatccagagtcaacagaggctcgtcaggaagatgtctacagaaaaggtagaccaaaaggaggaagctggggaaaaagaggtgtgcggagaccagatcaaaggaccggacaaagaggaggtaggggcccttgtggggacagtcagcagaaatatactggaaataggtgggctggcgtgaagggggcggggggatggattggttttaagaatttcattcattttgaatagattacttcccacgcccgcagcagtgtgcaaagatgtacacaacactggccttgcctctgaaggactttatctggggtgattagacgtctacaaaatagaagactgccaaaagctagtctagataatgtgctgtggggactctgagggagagtgtatccagttagggtcagaggaggtccacaatgctaccacgctgggaacagggcactaatctgcctgcgcaacaacgcaagaggcccaggttgccgcaaactgcaacatgctctaggcgaatgcccccgccttagatgcctacaggtcctaggagctgtgggcgataaaaatcagcgccagctggatgaccgcctcactcggccgcttcgcgggtgaaatggcctgtggtgaaggtgtgcacggagggctgtgattgcagtctcaagggagagccgagcggaggctgcagtcagcgcatcccctggggcacatcttggggcctgcagggaggcaggcgtctttcccctttggtcacggtaaccggagggaaacctgccgcagagagagccagtggcgagcgcaaggagacagcgacctcgcagctcgggaaggctccgccccgtcccgccccgccccgccgtgctggaccccgccctgggctgaagccccgcctcccacggctacaaaagcggccggcggagaggggcgggacttccccgggagccggaagtcccgtctcacggttgccctggcagcgcgcgaggctggtgagtcggcagccctgtggcagccggcgggctggtttccatggttgcacgattaggtaggggctccgggcgctttgcccacccccgagctggaggggactggcgggaagcggcggttggctgcagggcgctccgccgggcgtggggtgtagccgtgtcggtgagcgagctctgctcgaggcggagaggagaaactcgggaagcaattgtggctactctaaggctactggtttcgagtcaggccgtgcgaccttaggcaagtcgcacattctctccgtgcagctgcctagcagtgtggattcagtatcaccgtgtgtgtaaagctctttctaagaatcgtaaggtgcttattctttgttatatagctgtgaatgagaatcaaggtggtttgtcccagcatcaaatgactggagaaggaattccactgaggagatttagcactgggcgggagggaacacagtggaggaaagggaaggggtaattggcagagtggcacaatcatttggagaaaggccatatatatgaaacaatgactttgctatcctgctatctctcgttcctcaaagccagtccagtaagctgttttgtccccacctccctggggaaaggagtcactcttttccctcaccctctctttccaggaaccaccagctgctgcatcccat

SEQ ID NO: 914747 - DNA, 4001 bp, Homo sapiens
cctctatcccttctcctgtccaggggcccagagagaaacacacctacccctggccttgccagagtggcttctgaggactccctgcccagcccagctttcactggggggagacgaggagaggcaatggtggtcttggcaacagaatgctcagcccctcgtggcaggacttgacaagggcaagcttgaccaggaagctgccatcagggatcttcccctgccccgcaaagctaggctccagctgcaggcgggctcccaccctctgctcctggccttgggcaagggcactcagcgcctcgcctgcccctgccttggccaatgcgaggtccttccttatccccaccatggggtccatggtctatttattctcgcccagctcaccctctacacagacactgtcctgggtgcacactcctcccttccctcgctgtgtacttccttgtcccctttttatttattgggcagggggagggggagggcacaggcaagaagagattcacagtgtcctggggtaagggggggttcacagtaatcatggtctactcctctttccgtggctgggggtagacttaataaagagagaaattcaagaactgcttgctttatttaggggtaagggcaaagagggaagtaaaatgatgaaagattggtttagaagggccaggcagaggcagggaagaagcagaaactcccctcttctcaggtgacagtcacaaaatcttacaaaggatcaaagctggaacaaccctccccttatttaaaaaaattccatagcaagtaaccatcagggctggagctccttccagtttttgaatcttgaacacaggtttcccccaccagaacgtcaagccctgtgacccaggggaggaaggaggggagaggatgggctagtagcgagagaggcgacacatgtcacactggcaggccctggccgtgaagatctcgagctcctccctccggctccccacacactgcagctgtactttgacctgcgggagaggggagtccgtgctgcagtcccctttctcagggctgtctaggatctccatctctctggtcttcccgcgaccccagcgtccatccaccgggcccgggccctcctcaccttcttcaggccactgatggtgcagcactgagagacggaggtgatgttgtgtcggtaaccactggccaccagcacagagtaccgagaagggaaggcgctggactcacagtggcccacacaggcctgtgccacgtgggagccctggcaggtgccttggcggtcacttcgcactgtcacattgaaggctagaaggagataggcaagcagtagacggcgcctctgccaaggtttgcctcgccccagctcccgttgcctgtgcctcagtgtggggccctttagggtgctgcctgccccaccgtccactcagctctttgctcccacccagaacctccactgctcctagccctccggtcccagaggtactcacggtgcaagtggcagcctgggatgactgcctcctggccccaggcttcagtgactgccaggaccagcagatagaggaccagggtttgaggggacgccataggcatctgaaacacagtggggagatgtctctacgtgggtgtgcaggtgggatggcgagttctttaaatactgcattccaggtgagtgagccagggctggctggtctgacaggtgaggtgtgcctgaatggtgctgccttttccctgtatctgcctttgtgtgtgtgtgtgtgtgtgtatgggtgtgagtgtgagcagctgtctctggaaaggacctgtgtgtcagccctctgtgcagtgattctcccttccctggaattttcttcgccatctggagcgcaaacatcttcctccctccatctgccccatcttggcctgcagggccctcgtccacattcccagaccctccccagagctcctcctgcctcagcgagctcaccacttccgaggcccaggaacagagcggcttgcagttttcctgtgcctcctgctggtctccagcttggtgctggctctccaggcttttatttgccagcattttggagccacgccctcttggagatcggctttcaaaccagcctcccctgcctgaagcctcagagcgatcccacctgggggatcttgctctttgaggtgcggtcctcggagagcagctcctgctgctttctgcttctttctgtccaaaaagctacccacagcccaggcctcgataagtcagatgtggagagaagcctaggagctggtggagtgtgcagcgtgtgtgcagctgacgacacaggggtcaagactcttggctgagttgtggacacctgggttctctttgctctgtgaccttggacagaacatttccctgttcagggcctgatcacccctaactttattattatttattactattattttgagagggtctggctctgtcacctaggctggagtgtggtggtgttatctcggctcactgcaacctccacctcccagcctcccagactcaagccatcctcccccttagcctcctgagtagctgggaccacaggcacaccactatgaccagctaacttttgtatttttttgtagagacaggattttgccatgttgcccatggtggtcttgaactgctaagctcaagtgatccgcctgcttaggcctcccaaagtgctagaattacaggcatgagacactgtgcctggccacacccctaattttaaaaccactaaactcagtcctgcttgcctttttctaactgcaaaggaaagggattggggaaggagattcttagggacaagggaaattataccagtggaggtctcctgagatgtgcttggtggcagggccgggggtttgggggttgctgtctgtttcagagttgcatggccacggtatcagtggatgattcgcatcctgtgctacagagtaacgttctgagctggagtgctcccctagccctggaataacagggacctgactcctgaaagggcctgaagttatcaaccccagcaaagctgatctatttgtccaactctggttttatagatgaggcaactaaggctcaaagaaagaaagttactaaaagtcacccagctagttaatgttagggctgatttcaaattcaaatctgctgtccatccatggtgctaaactacacttgagcaagaatgtggcaagctggagaaagacccccaggcagcagtggccagaggggttggggcaaggtggagagccaaaggaagcctgtggtgattctgggcagccccgctttggggtcattgcctcactgatctgctcagaaagagcagggccagtcacagactgctagagctagaaggcactttataactcaccaaatcctaccccctcattttctggatgagaaaataagagctcagcggaaaacaacttcccaaagcttcactgtaagctagtcagagtcagggcgggcactcacagctccagatttggagctgtgcttcttagcagctttgtaaaacaggccatgtttgggacagtcgagtaaaggctgtaaacgcaatttgagaggaagtgatgttactaatgtcactaatccttaaattcccacaccctacggtttccccatcagcccccatcccctcaagacctgggtccttgtttgccaggtcctccgcagcagtccacctcttctcttctccccaccaagggtgcaggcagcatagcaacaggacgcagcgggaactcagcagttcagcccctgctctcccactcttgaggggcaccctctggcatgtgacagatgatggcttctgtttaaagcatttgggtgacaaggctcattaccttatgaggtagcccattctaatattggacatctctaacaggtaaaaagtgactcctttgttgtgagctaaaatgagtttccctacatttccatagatcattttggttctccacggccacatgaggctaaagtgtctattacagatcagtcctttagttgaaggcagctcaggtggccaggcctt

SEQ ID NO: 914748 - DNA, 4001 bp, Homo sapiens
aggcagcctgggccccaggcccctcactcaggggcatggaagggcagtctcttttctccaggacagaccggataggggttgggggtgtctcctccctgggcctaccccagagccaaggatggggggatgcagaggcccaaggagaggactccctggcctcggtcgttcatgtcgtcctgggtggagggggagagccggctgatacccgtcgggtcagggcagcggccgctgcgaggggcgcccaatgccccgctctccccctccccaagctgggggaggctctctctcctccaataatgcggatggggagggcctctgcctcctgtcctcgtaattctcgaaagctgcccccgccccaccctcccccaccgcgtccacgctccagcctcaaggggagggaggaggcggacgccaggtcctcaggccgctgatgggagagccggctcaggtcgtggggacccggggctccggctccccggctcccgctgctccgcccccctccccctccgcgcctgcgcgggcgccgttcgctacgcaaattgcgcagcggcccggctggctccgcagtccagcgccgcacccggcgtgaaaccgtacgagaattggcgcgagctgcgccgctggcgggcgcccggggttacgggaggcggcaggagggcggccgagttgcgggggccgtgccgcatccagggggtccccgggtgggccgtgccccgtgccgcccgcctttacttgtatgggggtccgccagttcccacgctcctctctcctatacccaaatcggggtcgtgccgcccggccgggggcggcaacggattcccgtccctcggtctctgaagaaaacttccgcccatagccaagatggcccccgggccccgcccccgggcctgaacccgcggagccccgaatcccccgcgcgggcccgcccctcgccccggcgcgcccgcggccctgctcacctggccggccgcctgccaggcgtgaagcccccacgggccctacggtcctccctcaccgggtccccggccctcctcccgcgcccgggcagccatcccagccagggaggaggttcctttccttatctccagtgcccccgagatggcgcgggaggtgtcccccgaggcgggcggcgcgaagcttccgcgcctgggaggaggagcggggagcgggactttccgaccgggcacccagtccaggcggagcggtaacaatagcaacaataatcacatccgacggctgagcttcagttgtggctgtgccaagcgccttcgcccgcagtaatcactcccttcacaaagttttcactggctcccgggggagctgtcactatccccacttcactggggggaaactaaggcccagaggggctgaaggacttgttggcagaagtgggtctccaggttccaaatggggaccccagagaatccctctcctgctcccacacacgcccaaggtgtgaggcagcgaggatgtgagccccggggccgaaggagggaggaaaaaggatgcggacgaggagccttggatccggcgggggggcggggccgggccgggttgaccccgcctctggacctacccgagtgacgttccgagaggtgattgggccaggtcgctgacagttcccgttgcccaagcaactagggcccggagcccggggtgctggagggaggcggcaggcccgggtcaggggcctcgagatcgggcttggggtgagacctgtgcgccgtcaccacgggcggggcggggcctgggtccaccggggttctgaggggagactgaggtcctgagccgacagcctcagctccctgccaggccagacccggcagacagatgagggcccaggaggcctggcgggcctgggggcgctacggtgggagaggaagccaggggtacctgcctctgccttccagggccaccgttggccccagctgtgccttgactacgtaacatcttgtcctcacagcccagagcatgttccagatcccagagtttgagccgagtgagcaggaagactccagctctgcagagaggggcctgggccccagccccgcaggggacgggccctcaggctccggcaagcatcatcgccaggccccaggcctcctgtgggacgccagtcaccagcaggagcagccaaccagcagcagccatcatggaggtaagtaccccaccacctccacctgccgggacacctcacccccagcccactggctccctgcatcccagttgcatccacaggcactgaatgctttgggtcggtccccaaactctcagagccccagtttcctctttcgtaaaacagcaattaataaccaccattgtaggactgttgagttaattagcaggaacatataggatgcacttgattacagagctggtgcacattaaagctaaaaaatggttgctgccgggcgtggtggctcacacctgtaatctcagcactttgggaggccaaggcaggaggatcgcttgagcccagaagttcaaggccagcctgagtgacttagggagactccagctcttaaaatacatatatatatatatagcagctattagtgtggggttaggacagaaatcagtgacaggcaggcagtgatccgaaaaggaaaaggggcctgcctaaggccacaccttcctggtgtttctttccttagaatgtgggggctggaagcctccttggtgccctgccccaggctacatgctttccctgggattaggccttccagctcccagatgtgttctttcttgccctgtggctcgtacccacagcaggactgtcctggcacagtggccaggggcagatgacctcaaggggcagacagtcctcccagacagcagggctgtgtggggtgagaagcacaggctccaagatggaaggatggacactggggttctatgtccatttctcagtaggctctagcacccctgtgcccagcactggccttggcacctggaacaacaacagatatcttctgaacacaaaaaccaggtcaagctgggtggggtggcacatgtctgtagtcccagcaactcaggaggctggcttgagcccaggaattcaagaccagcctgggcaacatagccagaccccatctctaaaaatagaaaactaggtcatgtcactctggcactgcagcttaaaagacctcctccccattttcaggattaagaaggcttaagaggcctctttcccctcgctctcttacggataaacacccacactcgattctctcagattggaccccatagcttgctttctttttttctgtttgttttgttttgttttgagacagggtctcgctctatcacccaggagggagtacagaggtgcgatctcagctcactgcagcccggaacttctgggcttaagtgatcctcccacgtaactgggaatacaggtgtgtggaccacacccagttaatttattttttactttttctttttttttttttttttttcctgagacggagtctcactctgctgcccaggctggggtgcagtggtgcaatctcggctcactgcaacctctgcctcctgggttcaagcagttctcctgcctcagcctccagagtagctgggactacaggcgcgtgtcaccatgccgggctaatttcttgtatttttattagagatggggtttcaccgtgttagccagggtggtctccatttcctgacctcgtaatccacccgcctcagcctcccaacagtgttgggattacaggcgtgagccaccatgcccagcatttttcacattttcatgagatgagggcaggggcggggtctccttttgttgcccaggcaggcctcaaactcctgggctcaaacgatcctcctgcctcagcctccagaacagctgggaccacaggtgcatgccaccacaccagctcattttttattttttgtagaggtggggtcttgctttgttgcccagtcttgtctcgaattcctgggcccaagcaatcctctcaccttggcctcccagactgttgagattactggcg

SEQ ID NO: 914749 - DNA, 4001 bp, Homo sapiens
ggaccatggcgccacccatcgcggccgcctggcacacactggtcccctggcacaggtaacaacagaggaccctcagggagagaaggctcccagcttcctctacaccctgagaaccgctgccgagagacccaaaagacacctgggcatcagtgctgcagccctaccttggcctccaggtagatgctagtggagggcgcccgcctggcgacgaggcagaggcaggcagcaagagacagcgcgcagatgacgaacagggagtcgctcaccaggacgcggacaagcagcagggcccagggctgtgcccggcgccgatgggagagcacagcacacagcacgttcaccagcagaaagagcagcgaggcccccacaaaggcccctcggacagcgagcctgcagccacagcacagtcagcgcgggccctcaacagccctcagcactcaccacctgccccacctcctgcaggaaaccccaatgtcgacaaaactcagggcatccagtctgagccctgttcctccactcttacagatggagaaactgaggcccaaaaaggtcagaaggtgactgacagccatggtacttcggaaggtgcaccaactggagtcagaagtctctgtctgagccccagctctgcgaccttgatcctgctgtcttacctggctgggcctcagtttcttcatctctcaagggaggatagtagcctctcagggaaattgtacaaataaaagatggctgggaaagctctttataaaccgtaagacactgtacaaatgacgagggcattgcggccccaggtcacccaggagtgcatatggctttggtgcttccatgggctggagcctccagctcgccctccatggtggatgacactggggccctctccctcacactaccacaagcattcctattcctgtgccttgcagatctgcaaggcctctgctgagccatctgcgccaggtgctttaacttttccaagatcttccacagacattccctgggttgcctttgtctcagccctgagaggtgggaagggatctacatgggactgtcacctgcccctgacctggaggctgagcccaccagtgtcccgagtacttacaagcctcggctcatctccggccgacgcttcaccttggccttgaacaccacctaggagcagagatgcccttcactcctgtgggtccttgaggcttgccacctcccgccccccacccgggaccacagttggttacctgggcaaagtagaggttcataagcgtcaaggtgaagaactgcaggcagacggggcagcagtagagaagccagaagggcaagggccccaggcggttggcgcggggagtatctcggaagtagaaggagaagagggtggtacgcaaggcggcccagagcagacagagggccaggaacaccgtctgatagctgagacgcttgtgcccatacagaagcaccagccagagctgggcatagacggagaagaagagcagggcatacagggtggtgtaggcagctgtcagccccagggtcacagcaggtggcagcgcaggcaccagcccggcagcaggcaccaggccagacaggttactctccatgtcagggagggaggcctgaatcccggagacagacaaggagggactgtcggcgggaccagggaaataaatacggaggggtgggaattgcagggtgcagagagggagatggggcgctcaggaggaaagaagttgtggctgacaggcccctcctcctcaacagagagacccttgcccttggggaacacaggcagcctgggccccaggcccctcactcaggggcatggaagggcagtctcttttctccaggacagaccggataggggttgggggtgtctcctccctgggcctaccccagagccaaggatggggggatgcagaggcccaaggagaggactccctggcctcggtcgttcatgtcgtcctgggtggagggggagagccggctgatacccgtcgggtcagggcagcggccgctgcgaggggcgcccaatgccccgctctccccctccccaagctgggggaggctctctctcctccaataatgcggatggggagggcctctgcctcctgtcctcgtaattctcgaaagctgcccccgccccaccctcccccaccgcgtccacgctccagcctcaaggggagggaggaggcggacgccaggtcctcaggccgctgatgggagagccggctcaggtcgtggggacccggggctccggctccccggctcccgctgctccgcccccctccccctccgcgcctgcgcgggcgccgttcgctacgcaaattgcgcagcggcccggctggctccgcagtccagcgccgcacccggcgtgaaaccgtacgagaattggcgcgagctgcgccgctggcgggcgcccggggttacgggaggcggcaggagggcggccgagttgcgggggccgtgccgcatccagggggtccccgggtgggccgtgccccgtgccgcccgcctttacttgtatgggggtccgccagttcccacgctcctctctcctatacccaaatcggggtcgtgccgcccggccgggggcggcaacggattcccgtccctcggtctctgaagaaaacttccgcccatagccaagatggcccccgggccccgcccccgggcctgaacccgcggagccccgaatcccccgcgcgggcccgcccctcgccccggcgcgcccgcggccctgctcacctggccggccgcctgccaggcgtgaagcccccacgggccctacggtcctccctcaccgggtccccggccctcctcccgcgcccgggcagccatcccagccagggaggaggttcctttccttatctccagtgcccccgagatggcgcgggaggtgtcccccgaggcgggcggcgcgaagcttccgcgcctgggaggaggagcggggagcgggactttccgaccgggcacccagtccaggcggagcggtaacaatagcaacaataatcacatccgacggctgagcttcagttgtggctgtgccaagcgccttcgcccgcagtaatcactcccttcacaaagttttcactggctcccgggggagctgtcactatccccacttcactggggggaaactaaggcccagaggggctgaaggacttgttggcagaagtgggtctccaggttccaaatggggaccccagagaatccctctcctgctcccacacacgcccaaggtgtgaggcagcgaggatgtgagccccggggccgaaggagggaggaaaaaggatgcggacgaggagccttggatccggcgggggggcggggccgggccgggttgaccccgcctctggacctacccgagtgacgttccgagaggtgattgggccaggtcgctgacagttcccgttgcccaagcaactagggcccggagcccggggtgctggagggaggcggcaggcccgggtcaggggcctcgagatcgggcttggggtgagacctgtgcgccgtcaccacgggcggggcggggcctgggtccaccggggttctgaggggagactgaggtcctgagccgacagcctcagctccctgccaggccagacccggcagacagatgagggcccaggaggcctggcgggcctgggggcgctacggtgggagaggaagccaggggtacctgcctctgccttccagggccaccgttggccccagctgtgccttgactacgtaacatcttgtcctcacagcccagagcatgttccagatcccagagtttgagccgagtgagcaggaagactccagctctgcagagaggggcctgggccccagccccgcaggggacgggccctcaggctccggcaagcatcatcgccaggccccaggcctcctgtgggacgccagtcaccagcaggagcagccaaccagcagcagccatcatggaggtaagtaccccaccacctccacctgccgggacacctcacccccagcccactggctccctgcatcccagttgc

SEQ ID NO: 914750 - DNA, 4001 bp, Homo sapiens
gccagaagggcaagggccccaggcggttggcgcggggagtatctcggaagtagaaggagaagagggtggtacgcaaggcggcccagagcagacagagggccaggaacaccgtctgatagctgagacgcttgtgcccatacagaagcaccagccagagctgggcatagacggagaagaagagcagggcatacagggtggtgtaggcagctgtcagccccagggtcacagcaggtggcagcgcaggcaccagcccggcagcaggcaccaggccagacaggttactctccatgtcagggagggaggcctgaatcccggagacagacaaggagggactgtcggcgggaccagggaaataaatacggaggggtgggaattgcagggtgcagagagggagatggggcgctcaggaggaaagaagttgtggctgacaggcccctcctcctcaacagagagacccttgcccttggggaacacaggcagcctgggccccaggcccctcactcaggggcatggaagggcagtctcttttctccaggacagaccggataggggttgggggtgtctcctccctgggcctaccccagagccaaggatggggggatgcagaggcccaaggagaggactccctggcctcggtcgttcatgtcgtcctgggtggagggggagagccggctgatacccgtcgggtcagggcagcggccgctgcgaggggcgcccaatgccccgctctccccctccccaagctgggggaggctctctctcctccaataatgcggatggggagggcctctgcctcctgtcctcgtaattctcgaaagctgcccccgccccaccctcccccaccgcgtccacgctccagcctcaaggggagggaggaggcggacgccaggtcctcaggccgctgatgggagagccggctcaggtcgtggggacccggggctccggctccccggctcccgctgctccgcccccctccccctccgcgcctgcgcgggcgccgttcgctacgcaaattgcgcagcggcccggctggctccgcagtccagcgccgcacccggcgtgaaaccgtacgagaattggcgcgagctgcgccgctggcgggcgcccggggttacgggaggcggcaggagggcggccgagttgcgggggccgtgccgcatccagggggtccccgggtgggccgtgccccgtgccgcccgcctttacttgtatgggggtccgccagttcccacgctcctctctcctatacccaaatcggggtcgtgccgcccggccgggggcggcaacggattcccgtccctcggtctctgaagaaaacttccgcccatagccaagatggcccccgggccccgcccccgggcctgaacccgcggagccccgaatcccccgcgcgggcccgcccctcgccccggcgcgcccgcggccctgctcacctggccggccgcctgccaggcgtgaagcccccacgggccctacggtcctccctcaccgggtccccggccctcctcccgcgcccgggcagccatcccagccagggaggaggttcctttccttatctccagtgcccccgagatggcgcgggaggtgtcccccgaggcgggcggcgcgaagcttccgcgcctgggaggaggagcggggagcgggactttccgaccgggcacccagtccaggcggagcggtaacaatagcaacaataatcacatccgacggctgagcttcagttgtggctgtgccaagcgccttcgcccgcagtaatcactcccttcacaaagttttcactggctcccgggggagctgtcactatccccacttcactggggggaaactaaggcccagaggggctgaaggacttgttggcagaagtgggtctccaggttccaaatggggaccccagagaatccctctcctgctcccacacacgcccaaggtgtgaggcagcgaggatgtgagccccggggccgaaggagggaggaaaaaggatgcggacgaggagccttggatccggcgggggggcggggccgggccgggttgaccccgcctctggacctacccgagtgacgttccgagaggtgattgggccaggtcgctgacagttcccgttgcccaagcaactagggcccggagcccggggtgctggagggaggcggcaggcccgggtcaggggcctcgagatcgggcttggggtgagacctgtgcgccgtcaccacgggcggggcggggcctgggtccaccggggttctgaggggagactgaggtcctgagccgacagcctcagctccctgccaggccagacccggcagacagatgagggcccaggaggcctggcgggcctgggggcgctacggtgggagaggaagccaggggtacctgcctctgccttccagggccaccgttggccccagctgtgccttgactacgtaacatcttgtcctcacagcccagagcatgttccagatcccagagtttgagccgagtgagcaggaagactccagctctgcagagaggggcctgggccccagccccgcaggggacgggccctcaggctccggcaagcatcatcgccaggccccaggcctcctgtgggacgccagtcaccagcaggagcagccaaccagcagcagccatcatggaggtaagtaccccaccacctccacctgccgggacacctcacccccagcccactggctccctgcatcccagttgcatccacaggcactgaatgctttgggtcggtccccaaactctcagagccccagtttcctctttcgtaaaacagcaattaataaccaccattgtaggactgttgagttaattagcaggaacatataggatgcacttgattacagagctggtgcacattaaagctaaaaaatggttgctgccgggcgtggtggctcacacctgtaatctcagcactttgggaggccaaggcaggaggatcgcttgagcccagaagttcaaggccagcctgagtgacttagggagactccagctcttaaaatacatatatatatatatagcagctattagtgtggggttaggacagaaatcagtgacaggcaggcagtgatccgaaaaggaaaaggggcctgcctaaggccacaccttcctggtgtttctttccttagaatgtgggggctggaagcctccttggtgccctgccccaggctacatgctttccctgggattaggccttccagctcccagatgtgttctttcttgccctgtggctcgtacccacagcaggactgtcctggcacagtggccaggggcagatgacctcaaggggcagacagtcctcccagacagcagggctgtgtggggtgagaagcacaggctccaagatggaaggatggacactggggttctatgtccatttctcagtaggctctagcacccctgtgcccagcactggccttggcacctggaacaacaacagatatcttctgaacacaaaaaccaggtcaagctgggtggggtggcacatgtctgtagtcccagcaactcaggaggctggcttgagcccaggaattcaagaccagcctgggcaacatagccagaccccatctctaaaaatagaaaactaggtcatgtcactctggcactgcagcttaaaagacctcctccccattttcaggattaagaaggcttaagaggcctctttcccctcgctctcttacggataaacacccacactcgattctctcagattggaccccatagcttgctttctttttttctgtttgttttgttttgttttgagacagggtctcgctctatcacccaggagggagtacagaggtgcgatctcagctcactgcagcccggaacttctgggcttaagtgatcctcccacgtaactgggaatacaggtgtgtggaccacacccagttaatttattttttactttttctttttttttttttttttttcctgagacggagtctcactctgctgcccaggctggggtgcagtggtgcaatctcggctcactgcaacct

SEQ ID NO: 914751 - DNA, 4001 bp, Homo sapiens
cagaagggcaagggccccaggcggttggcgcggggagtatctcggaagtagaaggagaagagggtggtacgcaaggcggcccagagcagacagagggccaggaacaccgtctgatagctgagacgcttgtgcccatacagaagcaccagccagagctgggcatagacggagaagaagagcagggcatacagggtggtgtaggcagctgtcagccccagggtcacagcaggtggcagcgcaggcaccagcccggcagcaggcaccaggccagacaggttactctccatgtcagggagggaggcctgaatcccggagacagacaaggagggactgtcggcgggaccagggaaataaatacggaggggtgggaattgcagggtgcagagagggagatggggcgctcaggaggaaagaagttgtggctgacaggcccctcctcctcaacagagagacccttgcccttggggaacacaggcagcctgggccccaggcccctcactcaggggcatggaagggcagtctcttttctccaggacagaccggataggggttgggggtgtctcctccctgggcctaccccagagccaaggatggggggatgcagaggcccaaggagaggactccctggcctcggtcgttcatgtcgtcctgggtggagggggagagccggctgatacccgtcgggtcagggcagcggccgctgcgaggggcgcccaatgccccgctctccccctccccaagctgggggaggctctctctcctccaataatgcggatggggagggcctctgcctcctgtcctcgtaattctcgaaagctgcccccgccccaccctcccccaccgcgtccacgctccagcctcaaggggagggaggaggcggacgccaggtcctcaggccgctgatgggagagccggctcaggtcgtggggacccggggctccggctccccggctcccgctgctccgcccccctccccctccgcgcctgcgcgggcgccgttcgctacgcaaattgcgcagcggcccggctggctccgcagtccagcgccgcacccggcgtgaaaccgtacgagaattggcgcgagctgcgccgctggcgggcgcccggggttacgggaggcggcaggagggcggccgagttgcgggggccgtgccgcatccagggggtccccgggtgggccgtgccccgtgccgcccgcctttacttgtatgggggtccgccagttcccacgctcctctctcctatacccaaatcggggtcgtgccgcccggccgggggcggcaacggattcccgtccctcggtctctgaagaaaacttccgcccatagccaagatggcccccgggccccgcccccgggcctgaacccgcggagccccgaatcccccgcgcgggcccgcccctcgccccggcgcgcccgcggccctgctcacctggccggccgcctgccaggcgtgaagcccccacgggccctacggtcctccctcaccgggtccccggccctcctcccgcgcccgggcagccatcccagccagggaggaggttcctttccttatctccagtgcccccgagatggcgcgggaggtgtcccccgaggcgggcggcgcgaagcttccgcgcctgggaggaggagcggggagcgggactttccgaccgggcacccagtccaggcggagcggtaacaatagcaacaataatcacatccgacggctgagcttcagttgtggctgtgccaagcgccttcgcccgcagtaatcactcccttcacaaagttttcactggctcccgggggagctgtcactatccccacttcactggggggaaactaaggcccagaggggctgaaggacttgttggcagaagtgggtctccaggttccaaatggggaccccagagaatccctctcctgctcccacacacgcccaaggtgtgaggcagcgaggatgtgagccccggggccgaaggagggaggaaaaaggatgcggacgaggagccttggatccggcgggggggcggggccgggccgggttgaccccgcctctggacctacccgagtgacgttccgagaggtgattgggccaggtcgctgacagttcccgttgcccaagcaactagggcccggagcccggggtgctggagggaggcggcaggcccgggtcaggggcctcgagatcgggcttggggtgagacctgtgcgccgtcaccacgggcggggcggggcctgggtccaccggggttctgaggggagactgaggtcctgagccgacagcctcagctccctgccaggccagacccggcagacagatgagggcccaggaggcctggcgggcctgggggcgctacggtgggagaggaagccaggggtacctgcctctgccttccagggccaccgttggccccagctgtgccttgactacgtaacatcttgtcctcacagcccagagcatgttccagatcccagagtttgagccgagtgagcaggaagactccagctctgcagagaggggcctgggccccagccccgcaggggacgggccctcaggctccggcaagcatcatcgccaggccccaggcctcctgtgggacgccagtcaccagcaggagcagccaaccagcagcagccatcatggaggtaagtaccccaccacctccacctgccgggacacctcacccccagcccactggctccctgcatcccagttgcatccacaggcactgaatgctttgggtcggtccccaaactctcagagccccagtttcctctttcgtaaaacagcaattaataaccaccattgtaggactgttgagttaattagcaggaacatataggatgcacttgattacagagctggtgcacattaaagctaaaaaatggttgctgccgggcgtggtggctcacacctgtaatctcagcactttgggaggccaaggcaggaggatcgcttgagcccagaagttcaaggccagcctgagtgacttagggagactccagctcttaaaatacatatatatatatatagcagctattagtgtggggttaggacagaaatcagtgacaggcaggcagtgatccgaaaaggaaaaggggcctgcctaaggccacaccttcctggtgtttctttccttagaatgtgggggctggaagcctccttggtgccctgccccaggctacatgctttccctgggattaggccttccagctcccagatgtgttctttcttgccctgtggctcgtacccacagcaggactgtcctggcacagtggccaggggcagatgacctcaaggggcagacagtcctcccagacagcagggctgtgtggggtgagaagcacaggctccaagatggaaggatggacactggggttctatgtccatttctcagtaggctctagcacccctgtgcccagcactggccttggcacctggaacaacaacagatatcttctgaacacaaaaaccaggtcaagctgggtggggtggcacatgtctgtagtcccagcaactcaggaggctggcttgagcccaggaattcaagaccagcctgggcaacatagccagaccccatctctaaaaatagaaaactaggtcatgtcactctggcactgcagcttaaaagacctcctccccattttcaggattaagaaggcttaagaggcctctttcccctcgctctcttacggataaacacccacactcgattctctcagattggaccccatagcttgctttctttttttctgtttgttttgttttgttttgagacagggtctcgctctatcacccaggagggagtacagaggtgcgatctcagctcactgcagcccggaacttctgggcttaagtgatcctcccacgtaactgggaatacaggtgtgtggaccacacccagttaatttattttttactttttctttttttttttttttttttcctgagacggagtctcactctgctgcccaggctggggtgcagtggtgcaatctcggctcactgcaacctct

SEQ ID NO: 914752 - DNA, 4001 bp, Homo sapiens
actgttgggggaaggggactagtggaccaggcttggccatgccaggccagcttgtggttcaccagggccttaggctcctgcttggggctggtggctcctgggaggcccccttctcttcagggacttttttgtttcacgtccttgtgtccaggcccggaggaggagagggagggaaggaccaaagggaggtcaggtcaagcccggggaaagtgccccctgttgtcttcctccagcaggactgaggcccagggaagaatagtcagcggggtctggggtgttgagggacagtaccccgcaagatgccattagctgcggtttgggggctgtcgggcgactgtgtgtgtgttgggagcaaccacagaaaaggctgatggccgggagcaggggtcgctgacatggaactgcctgagacttctggctggattgtttcccctccctcaagtcctccttccaggcctgacggactcagcagggtttttaaggacaaagctgtcggcggctccccacctgtctgactggctggttcctctgtctgccctgggctctttcactgctctggtgggcctgcgtgttcctggaccctcacgtggggcctgcgcccggggccgcctctggcggggtgctgctggggctttctccttcagaggcaggaggtgtggctgggtcctcaagggcccctggggtaggatgcgaggatggggttggggaagcttcatcacagggactgggcacagaactggcagcaggtgcaggggtctggacgttagtgtctgcctgtggctgggccacagaatctgactgtggctgggccatgaggttcagctgtggctgggctgtgggatccgactgtggctgggccgtagggttcagctgtggctgagctgtgggatccgatcgtggctggagtgtggggttcacctgaggctgggccacaggatccatctgtgactgggcctctgccatcggctctggcagagttggaccctcagaatctagctgggtctgtggctcagtgggcgtgaagctgcccggccgctcctcgcagagagctgccgcgaaggacgagagcacggagcgcagcagggtccggaggtcggcactggccatgaggcagaggaaggggctgaggcagctgttgagtaggatcaggtagtcggagtagaccagggcctcccagagcaggtagccagagtagacgtcccacaggaaggccaggtagagcagctgggccagctggtagggcagcctcaggaccacataggctgacagaatggtcctggccacacgggcgaagccccggcaggctgcgggctgctgttggcggtggcaggtgcgacaggctgtggcctgggtgagcacgtggcagacgagcagcaggaggaaaggcaggaagccccccaggacctccagcatcctcagcgacagctcctcgctgtcccagaagtccaggcagatgaccaggtcgtaccaccagacggcagcctcggggaagaccagccagggcacgctgaagagtgtggccagcacccagacaccggcgcagacccagaggggcaggcggactgggcggtgcccagggtaccagtgtgggcacagcgccagcaggcagcggtcgaggctgagggcggccagcaggaagaggccggaggagtaggacacgccccataggaagtagtagaagcggcaggcagctgtccccagcggccagtgtcccccatgccggatctctaggatctggaaggccgctgctgccaggaacaagaagtcagagagggccaggctgagcaggagcagcgccagacgcgtgccagctccatgccgggcctgggagccggccagccacgccatcaacccattggctggcagcccaaggagcagcagggccaccaggaagaccgtgtcccagccaccttgggggtaggagtcctcatcatcaagctctgtgcggggcctgtggccagtggcacccaggtcagcttccatggtagtgtccatttggggtccccagagtcctgctggacacggagtgggtgcctggtgaatcaatgatggtgtgaatgaccgagtatgggagagacggtgctgtgcatctccaggcaagtcaccatccctccctgcgccattgtcatcaccttttgagtaattatcctatgccaaggacttgaagtggatgacctcatggagtcctcatacaatctactttacaggcgaggacaggaaggttcagagaatcagtgaaggtaggaagggaggtgccagggctcaacccagacttttcttttcttttctttttttttttttgagagacagggccttgctctattgcccaggatgagtgcagtggcacagtccctgcagcttccacctcctgggttccagcgaccctcccatctcagcctccctagtagctgggactacaggtgtgcacccactactttttaaatttttagtagaaacaaggtctcactgtgttgcccaggctggtcttgaactcgtgagctcaagtgatcctcctaccttggcctcctgaaatgttgagattacaggcatgagacactgtccagacagacttaatcttctgccatgtagaatcccaatgggtccggatagactaacccggaggctttcaaacattgttaaaggtatggaattttgtctgtaagtaaagtattctaaggccgggcacggtggctcacacctgtaatcccagcactttgggaggatcacctgaggttgggagttcgagaccagcctgaccaacatggagaaaccccatctctactaaaaatacaaaattggctggccgtggtggcgcatgcctgtaatcccagctactcaggagaatcgcttgaacccgggaggcagaggttgtggtgagccaagatcgtgccatcgcactccagcctgagtaacaagagcaaaactctgtctcaaaaaaaaaaaaaaaaaaagtattctagtggaactcctatatggactaaaagggggtgctcaaattaagggagggaagagtacccctaccccccagggttccagggaacacagtttgaagaccgtttggtccgctcatcacaaggcccctttatgcctgctcctctggggttcgagtgtttaggattccaagaagggagggctctggttcccatgggcccaggggacccgaaggtagggagtctggggcagtgggaaccccctcccctccagcgagtgtcactcatgggctcaggatgaggtctctgagcctcaggaccccacagcctggggtcaggagggccatcctaggagcccctggtgcctctccagcatcttccaccccaccgcggccctctcccgcttcccacagctcaggcaggaggtgacccctgtttgtctcctggagctgctaaagagagggggaggggctctgcagtgggatggtggtgggatggtgagggtgaggggagttggagggcacccagacctgggatccaagaggcctgcagccccacctcgcccttccccgctggcagcggggagggagtttccctttgagggcgatgagagcccaggtggtggtatagtctggggagggaacggatgccctgaagggctggcccctgcccacggcccacggctccagccacttggcctttagtttggtgccctccgtaccctcagggttcctcctcaggctgaccccctctgctgtctccattccctattggatcagagccccaggcaccccgagactggggccctgaccagtgaggcctggcttacctgggaggcagaggccgatgggtggaaggagcaggagcagggcgtgcctgcctgcccagcactccagctgtccccccggccctcactggggcctgctttgtggcacccggcagcgctaaggcgggtgggcaggaaacccaagctgagaggacatcaattatttatggggctgcttgctgggaaaccctaaccctggcccagtagggccaagtgaccagccagaccccctcccccagccctga

SEQ ID NO: 914753 - DNA, 4001 bp, Homo sapiens
cgacctctggatttgagttaggggatggaattctcatcctggctctgccaactactggccaggtggctttggacaagggattgaacctctctgtgccctagttttctcatctgcaaaatgtgagtaatattctaataagtgaggatgagaaagagaatgtgagggtactttttcaatataagatttggaaggatgttcacacaggtgatggacttgtgggggttcatcctgtgttttttgcttgtctgttatatctggttgtgtatgagagatggcaaggagacagacagagagggattaatagatattgctttagtaatcactcaaatgacaaagttattccataaaatgaaaaaatataacacactagagaaacatgcagtataactgtcactatggttgctcagtcatcgcccttacagtcccaaatcatccatgagagccacactccccggtcacagcgggacaccaccagcgctaagtagccagggcttggggaagaatcccatcagctgccaatgtgcaaatgcccccagcctgcccgatttctggggcccaagcccacctcccctcatttcttcctcaacacagacctcaaacacagcctcattatcaacccacagaagggaaatgcactttaaataagtggtctgggaaaatgcacttaatgttccattaacaattagcaattgtttgatatttcagttgtagcacaaagcagtatcccatgggtacggctgggcactgaacaggctgcaattcagagggagggggacctgatcatctctgctgacatttcaggggcattgatttactgctcaattatcaagcaagcccagacccagtgagattaaacaggaaatggtcattcatttccagctggctgcagacactcaaaccattgacccaatgccaccgccgcagaagctctggctgataaggcgatgagacagaaaaaagtggggagaaatcagagagtgaggcaggggagagaggaagagaggagaggtggggagaggagaggagaggagagagaatagaaaaataaaatcacagagagactgacaagaagaaaaagagataacaggtgaggagacagagacagatgaatagggaggctgaaagacaaaaaaaaaaaaaaagatgaggacactgagagatagagaagagagacagaaagacttcagagagagagacagagactgaaagaaagactaagaaaaacaggagagatacaagaaccgagatgacagaggagggagaaaagagactaggacaggaagacagaggcagaggagaggagaaatgaggaggaagagagatgtggagagagaagtggggacccacagggagacgcagaacggcagagggaggccagagaactgagagaggaaagggagacgaagacagaaggtggggcggcaggcagcgggccccttaccaaagtgaagggggtgttgagcagcgtgatcattatgtcggcaactgccaggttgacgatgaagaggctggtggccgagtgcattcgctggttcttgaagatgacatgacagaccaggacgttgccaaagagtgagaagacaatgatgaaggagtaagccacaatgagcagggctttcaccgtggggttctgggactcagcgccgtagcgcctcctgcccacaaagttctgccagtcggagaaggtgtagttgttccaagagaagaagtgcgaggcattgggcacggccagggccgcctccgcgctctgctcgtcggcccggccctcgtggggctcggtggctcgcaccaaggggaggagacagagcagcaagaggtgagggaccattttgcaggagccacccctcccctgggagcctgcgggccgggcgtcccctcccgctgggatcggagcgcgcagccggggtgcggggcgcacagcatacaaggccgtcccgaggagccagggagcccggacgcgcggagcaccgcgccgcccgccaccagcccgcggtcggcacgccagctccgggtttgttggagcacttttatatctctgctcccaccaggctgctagggagcgcctctgcctattgggcagcgcggcgtctctcgcggcgacggtgacgcgctctggctctgacaagcctggctccccccaccctaccgggtggcgccgttgctgaccccacgcccagccgttcccactcccgcctgaaactcctccgacagggcttcgcttcgggggctcagtccccagcgcgtacacactcgcgtggtgtcggcttagcctcttgtaaaggaagcagggcaggcaggtgggaggaagcccacaggggcacttgggatgatgagggggcatgctggcaaagccgggtcagtgacaaggatatattccatttgtttccacctaagccttagccttggcacagtttcaatatcgaaatggatcgctgcgtcccggcggtcccaggaaaaaggcaaaccaaaaaatagagacgttaaggattctccaagtccccggagtatccagataccagaggtgctggagggcttattaaaggattacagtttctttgacagcccccaggaatgcaatctggggagctttgtttttcaaggaaactcttcaaagcagttcggataccatcaaagaagcgaaggaaaagagaagtttagctgtgtgctcacctcttgggtaacttgaatttttctgccatggaagtccttgaagctatatctttaagggatattatgacccatgctgtttttccttccccatctacttcttcaggaaaccttgctatcctgctcacccgttttcacttccactgtgaaaactctcccagtcactgggtcctctgccacccacaagcctgtagtaaagaccatgggctctgtaattagggtttaatcccagctttgtcacttcctagctgtgaaatcttgggcaagccatttaacatttttggccttggttaaaaggctttcttttcctaaatgtgaggttttcagagacccctgtatacatctctcactgcattgccctctggtgcaagacatgcaatatctggttgactactggtaaccacccctgacccccaacaggaaacaccatgtagattctttacattgtgtcaacgtgccctggggagcaatgtccttgggctgggacccaaacaatgactcaaacctaggtattactcttgtctccagttttccacttcacatgtactcttcaagcaactgtgtctggaggaaaggatggctagcagataaccctcaattatactgaaggacctggcaggtctcacaggattaaatggctgaaataggggattatgtgacagatcctagaagggacaaggtgctaggccgatgaaataatacatctttagctccaggaaataaaccaagagactgcctgtaaacactgaaagcttgggggccgggcgcggtggctcacgcctgcaatcccagcactttgggaggtcgaggcgggcggatccacgaggtaggagaccgagaccatcctggctaacacggtgaaaccccatctctactaaaaatacaaaaaattagctgggcgtggtggcaagcgcctgtagtcccagctactcaggaggctgaggcaggagaatggcgtgaacccgggaggcggagcttgcagtgagccgagatcgcgccactgcactccagcctgggcgacagagcgagactccgtctcaaaaagaaaaaagcttaggtagacttgctgctccatcaagatgacctggcatcatcttgagaggcaaggccggaatatgatggtcatttagaaaacagaatcctagtcaattgactgtgcccagtgtcaacaaagagtgtatggatagaagaggaatagtcagcgtcaagctcagagaaagaaatcaaaggtagccagtgcccttccaagcactctcttccaagtaccacagaaggtgcttgctagccggcatatttgtaatctgggccacctaactaatgtcttcactttgatt

SEQ ID NO: 914754 - DNA, 4001 bp, Homo sapiens
gctgctggtctggacctggaactcccagtgacaataaacactgctaatagcctcccacccagaaagaatggggtaccagaccccaagaaagcaaggactaaatgtaagagagagggatagcaaagcttgaggaaaagaaactcccggctgggggataactgatgttcatcacctcctgggaactcgcagttcttgagagttacacttgcagaaactaagcacctccctttgccttctgcaaagtgccttttcaagacccactaaagggccctgttccctacaggaggagggctggactagacattctctcagggtttaatctagggtaggggtgcctggaaggccaaatgtggcccagagccaggttaggaccccatgcctcaaatcgctcaacacccatccctgactctgaaaatcaacctttcactcagagatgtgacctgccgccaccccaccccacgcgtggacagccagccgcaatgaaggcaggactcatccttgctgggagctctcccaagctcatcctcctcctcccaccctccaccctcttcagggagaaagctccctcctcagtccaaggagcctttctcctctgaaggaggcctcaggcagctgcacatgccaccctgcaggggtaccggatcactggtatggcaaagttttccaagcaaaatctgcagtttctccaccagatgaaaagccaattcacctgcccgtgcaatctccttattgggtcaaaaaacagagagaggtaaaggttttattttttaaatggaaggtaaaaatattctgactacttctgtagctagaatacagctactcccacaccccaagcgagagatgcctttaatgtcccaagattaagcccaggaacaggcacttgcaaaggcccaaggtgagtgcttgtgttggggtaggcagcggtccactcgcctctggacaccaggcatcctagaagatggagcctggcccctcagagggatgcccctagggactgcccgccctaagcagctgacgtgagaaaggccccccgcacaccctccctcaaaatcacgtgttggtcagggctaaggaagagtacaactgcacccccagcctgatgcagacgcacaacacctcgccaaagggaagggatgtttctttattataaagttccctctgtgcgcaccactcctcacgtactcgaagttggagaacgttttagctgcaatttgattctctccactgcccctcaacttccacaaaacccccgacctcgaagaaggtaaggaaaatagtgcagcagtgcagcagctgggggagccagggagagtaccccaacttttaaagtgcctagtccccacatcttaacccctcgatgcctggtgagatggcatcaatgaaggagacctcttgagggtgctggggcgagcacagggctgaagaaaggcagaagaggaaggtgccctatccctcctctacttaccaggagagcttgaatcctttcattagtacagtcacgataatccactgaccgtgtccttagcatccccgttacagctccggaggtcccaggacatattggaaaagatgacgaagtcccaaaagaacagaatcccatgtaatgtgacttgaacacagaaagagaaagagagaaagggagaaagagccagaagaactgctgccactgccccttcttccccctctcccagctgaaagctgggcttggaggcaaaggacagattctgcaaatccagcctggggctggagccgcctgcccgagctgtggctgccgctgccagtttctgatgaggatgggtaatgctggcaaggctgcgcgaaacaagccctggagttgccgtcaacagccaggctggccggctgccccccaccctcacctcataccagctctgagctgctttggggaaggaagccaaggagaccctgggaggagagcacaaacctagcagaagctgcacctctcttcccccaggcggcagctcccgcagctccatataatctcctaatcaatgcagtacccaagcaaagcactgccagccacttccgcccatttaaagacacagcacatgtttagtcccaggatgggacagaatatcagggagagggtgcgtgaggaatgtggtgccaggaaggaagaggagggggcagaaatatctgaagttgagcacttctgtcagcatccactcaggggttaaaatgccccacccctgcgggggaggggaacctggaccctaggtcctctgcacacctctggaatccaagcagaactcagaggccccgtggtgagtgcctgggacatctaggcgcacaagaccaccttaaacagaaccctcaccccgcaaggcggggcaagcagggctgcgtgctcccaggcagtgtgctgcacacagaatgcacagctctctcctcctgctggggaaattgccatgacttctgggacgcagggtgaggcagcaacttctggtggcagggcagcacattgtcacctggggcaagggatccttttaaggtgaccacaaaggcctggtttaggatttaggcaacatgatcaccaatcctgggctccaagaagatgcagaccagccacagcacccagtaaggcaggaccaggattttcaactctagctggaaagtaacaattcactgagaatggggaagaggctcctcctaaatcagatcctccaggctggggcctgggagttccaacaccaacaacttccctggctatatgatccctttctatctttccctacattactatctgggtcagtaatgcggatgggtgacaacgaacaaagagattaattatgaaatagcaaccttcaactgaaccatgataataaagctttacccagaaacttgctccaaaacagttgaaccataataagcctttaccctaaaatttgcccataaaacaatctgcagacatcctcgtgtcgtatgaacatcatctatacttgaccctctaaagtgagaaaaaccaatcatttctcctttggtcacgcacagtggctcatgcctgtaatcccagcactttgggagcccaaggaggcggatcccttgaggtcaggagtttgagaccagcctggccaacatggcgaaacctcgtctctactaaaaatacaaaatttagctgggtgtggtggcatgtgcttgtaatcccagttactcggggggctgaggcaggacaattgcttgaaccagagagatagaggctgcagtgagcccagatcccaccactgcaatctagcctgggagacagagtgagactctgtctcaaacaaaaaataaaataaaataaaataaaataaaataaaaataaaaactggagtgcagaccctcgttggtaacagtcatcatacttgtaatgacttattatctgctttgttctttttagaggataagcaccatggagacaaggactgtgtgtcattcagcaatctctatatccccactgaggaggagggcttggggattgtagggtactataagcaagcgtttaagtgaccttactcaaaccgaactaaaacaccatgttatctctccaatgtccacgtggtccagaagaaacactctttaagatatactaaccttttgtgacctgattccacaagtaaaaaacgaaagaaagaaaaaaataaggtatactgagttttcagaaaggtgttcccaaagcagcccttggctgtggaattgatctatccatagccccatgccagacaaacccaaatgctgccaggacttctgaacacatccaaaattatgttttcaaagctcctggagcctgtacccaggccatactttcagcacagatattgaagggatgcaacagattccagaagtacaaagagttgtcctttatgacctagataattcactcaatggaaataccaggtcatgtgatccagccccgaggcaaatgtcactgagagtactccaggtacacgtgaatactgtattctcatcctggcccatcaactgctctgatcacaagtaacaca

SEQ ID NO: 914755 - DNA, 4001 bp, Homo sapiens
tagggccagaaaagagagaagcagggagggggtgtgggaggtgtttagtcttaggcttttaaaaaaattattattaaatagaggcagggtctcgcgatgttgcccaggctggtcttgaactcctaggctcaagcgatcctcccacctcagatcccgaagtgctgggattacaggcatgagccagcacacccagccaggagtttttcttctaggtgatgacagcttttattccttcattctttccacaagtgattgttttgcagttgcttaaatgcctacagaggtaaccggactagctgattctccactccctacccacccccaatcctcacggggcactactttttaatcatggccttgacattatcaatctcctgctccgggtggctcccaaaatcatccctttcccttacccttcttccaaggccagcttttttcatcttggttccaaacttctctaacctgccgagtgctatccaaggcaaaggctagaaatatgaccaccattcaaggtcagctgcagagggaggagaggcaggaggtagaggagcgagggggtctccccggagcacagtgtgctagcaagtaccagagaagaggcaaagatggctttctctagccctgcctgagctcttggctgaggccccggggacagagcaagctccaagtcctcccccagccctctacttcctaaatcaagcaaataactaacaatgcaaggaggtgtgggggagtaaggcccagccactgggtagctattttctcaaaatacatggcaaatctctgcgccaaatgctggctaagccaaagaataaacaaatccttttatttctctgagatgagagctatcaacttcccctttcatcctctccttctgctggccagatccatctgtcccatggccctctccctgtgggataagcagtgtctgtccatatcttcctgaccacagctctggccagctcctacccccgccggaggcactgcggagggaagccagcaggtggagaacaggagcacatggcctgtccacacctcccccagaagctctcagccagttctccatgatgcattgtgccactaattcattcctctgccctcctttctccaagttagagggcactgaattaagtcttgctggacaaggagaccatcatcaccctcaacccagcctgtctctccagcccaccccagggccacccctccgtgatccagagctcagctcaagcagtgctactatagaggagaaaagaaaaggctagggagggaaaagaaggtggcatctctgcagcatgatgtcacactggctgctttcggatccccagaacagaaaacagaagcaaacaacatggactccggatttactctgccttgaaaggtttgtgttcttggcagctctgagcagcctgcgtcagatgagaaaagcacacaaccagaaagacaggtcttcaccacagcccccagggccccattctgaccccaggacagagccaccgcttccaaaaaatcccacgaggaaacaaagatacacacacacacacacacacacacacacacacacacacacacacacacacacgcaccaggcgtcagcacgagttagcactaacctggaagccattaggtaggaacagtagcagagtgcagtgcagagaggaactcattcattcatgcattgggcagtggggggcgggggcggggagcgggggccctgaggaggctggagggcactcacctccatgaccatcccaaagccctgtttctaacgggggaggggactcgggccagggctctcagaagctgggggcgcttctttgctctgctgtttcacaccgctgtagcattttaagcatgactcccctttatttccctctcccccacctccctctgctgctgttatttggtgtggtcgtgccgccttacagaagtccctctctctctctgcctggctccctttctctctctccctctgactccctcacagacagctgttctgagctcaggcacgcacgcgcacaggcgcacagacacactcagacacgcacccctcttgcgcgcagacacgcacacgcgcacacacgcacacacgtcgcctgccggtttacataatgcaactctttggtgcagtcagcttgccggcgctcaattattcatgccagcgtggaggacagagccgctggggctgcgggggggggggttatttcctcttcaccctcaatccgacaaaatacaagaccatgttccccggagactctgctcccttcgctgccaccaattatttcccaggtgctgcccactaggtcgacctgtatcaaggaggtgacactaaataaaaacacaggtgcctggctctaaagagagtcgtgcatccttcaaaggatggcggctctctcacggcccgaggcctgggagtagaggaagagaggaggccagcactgagaccataatccgcaagaaaagatggccgagggcctcttcagtgtagctgctcccagacttccaggatgctcgcttctcccgcaggtcaggctctcacagacagcaagagtaacactcagggaaagcacttacattcgtggcaaagcagagtcgtctgggtcttctaattctaagctgcacctcttagaagtgttttttttttctctgtccattcaccgaaatgcagtattagtactcagacagcccccagaggaaagttctggcagtgcgaggtattctattcagcaacgatattaataatattttgaaagtcattcatgacttacaaagcattttgcctacattcaatcatttcattcccaccacaatcacctaaatactgacctgtttagtggatctggaaactgagtcctggaaaagtgaaggtcccatgcaagaaagaggcagagctgggaatccagatcacctgcctctagacccatggcgattaactaattgcctcacaccccaactatttgagaaccattgtcatctcttgagggatgtagcacaaaaccgacaacactaacaatgatgatggttagctcaatgcctgggaaactttaatcccctaagaatcttcttcacccacagattctgatagagcaggtctaggggaccacccaaaagtcagcctttctaacaaaccccaggcgatgcccacgttgctattccgggaccaccctgaacagcaaatgtttggcttatgcattctcatgctttgaatcttccaaaaagacagttttgtctgtccactgcagctgcataggaaaacatgctgaaggtgaataataattacaatccattgatgtcacctgcatcctgctcgaactcatgctgagagctaatatttcttgggcatctgttggcaaaatgtctcattctgggagggccagcccctgcaggctcatcatgaaaagtctttccaagattgcttctgtctgcagcccgttgatagaacagcagccgcacagtatccgggaagcagatagttctgggctgtctggccctgcctccgttacctagaggaatcccagctccaaagaaaggtatattggcaatgccccaatttcagcctccctccttgtctggctcaagtccgacttcttctgaaatgcctttctggctcttctctgttaatccacggaaagatcttggactagagtcagatctgaaaccaaaactgagttgcattgcttgttggtcacccacgtactcttatctcaaactcagtttcttcatctgaaaatgctaatactacatatttcctcctttgtactgttgaaaagatgatgaagtcaaaaaagcatgtgaaagcacccgagaacggttgggtacctctcctgcccctgcccttacagtatacatttagaacttaattgcaggttctgttgtcctctgttggttttacatccctgagaagatcgtaggctattttttctttcatgtccctccagcatgtaggagtactgggtacacacatattcagtaaatatctttgggctgggcatggtggctcatgc

SEQ ID NO: 914756 - DNA, 4001 bp, Homo sapiens
aatgtgtcttgctcacaatgacctctgagaccatttagtgaatgttcctttctctcccttgccctccccctgattcccagcacactgctacatcagccacctcagggcagctctctctaagatgcatgcagatgagcggaaaagagatttacattaaaatacggaaatgaagggatatagtgccacacagggaagagggaaatcagaaagaagaaatgaactttattttcctccagctcgtggactcagcctaattaactccgttttatgcacagtccacgagaaatgatgcagtgttgaggctgggcttagctggaagaaattcaatagctgcgtcccattaaaagacagtagaggagaatagcaagaaaagccaaggatggagggtgtccctggaaacagagtcgaggtagagaaataagggcaaaagcttcaagaagaaaacaaaataaaaggggagaagcttccaggaaagggatctaactttggaatctgctaactggtagcaagaaacggcagggcgtgcgggtggaaatgtctttttcctcaaacagtgtctttctgtaatagcaagaaagctgcggcgtccagaatgggaagaagtggattttttttttcttttttaaacaaactcgacatcactttatgctttagagaaagggatggaaataaatatcatataaaatacaaccaaattccccgaagactttcccccaacttatttcaatcctacttaagcgactataggtaaaggtggaaatagggctatgggctgagaacgcatgggtgggctgccctgggtgtattccaacggaacctgcactaaagaggaagtctttttgcaaaggagagaaaggaagaggagggaaacagaggggaagggaactgctgaaggtttccctgaattgcttatcagcaactcatttaactcactttcggatatctgctacaaccagccacatgcacaccccatcggagcacaccttacctatttgcacgctgctcggaaaggctcccatggcgagtccccaaaatccagaaaataacaagacaatctgtctggaaataatcctcatcttcttttctcctctccctggcgcgcgctctctctctttctctcgcactcttcctaaaggctgttcagagaagcattgaagacgatggcgctaaaattaaaatcaaccaaaaaaaaaaaaaaaaaaagaaaagaaagaaaagaaagaaaaaaaaggaaagaggtttcggtggtttaagattatgactagttctccttagcaatccatcgcgagccgccagatttttcccgcagtctccatagccctgggagaggttttctgtccggctgcaaatgttgcacatgcaaaagatggtggtggagcgtctagtggctgctcgcagggatgagacatgcgctctatctttgcctcactcgcactcgcgctcgccccttgctttctcacatacacacaaacactggcgccgcggccgccacacgcgctctccagctcgcatcagccgacatcccccagcaagcctgcaccagcccggagcatcgctgccctcctggcgtcccctcctcgagcgcgcactccctccgcacgcccctcgcccaccgctcggctggcttcaccccctgggtgctcaccggagcgccccagtctcccggacgctccggagccagtctggtgtcaggttttcccttctgaccactcgctgactccctcctcttttcttcctcggttcgcagagggaccgactctggggatgggcacccccagcgcccctctcttggttttcctggcacctctgcttctcggctgcgctaggcagaaaatccgcccacgggccaggtctgcaagccccaatcgggggctccggggggttagtacctccccatgcccccaggcccctgccgcatccttgcaggttcgtgaggaggacgggctgcctccctctcctacagtcctggcttccctctcagcctagccctcttctgccactgggctgcgcgcgggggactccggtcctcgctgcagcaaagatttctcaccagcaaacagcccgggaatctggagagcctgacaagggaatggatgaggtgaaagggttcagagagggatgggaggagaaaagacaggcaaagggcagcccctggcgggtttaagaggccaggaccaggatgaaagaattggaggaggtaaggatggggaagagagccagagaagttgaaacatcctgggaaggggaggagggggtaaaaggttattttaaataactgacgaagtttagggtactgaacgggatggggaaaagactgagaaatgaaaattgaaagaggcctctaacattctcttggaaaggcatgaagcagggataggaataagaactgcgtgaagtgtaaagtaggaaaagtgattaaagattcgattgctttctatacagtcacccattccggaggactctttccttctgtgctgtggcccattgcaggagcaggagggacacagcgcaaaggctgatgaaggaccagaggggcagtgcttggggcagtgggcacaggtgtctgacaggaagatagtgtttcgtgcacatctcctcttgtctgggactctggaatgctcactctgctccacgccacctccaggtagacttaagcacttcagtgatgatgtcaatagttgttttgactgggtagaagtgaaaatgaattatcctagaaagttttggggttacagtctcacttgctctccagagtcacctttaagattgtcctttcatctgcctgtcctggactgagcttgaaccacactcagaagcagtcactgtggtagccgtgagtgaccggtttctgatttcctctgtatggtttgagatttcctgatctagttagtaaatacaatctcctgttccaataagctgtgtgagagaatcattagaaggagaggttctccttaaacgttagggaacctagggtgatgtctgccattaaatttttaaaaagaatatagcaaatgcctaggtttgcctgatataatatttgagactacaatgcttaaagtggaattcttgcaagggacttacagaaagcctggtaacggctttttgaaatatacattaccttaactctttcaaaatactttatttggtgtcactgattacctgtatttgtagtttgtagatgacattttaaaatccctgctaaaacttgagtgcttttctatttcctaagttttgaattttatttttaaaattgcatctttaaaataagtgtctgctttcccgttacatttcaccacagattgttatgaaaaaaaaaacctaattgtaactgtattttacaaatcatacatttgtcattttagtttgtgaagttttagtcttgcaagtcaagtgaaatttgaagcatttttcctttttttatttttctgtgttaaaaaacaaggctgtgaataatagcattctgttttctcttgaaaaaggataatagagtatgacacataaaattcaagttaaattaaaatttcaaaatccaccaaactgttaaactcatcacttgcttgggtaactagtgaagctcttcctgatccagaggcaattattaactttaattcttctcaaaattgaaagatttcagttttcatatgatgtaatagcatcattgatatagatgcaggacaagttttttttccccacttaactgtcatgataacacctggactaatataaccacagatgacacaactatatttttccaaaatagtaatccagttgtttttaatttctattttcccaagtagttaaaacctctattttactttctaaacctaaactctctttatctgtattatatacacatatatttataaatgtatgtatcaaatatattttctctgtatgatacatagaaatatcatatatacatatattatatacgtatatacatgtatatagatgtacatatatgtcaaatagttatatattaagcacctatgatgtgtatt

SEQ ID NO: 914757 - DNA, 4001 bp, Homo sapiens
agagaaagtcaggaagaagcaaagagagggaggagaagaaagaaaagaaaaataaattaaggaaaagaaaaaaaaaacaactaaatatccctgaaacgaagtcttgtttttaactctgatttgtcctgaaaccaggcaactgtgggaatcttgaaattctttctaaaaaaattaaataacaaagaggaagaggactccattgcttggtttcagttctcttctaatttttcatagcttatgttttacttacaggcgtttgttacagcaaaactgttggctgtctcaatgttgtccacatgaggtaccaaattaaaaggagcttccgacgcattggggctggtgttatgaagaaaaattgctaatcgaaaagcagtgtattcctgatctgtgtttcggatgaagagaccacctattaaaaacagcaggaaaagcacattcactgtttcctcttgtcaacattatacccaccccaagcacagtcaaatctactgccattcacaagcacatacaattaaagagctatacctgccacatctagggagactgccctttgtccctaaggtgcatgcttagtatttagtctttagagcagctcagctttttcttgtcctaatgtgtcttgctcacaatgacctctgagaccatttagtgaatgttcctttctctcccttgccctccccctgattcccagcacactgctacatcagccacctcagggcagctctctctaagatgcatgcagatgagcggaaaagagatttacattaaaatacggaaatgaagggatatagtgccacacagggaagagggaaatcagaaagaagaaatgaactttattttcctccagctcgtggactcagcctaattaactccgttttatgcacagtccacgagaaatgatgcagtgttgaggctgggcttagctggaagaaattcaatagctgcgtcccattaaaagacagtagaggagaatagcaagaaaagccaaggatggagggtgtccctggaaacagagtcgaggtagagaaataagggcaaaagcttcaagaagaaaacaaaataaaaggggagaagcttccaggaaagggatctaactttggaatctgctaactggtagcaagaaacggcagggcgtgcgggtggaaatgtctttttcctcaaacagtgtctttctgtaatagcaagaaagctgcggcgtccagaatgggaagaagtggattttttttttcttttttaaacaaactcgacatcactttatgctttagagaaagggatggaaataaatatcatataaaatacaaccaaattccccgaagactttcccccaacttatttcaatcctacttaagcgactataggtaaaggtggaaatagggctatgggctgagaacgcatgggtgggctgccctgggtgtattccaacggaacctgcactaaagaggaagtctttttgcaaaggagagaaaggaagaggagggaaacagaggggaagggaactgctgaaggtttccctgaattgcttatcagcaactcatttaactcactttcggatatctgctacaaccagccacatgcacaccccatcggagcacaccttacctatttgcacgctgctcggaaaggctcccatggcgagtccccaaaatccagaaaataacaagacaatctgtctggaaataatcctcatcttcttttctcctctccctggcgcgcgctctctctctttctctcgcactcttcctaaaggctgttcagagaagcattgaagacgatggcgctaaaattaaaatcaaccaaaaaaaaaaaaaaaaaaagaaaagaaagaaaagaaagaaaaaaaaggaaagaggtttcggtggtttaagattatgactagttctccttagcaatccatcgcgagccgccagatttttcccgcagtctccatagccctgggagaggttttctgtccggctgcaaatgttgcacatgcaaaagatggtggtggagcgtctagtggctgctcgcagggatgagacatgcgctctatctttgcctcactcgcactcgcgctcgccccttgctttctcacatacacacaaacactggcgccgcggccgccacacgcgctctccagctcgcatcagccgacatcccccagcaagcctgcaccagcccggagcatcgctgccctcctggcgtcccctcctcgagcgcgcactccctccgcacgcccctcgcccaccgctcggctggcttcaccccctgggtgctcaccggagcgccccagtctcccggacgctccggagccagtctggtgtcaggttttcccttctgaccactcgctgactccctcctcttttcttcctcggttcgcagagggaccgactctggggatgggcacccccagcgcccctctcttggttttcctggcacctctgcttctcggctgcgctaggcagaaaatccgcccacgggccaggtctgcaagccccaatcgggggctccggggggttagtacctccccatgcccccaggcccctgccgcatccttgcaggttcgtgaggaggacgggctgcctccctctcctacagtcctggcttccctctcagcctagccctcttctgccactgggctgcgcgcgggggactccggtcctcgctgcagcaaagatttctcaccagcaaacagcccgggaatctggagagcctgacaagggaatggatgaggtgaaagggttcagagagggatgggaggagaaaagacaggcaaagggcagcccctggcgggtttaagaggccaggaccaggatgaaagaattggaggaggtaaggatggggaagagagccagagaagttgaaacatcctgggaaggggaggagggggtaaaaggttattttaaataactgacgaagtttagggtactgaacgggatggggaaaagactgagaaatgaaaattgaaagaggcctctaacattctcttggaaaggcatgaagcagggataggaataagaactgcgtgaagtgtaaagtaggaaaagtgattaaagattcgattgctttctatacagtcacccattccggaggactctttccttctgtgctgtggcccattgcaggagcaggagggacacagcgcaaaggctgatgaaggaccagaggggcagtgcttggggcagtgggcacaggtgtctgacaggaagatagtgtttcgtgcacatctcctcttgtctgggactctggaatgctcactctgctccacgccacctccaggtagacttaagcacttcagtgatgatgtcaatagttgttttgactgggtagaagtgaaaatgaattatcctagaaagttttggggttacagtctcacttgctctccagagtcacctttaagattgtcctttcatctgcctgtcctggactgagcttgaaccacactcagaagcagtcactgtggtagccgtgagtgaccggtttctgatttcctctgtatggtttgagatttcctgatctagttagtaaatacaatctcctgttccaataagctgtgtgagagaatcattagaaggagaggttctccttaaacgttagggaacctagggtgatgtctgccattaaatttttaaaaagaatatagcaaatgcctaggtttgcctgatataatatttgagactacaatgcttaaagtggaattcttgcaagggacttacagaaagcctggtaacggctttttgaaatatacattaccttaactctttcaaaatactttatttggtgtcactgattacctgtatttgtagtttgtagatgacattttaaaatccctgctaaaacttgagtgcttttctatttcctaagttttgaattttatttttaaaattgcatctttaaaataagtgtctgctttcccgttacatttcaccacagattgttatgaaaaaaaaaacctaattgtaactgtattttacaaatcatacatttgtcattttagtttgtgaagttttagtcttgcaagtcaa

SEQ ID NO: 914758 - DNA, 4001 bp, Homo sapiens
ttaaatagtctattttaacaccagcatgggcttatctgacacctgagaccttactcagtcagaaggaatttgaagtctggcctcctttctcagtcacttcctggctggatgaccctggacagggtgcctaacgtctctggactccagttacttcctctgaaaagcagaataaagaatatcttgcctagatcagaagatctctggaaatcccttacagctcatagagctacaactgttcactaaacggcctctacaaatgaagaattttttgccttttcatttgtcaaataaaatctgaggcctagggtaataggcaaagaacaggctttaaagtgcaaagcacaaatccaggctgccatttactgtatcttggatataaaacttaacctctgtgggcctggctcagatttttatcctagagacaatgacgcctactttcaacacggctcaaggggtaggaaacatagcatcatccttccagcctaataccaaagtcacaccccaagcccagaataaccacgtgtgtctcaactctttctcctagatttcctgtcttgcttttcactctctataggaaaagatggttttgtccattccctggcaactaacgtgctattagttaagttttctcatgtggccaggtattacctctgaattataagtggaaagactgagatgtagaaaagagccagggggcaggagtaattagtgaggcaaagcctgcagccagaccctgtatttctactccggtctcattaaccgtgagcgctgccgggcgctggaggcccccttctcctacctgtcgtccttcctcactcggctgtgttctgttgtacctcgtacaatattggatctgtaaaacgctttatattcctttagccaacacagggatgattcagaacaagattgggttattacaaattcaggaggcactacacacacggctgtcatgtttcagttaccctttctcccggtttaataaaatttgccacactaatacaaagccatcttttatcgttttccctgcagttgtaacaacttgtccagcgcattcctgctaattaaaggaggagaggatgcagcagctcactggaaagtgggcttctagggaggctgtcagtatctttgcagccacttagctctggttcttagagtcctttaatcgccggctcctccatgacatgaggcctaatgaggtcagcagccggtggcgacatggcaggcagtcccgcgtggcggcggccgggacagctgggcgcgctggcaggagagcaggcacagcgctccccacaggcaggatgacgcgggctccgcagcccgtcctcccacgctgccccgcatcactgcctcggccctgacgtgcgtgcgacagactcaccgcaaacagtccccagcgggagcacgaggccgggacaggaggtgggcggctacacaggacaccccaccccccccacccccccgcagccggcggagccgatcgccggaaaagggaggcggtgggcgaaaggaaagcggggagctgggagaggagctgtaaacaaagagctgcccttgtgcgaagtcctgagccgggtccagtcagcccgcttcctgtggcccacgcactgcccgccggcccacgcgggagcctcgaggggcgaggcggaggctgggcgcagtccttgcagccagcagccacctccgcgcgctccgccgcggtccagctaattacctgctgcggcggcggccgtgccctttagggtgcattagtattcccgccgcgggcgctgccctcgcggcgtcggcaccgatgcccggccacctccaggcccgaacgactgcggctgcgggaaggcgggtcgaggggggctacggcaccccagggagaggccgggagccgcccggacctcggaggggatggggtcctctctgggaggcacccgtctccttcctgggtcctaagacccttcccagccctgcgctccgaccccactcctcccgaaacgtcggggaatcgggaaaggagggccacgggcaaagcgggggcgggcgccccctgattagcatgcggcgccggttgcccgggcccggattcccgagccccctccccgcgagcgcacactaataagtttacaaatggaatccggtggcgccgcttgcaataaaaggcagaagctgcgctccggcgcttcaatgagagcattttcccccgtaacaaggggctggattcagctgcctggtgccgtctgagcggggcgagttgccagagtaaccaaggcctagcgcgcacgtggggagagggagctggctggggctccagcgctagccgccgcctgcgcgcccgggcccttcctcaggccaccagccactcctccgggacattgcctcccccaccccaacttccccactacataaactgcctccctacccaccccctaacctttcaaaggctctccggcagcttgtgttaaattcatgagacacaccgggaacacctcctccgcgatgggaaaataatgtttaggcctggagtgtcactggagagggggcccagacggtgactgtgctcagagcgggcgtggaggcacaaccgaccccaggtgtgggaggcgccagaactggtgcaaacagcagtgaaacagcaggtggagattccagagccctgggtagctcaggaggtaggcttctgaatgacctggggaagggtggaggggaattcagagccaactaaccctgagtgccacatctaacttcctgagaggaggctccaaggacgggagctccagaagttcctggggtctagcagctgcggggagaccagctggaccgtgagcaaagcacccatctatcccacctgtaacacagggctggctgctgctgccttctcccagcctttggcctaggttggtttaaaaaaaacgagttcaaaagctgaacccgcttttggtcttcagctctcaaaagttcacattttgctccagaaagttaaggctgctgtccaccctacttccttcccagggaccaaaaatatagggattgtttctctctttttacaagcttgtcactgggcacagggttcttccaggccccagaagttgttctctggagcccagagaagctggatcccatagttcctctcctgaagctaggctgagggctgctaggcagccgccttccaagtggccacatgctagtatcctaggagatgtacacccaaacacagtgcttaccggccaagcaatccctatcccacatggacaaagaggctgatactagacactgcgagtatgtctaatagagaaagagcccacttcctctgcaactgacaaaagaagggagctgattcccgggttttacccagggagacagtgaagtggaaagacacacttcaccatccccgttctggaagctgggcaagctgggtgccagcctgcatgactgacatctcggcagtcacatacatccacagcccactggacgtcatgcttccgcagaaggccaaaatagggtcccccactgccaccaggcagctggaccctgcagaagagggctggctgcccattctgatcccctgacctggctcctcccttttccacacgataccccccatgcccaatcatcactaagtcctgtgggttctaccttctagaaagtctctcaaattagtccaagctgcacacatttctcactagcactgccctaccaccaccagaggatctcaacctgttcccttttgtgtaaatctccccagccatttcctggcacccttagcctggtatacaaggccccccatgaactgatcactgtcacgtctccagcttcttctctccccttgtaccctggctccagcctgcttgccatgacccaaacacaaatcctcacttacttctgtgtgtgcaagctcttccccagcccccaccagcctcacaataccctaactccccttcttcctctggttggttcctttacatccttctaggctcagctcaggcatcacctcctccaggaagccctccccagct

SEQ ID NO: 914759 - DNA, 4001 bp, Homo sapiens
tgggtttcaggtggcaggtccagaggaggacagaggggtggagctggtgaggcaggcgggaggctggtgggcaagcccgggccacaaggaatgaacaaaatatggaaaattaaacaaacccagacactgtaatgtgtgcatattagattaactctccgaagggtcgtgaccttgaggaacacatctggccagtgagaaaaataataaacctgattaatgatgaagcctgagctgcagcttcagcaaataaagccagcatgatgacgcccagtggaattccaggggctgccatccctggtgggaccggaacacagtggacctcgacaagcccctcgcccctgaccacgcgagcacagacagtcagggagtcaggcaggaccggatttgtctctcagatgcccactaccaacccaggcggcctctctccccggagataccacgcccgcagtttcccggtgctcctagaagtgtcactaccaaccaggtgacccatagggagtgaaagtgaaggtagttctttgttcctggcagggctcagtcctcctgaccagccctcagacctcttggcctggtcttgacagctgcccactgcctggcaaaagggcccagctgtgctcagagctcccctcctcttcccagacaacccagacccttgggagacatgcccaggagagccactggagggaggcagggaggtggcaccgcgtggcatcaccagacaacagcaccaagaggaagatggcagcatcaagtacagatgccaagagccacgcagcccaaggtccagcccgggagtggctcggcccgcattgccccaccactgccaggcagacgggccagaggcgcccggggcccagccccctcggccgcctcctccaccaccccaaggccctcagccaactctccccaggctccaactcctcccctcactttgctcagctcaagggagccagggaaagagacacaggtgctctcagtgccttgaaccccctgtcccagctgtcgcctgcacgccctccaccccagccaggtcggagcgcacagctctgccagtcctcactgaagagaatctaaatcagctcccctccccctccgccccagccccctcccccatcacgcgcccattgcaggtctctagagtttctccctcacttcccactcggatgaactagggtgggatgggtgggagccccattctccccgggaaagaggatcatttctgataggacgctggttcccccaagcaaggcggtgtgcagggtgggggggtgtggtggtggcccgagtccagtgcaggggcagggggcagtcgaggcagatggcagtgaggaaagggggagggggcttggtgggatgccaggctgagccgggatggggggctgcagccggggaacagaggcgctgggagaagcggagggtgacgaggtgtaggggagacgcgccaggctgggaaggggctgtcatccctgcaggggacagaggcagggctgggagttgcacggggagggggaggaccagagcgggaggaccgcgagcccggggaagggatgcggagggagggagacggaccggggtgaagactggaggaactacgggagcagagcggtggggggttcggcggcgaatctggagacgcagggaccgaagtgccagggaccgggctggcgggaggcgggagcggggaggagggcgcgggggcgggggccggggcaggggtgcggggccgcggcccccgagggcaggagcggcggagacgtcagaagtcggggtgcgggaagggccagcgcggaggggactcgggggcgcgggggcagcgcagggagcgggccgggggcgccgcggggggccgctgcccttacctggtcggctccgcactccgggggctgagccgggggccgggcgctgccgggccggccgcggggctgctgttggccgtttttcctcttccgcagcagccgtggcggctccagcccgatccgcccgcagctgaaggcagtctgtgtccggctgcgagcgagcccggcgcggggagcgcgggaggagcgcagcgaggcgcggggcgccgcccggcgggcagctggggaactgctgcggccccgcgcacggccggccgggggggcgccccttcggggccgggccggagccccgcgggcagctgcacgcgccccccagcgcccctcggagcgtcgcccgggagcccaggcgcgggggcggcgggggcggcgggaacggcgggggctgctgcgggcagggcgggcgcgggtccgcgcggccgggggcaaacttgcggctgcccgggggcccggggccgagcgagaggcgcccggctggggagcggcgcccggcagaggctaggggcgcgcggccaagcgggctctgcgaggtacggacctcaggtggggaacccggcgcagcccgcacactccaccgccctgcgcaaaggggcagcccgccccggccccgaggagttattagcccggcggcttcagcgagcaaggggcgccccctggtggcattcgggaaacagcgcgggggacgagcgtgccccgttagaagagactgcggcctcagtggtgcggaagatggagaggtggaggtttcatgggacgagacaagagcaccttgttcaggagactgaagagcaacagcttgcatggagtcattccagagcactgttgtatacataccaacatcttgggaggatctcatgttacgcatgaagatcctgaggctaggagaggtgaagggaccaggccaagaacacacggggagcaagtggcaggacccaggaggcaaccccgctttctgacgcgcggttcatttcagtacaccgtgtggttcatcctaatacaacagagttgcccttaggaggaggctgggtgaagagggagtcctgggggaataggagggagggcaagggacacgtgaccccctcaaacctattagctccctcttatccaacccgcagagtctctgtcttgggcagaccaccaaactgatcacaccggccctctcaccttcaatggcctgtatccccacacccaaccaccagcactcccacaatctcattaagctctctgtgaagggtttgttcacagacgtccttggtcaggtctcacgcatgaggcatactatcgggactatagactgttctggacgttgcattccccggggagggctggctggctagcctgggcgcgtactgggcctcctgcttcaggagtcgtgcctatccctcccccagctccacacactggctggatgaatgccatatgcgaacagggctccattcctccagccagacattatttagcacctactgtttgccaagactataccgcttacacaagtgtgattcccaataatcaactttgcaaggtaggtgttgaggtgacactagtcccattttacagaggatgttaaacctgttaaggtttaagagcacctgtaagccagtgacacaaaactaatttctaattccaactctattcccccactctggaaccccctctcttgtgcaaaatggacggaacagcagcataagcctagcagaaagtgtacggggctgggaggagggagaggcatccctgtgatcccagcaagcgatttcacttccctggacttcagttcccataactctaaaagtgagggaagcagactagatgatctctcaagccgcgcaaactctgaaatgccaagcatggatccctggcccctttcacgggaagaatgcaagatcagcgagaccagagaggcttattaagtgtttggaaagaaaaatactatataagtgaaatgcttcatcatattcttttgcctggtgatctcatcctattaaccagggaagcggggaggagcttttggcaggtcagagagattgctgatggctctggagatagtcttggctgtggcctcctgagggccctggtttctccccttcttgcaagaatggttctgactttcttttcctttcttaaggcctctgcccctagaagcaggga

SEQ ID NO: 914760 - DNA, 4001 bp, Homo sapiens
ccataaggtatactataaagtgatagtaaaggcctgtgtctacctatggaagaaaagtgaaaaacttggattattcagataccaactccctctcccaaatcatctcgacacatcctttcataagtgaacattgaagagtttgggctttttgtgagtgtgtagcccgcagccaaaacattcccgtgtgatagcacaaacctctaggggtgcaattaaaatatctagattgtatattttgtcatgtggagtgtaaatgactagagaaagctttttctcttaagagaagctgttatttaggaagtgctatgtacatttttctcctaagaaacttgaaagatctgtccagagtgctgacaagatttcacagggagaaggctggaaatttgacgggacgcacactactaacccaatgagttcaggacgcagtattttcaagtcctaaaccaatggcatgtttaaatggaaataaacatgcataaaggacagaaatagccacaattgattcttacatgtgtaattacattgaggtaactgagaaattaaaggaggaaactccctgcactccataaagaaaacagcataaagcacacctaacaagaggtagcatacctgaacactccacagctgacagtagaatgtcatgcaactaagacttccacagaaaacccctgcttatgtcccactggaggaagggctgcacgtagtcctggtcaatgcacctttggctgcttcaaatggccagtgcccaggattagagacacaaattagctctagctttgtcctgagaaactctgaacaataaaatcccatgtagcgaatggagaagaaggtgaaaaggagaagctgccttctcactggtctgtatcaatttcttattgaaaaagtaaagtattggagaccctatcttggttactcgatgttaacagtccagctaaggcagcatcaagattgtgtctaaataagcacaagcgcttgttatcctctcctaaatttcccttccacacagcaactcctctgaaaggaaatgagggcagctgtaaattcgagtaccaggtgaaagagccctccaggtggacctgtcacttccctggagaggtcctaatgcacgttgggctcgggccaccggctagcctccgcactcacgggcctgccctgggttttcttccctaagtcgctgtagcctgggcttcctccttggcatgccgctcatgcccccgccgtgggataactagcaggctttgtgttcgaggggaaagataaatccatggaagaggaaagagcgggagggctcaggctggtgttcaaagagaggcaatatagcctgagtgaaagagatgtgctttcagcaccacccgctgtcccccctcttcctgcagcaggcgccacgaagcggcccctaacagatctattgaaaagcaattctctgtcctcttttcctctccacctttgcttctcacaattccgagccctcgggtggtttgtgggagcacactctgcattcgaaaccacgcgcacctggccttagagagcgggaactcggatgcgaaggcatgcagaatctccttttcaacccttgcagctcttccctccttcaccccattgctcgcgcctttttccccaacaggtttaattaaggctgttcgcaaatggaacagacttgaatcttgtcggctttggccacccctgctccacccgcgtccccctcccccaaaccacactatgagctactcagcaagcctatagatcctaaatccttctctggccaggggacacttgggcacacagacacttagcaagcttacccccctgttggctgcgctgcgagcagtgagactcggtctagctagccccccgaaaagttgggccacggggatcagcagggcagagccggcctctccagtccccggcttcccccccaagatgatctcaagctcattccctccgctcagcgtgcgcagaacagccgagctgagggcggcgtgtgcagcaatctccccgctactgagaaaggggggatggggggaaggggagagagcggaggagggaggggtggtagtttgtatttatagagaacagagttctttgcgcaactttttggtgccaccaagtggcacagtgagttcctttaggaacatagactcctgggtgaatctggatgggtagaccagctctgtcaacagatgctcacatggcaagggagctggaggcactcccaggacttacttttcacatgtttaccgtcatatctcagcacctgggatacaaatccctaaattctaagaataaacctgtattgagtgagaaagggcacctgtgccttcctcagacaggtggaaggagtgtcaaggacatggtaggtcccagttgtctcctaggagtgtagacatccttgtctcagggggaatatccattatcttcttcttcctaacccctctgcctagattacattgcatttatgttttactctaaaaccttcttcttgctgccctgactacctaatctttaaactggattggcacttattttccttgccaccaaaccttcttcctcaatgctaaccttaaaaatagcatatgacttgttcacaacgtgcaggtttgtaccctagaacttaaagtataataaaaataaataaataataaaacactaaaaaaatagcatatgactttaggctctgtggatctgaacatttctaaacagctctcagaactccaagttcactgagctacaggctggaggttggattttcctcactcatttccacagacctctcagcatgcattatcccaacagcacagtcaggatcttgccaactgcctttagtactttgaggaagaatcccctgaagcttcctttatccatattttatgagtgttcttacttcttagtatgcagatcttcaaacacatacatagacactactgcatgggaccttcatgtccccaaatgcagaagatcctctacattgttcaatagagaaactgagtacatgaaggttaaggggcttgttcaaggtcatgtttctctagagatctgtccaggaactacctagggtagaactgaatgaacgcagtgatgccaaacccgatcaccctgttcttgttccttctactaccccactcagcctattcaggcatattcagctcccttctcttccctgtattcatttttcatattctctctctctctctctctctctctctctctctctgtgtgtgtgtgtgtgtgtgtgtgtgtgagagagagagagagagagagagagggagagagagatattatttttgccaaagttccataaaggaaccaagagtaaacatgtcttccaagctccactgggagtatatgaacttgagtttataggtccagagctgcaggtgtaccatctttacatgacccacagttccagaaaacctctccctcctagtactgtagtccttttagaaacggaaactgacatttacacccagtcgggtcccttctttgctgcctctttttggggtgaagcaccagcaactgccattagctccctcaaacacctaatgggctcaaagatagaggagcccatctctcttcctaaatccttgcctttcgtgcacatgtattggcatcacacacacacacacacacacacacagacagagggagagagagagagacagacacacagagagagagatccaaacgtatcctttggctcggatctttatcttttcctcctctgttttttttttttagttcgttttctatggaaacaagcccacttaaatccctcacttatgcaaataaaagcaaaatgatcttcataaacctcccattggagcgataccgcggtagcccaggctcctgacttaaatttatgtctgattcacacagcacacgtccttgcagggtgacttttctaaacttgcaggacctcgtagcgttcctggctctaccagccctccacctgcccaccacttgccctcctgggtctttttagccccagctcccgccccttgctt

SEQ ID NO: 914761 - DNA, 4001 bp, Homo sapiens
tctcctttgccagattgcaatcccactgaagtctgtgatatagaaaacaaagggctatcattcacaggacggtcagagagccttgcatatgtatttgtgcataatatgtgttgcataaatatattcctaacctctgaagtggggttagtaacttaattccacattttaccagaccgaaatatttggactatattgatatgttaatgcagaattttaagaatctcaacaaatacaataattcgatgatttataaaaagtattttgtatcttcttcagtattctatagtgtttaatatacacatttttttttttctagaagaagagctgcataacaagcgagtctgcccatttgggtcacaacctctgtaggtcaaaacaaattttttccaaacagccatggtcaagaactaatgatttttaaaacaccataaaaaacaaagggctacttattattaactattataaaacatcagtcagatttttctttcctcactattcttggagcacaaagaagcaataaattttaaaacaaacatgttgaattatttaaaattatacttctcaaatatgttctatacaaggataaaattaatttattcttatctccattttggatttgaccatgaattcttctgaaaaaatagctgtaagaccaaactttttggtaattctctataacaacacacctaggttagaactggctactaccttcaatcctatgtgtatttatgtgtaccttgctttaactattagaaacaataggcacctagaacaatcgcgaaatgacaaaaatatgaggtgttcaatgaagatatagagacttgaaaacctctagtaatgaatataaaaaatcattagagtagaagtataatatagcatcagtatagcagaagtaaataatgtaattcacaatgaaaacaaaattatatttcaccaaatattggccacatacacccttctgtagtttaagtctttgtctctctagatatatgccatccagtctgttcttatagtactggtataactcggacaattcaaaatatccaaaataattaggaatagtttactcttcccaaacctgaaattgtaactgttgagtgcataataatatatactcgatgtatgcaaaggaaacttaccttctgtgtgcacggctgatacataggtccagttgtacctcttcactatgtccaccatggcccttgcctgctgagcatctgaaggcacaaccctcatgaaatatttgaacagagtcttgtcactcagatccatgctggttgctgagtaagcaatctgaggtatgttgaaaagctggagcaaattctggacctgaatggctacagaactggagccaggcccaatgacccctactatgggcttcttggagcggaaggaagaggaggagccatccacacagcgtaccaagccttcttcctcttctgaagaaatgagggaatctcttatgaactcaatgctctgctctagggccacagccgaatgccagcaggagtcccttatctcacagcccagtgtgatgttgggcaagagtgtggggtctgaattgatcctttccagggtatgcagcatggcctccactctctgaatgccatactgttcacggaccgccccacacttcctctcatgaactttgtccacagtaggctggtgatgaacagaaaagagagctccaataatgatgtcacccggcatgtgagccaccaccctcctctcactggactgtgcactcccacggacatcttctttcaaaagtaagactgacaggatcaacagaaggaccattttaggaaaggagttcaagccaataaagatagcatggtggggaaaattcaggagggttctgatagctacgaacaagcgatgtcctacgttgagtcgcaaatcaagaaattagccagcaattcagatgtattttctaaaggaccattttgtccccatgtaccatttagttagatgatccatgtggtcatgatcttctaaacctgaaaaaaaaaaaataacatgggtctttaacaaacataaatgcaactagtttggggaagttctataatccatgttagcagagaaaatattttgatgatgcagataacgaagaaaaaaaattcaaaaacgtttctgactttcctttgtctgcttcctttgtgatttgatgaagcagctgatgtagcttcttgaccctgccttgcttagattaatagtctttttttgttcacctgcaatacacaaaactaaatcttgagtgtggcaggcagaactgtattgtaatctcaggcagagatgacagagcatcctagaagcaaaactacgccatgaacagaaaacttcaagaagtatgcaccccagaatattaaacattggtgatctcttggtaatgaaagtgtggataactgttgttaaattttcattaggctttcttttcttttgaaatctttagccttgagcatgtaattaattatgcaattacaaaaataaaattatcttttcaaaaatacctcacatattctctctccaaatacaatgtcaagcaagttgaataatcttctcaggaataaataagtattgtctaattaatgtggaagatataataaaaacaaatgaagaaaggtgggtgtttcatgttaaataaactgtagaagagaaaggaaaaggttggggaattatagagtacaacatcccccaaataggctgcaaggaagagtcaaattagcaccaatttttagagaaaagaatattcacatttcaatccctgttcttatattaagaagtattagtaaactgtttaacctcttggtaccagaatttgctcacctgaaaaatggggatactatgtgctaggctgtcccttatgggaatcaatacaagatatcaacgaaataaacgctttacaagttaaaaagtgctatatatattcaaaacaacatcttgttgttattaaattttcaagggcattttgtggctaggtcatgaagacagaaaattctctggcaacctacttggtcctccagagagtcttcaaagtaattacacagtcttgcaatacatttcacagtaatcagtcctctagccctgatccagaaaaacattccacatcactaaggctcaaaggctaaaaggatgtatgtttggaactattctgccaggtagaaatttagtatagctatgaatgtcatcatctatttcaatttaaattcctgggaagaaagaaattttgtcccaaattttccatggcaaattctagcataatttgtaaaagagaattgacaaattagtgatttgatcacttaggggaattgtgtaagagacttactttgttatcaactttgccagccaaggatctcaaattattttaaagtgactaactttctaagcaccaactttcaaatacaggtgatgtttcttcaggaatgtatgtaaatatcgcacttttacaagaatactaatggtttcaaaggtcatcaaatctacaaaaagttaagtccagacacaaaatgaatgtaacttgaatcatgtttctaatcactcctaccatcattttcactatttccttctactgtttcctatggcaacagagaaagtcttcctatgtacagtgacaaaagctaaactttttaatatttcatcaaataaccagatgttccagaataactagacatttgggaatatatagaaaaaaatagttttggtacaaaagttggcattgtagatacagaggaagaaatgaagactgttagatttttcattggcaagtcatttgaatattaccaaacctttctttcactttccttagacccaagcttaaaataattattctcatggtcatgtgaattctgctgcagacaaaaagaaatatctaaagttaaagaaagcacaatttcttattaaatcagaatgttagcgagtgaacaaataacaaaacacgactcattttttatgtaagaacatcaaagtgatatgagagacctggtgtcctgtcaggctcgtgt

SEQ ID NO: 914762 - DNA, 4001 bp, Homo sapiens
ctaaaagtgccagcacctccatccagaaactggcgacaaatcctcctccacctctggctactccaggaagccctcgccaccccaggagatcagaaaccaccagttgctggaggtctctgtccttgcactcgcccccatgacccgttacttggctggttgatgtcccaggcaataagggtgcaggttgtgtcttgtcccaggcccctgggcccctggcccagagctgacccagcccctgcaccctgacccaagaaggggtcagcccaagccacctgaggggtaaggggggtgagggcacaagaagcccctttctttgttcagcccccagtgcccaaccctggtgcagatgctcacatagttggtgtagatgagggagatgtatttgcagcggaggtcctccacgccgtcattcaccatgtccaccagggctgcctcctgctggtccttcccatagagccctggggttgggtggaggggagcaggccgcgtgactgggcgcctgatcaacacacagtcactggggatgggccaaccagggggctgtctgtgagccccagcctgggaggaggggaagaggatgtgcgtggaaggatgagagactgccacacagcaggtgctcagagctcacctgacacctgggaggcagcctggcacagggcaaggattgcaggcacccaggcttgaccttgggcaaactacgtaacctcagtgggtctcagtttcctccactccagagggctgcggggcagctgatttaaacaaaagggctccgggggcagaggcttgcccatgcctgccctggacttggaggttcaagactcaccaagggtgcggcccaggtgacgcaggatggtattggactggtacagggtgaggtctccgtcctggaacttggggagctgcccgtatagctgttgggggaggcatggctcagggaggggcactgagcttgggcgtcccccgatcctagtcacagccccctaaggcccagcaccccctccccttgcccgggcatggtcacttacgcaggaggctttgagtgagccctcctgccacgtctccacggtcaccacctcctccttccagctctggccctgatctgccagcagcatgcgcagggccgcgcagcggcctgcggggagggagaagtacgagatgtggggaccgggccgactccgcctcgcagcaacccggggaggggtcaggagtgcagggagggaacagggaaacaggttcctccgaagatttcacacaacactggggcggggagcaggcatggcgggagaggcggggaacaggaaggaggcccggggtaaaagccacacgacggagggataagggggttcggatctctccgggtgggcgaggggctgtgggctgcagccccagcccctgcctcccttccctgccagacacatgctcctacctcgaactgggaaatagaccacggtgtagggcggcactgcagcgaacaaagaaaagtttgctggagcccgggggaggatgccaaggcgcggtgagcgcagtctgccccccctccccgcccccggggtcccatccctccccgaggcgctccgggccccctgaaagccgctaacggcactggggacgtcctgggtcccctaggcccccgtcccgggtctcgaggtgggcgaggagccctgccgggagcccgggcctgatgctgcgggttggccccatgctgggagctctgagccccatccccggggacgcgggccgcgcgtactcactggtggcgaagactgcggcggcgaaactccagcgaaggcctcgcggcctccgagccttataagggtggtcccgccccgctccgccccagtgctgagtcacggcgccggccgctcttctggagggtcccgcggactcccgccggccccagccccggcggccgctgcaccccgggcgtcggccgcagaggggcgccctggagtccccggagtcgccgcgcagctggccggggaagcctttccctctttcccaggtccccagcggggcctagggagtaaacagacagcaggaagaggaccgcagcgaagtgtgcgcagcgaactggcgcgccgggacatcgcggggggaaattccctaagaccgctgcgatcccggagcttgcacacccgcttcacagggcaggggagaggggtggaggccgcttagaggaaaggaaattgctttattttattttattttattttatttttttattttattttattttattttattttattttattttattttattttattttattttgtgttattttattttattttatgacgtagtctcacgctgtggcccaggctggagtgcagtggcgcgatctcggcggctcactgcaacctccgcctctcgggttcaagcaattctgcttcagcctcccgagtaggtggaattataggtgcgtgccacatctggctgatttttgtatttttagtagagacggggtttcaccatgttggccgggctggtctcgaactcctgaccttaggtgatctgcacgcctcggcttcccaaagtgctgggattacaggcgtgagccaccacgcctggccgtccaacttttatttgaagttctggggtacatgtagaggatgtgcaggtttgttacataggtgtgtgcgccatgatggtttgctgtacagatcatcccatcacccaggtattaagcccagtatcccttagctattcttcctggtactctccctccccagcaccccgctcaacaggcaccagtgtgtgttgatcgccgccatgtgaccatgtgttctcattgttcagctcccacttataagtgagaccatgcggtctcgctggttttctgttcctgtgtgagtttgctgaggctaacggcttccagctccacccatgtccctgcaaaggacatgatcacgttccttttagtggctgtgccttaggctattttctttggctttgctgcctactttctgttgatttgcagatctccatttattctagatattgatctcttgttggctttagacatgacagacagcttctcctattccatcaactgtcaagtttgtccaaggagtctttcatgaaacaaaactcgttaatttaagtgtaatcaaattcagcaagggatttttgtggtggggaagaggttggtgtttatgttgtatctttaaaacttcatttaatgcagccattaaaaagaactagatcatgtcttttgtgggaacatggatggagctagaggctattatccttagcaaactaatgcaggaacagaaatccaaatactggatgttctcacttgtaagtgggagctaaatgatgagaacttataacacaaacaaggaaacaacagacactgtggttgactccagggtgcaggatgggaggaaggagaggagcagaaaagagaactattgggtactcggcataatacctgggtgatgaaatattctgtacaacaaacaccgaagacacgagtttacttatgtaacaaaccttcacatgtacccccaaaacagaaataaaagttaaaaaacaaagaaatttcatttaaaagtcttttttaagagacttattatcgggggaaattcagcccccaatatttcacgtgggtcctttcctattttccctaagtgtcggctggcctgagaaataaagggaaagagtacaaaagagagacattttaaagccgggtgtccaggggagacatcacatgtccgcaggttccgtgatgccccctgagccgtaaaaccagcgagtttttattagcaattttcaaagaggagggagtgcacgaacagggtgtgggtcacagagatcacatacttcaagggcgacaaaagatcacagggcagaaggtcacggcgaaactagaatcactaatgaacttccaggtcccactgtgcacgcactgtcagggttcaagagcagagaaccggtctgactagaatttgccaggctggaatttcctaatcctatcaagtctgggggtgctgcagg

SEQ ID NO: 914763 - DNA, 4001 bp, Homo sapiens
tgaatggcctggtcaacatggtgaaaccccgtctctaccaaaaatacaaaaattagccaggcatggtggcgtgcgcctgtgatcccagccgctggggaggctgaggcaggagaagcccttgaacccggtagatggaggttgcagtgagcagagatcgcgccattgcactccagcctgggcaacaagagcaaaactccgtctcaaaaaaaaaaaaaaatgtcggctgagtgaggatagcagaccatctcttttttctcctttctgaatgagggacttaagcctgctaacaggtacaaagttctctccagagtttagtccttctctaagtccaaggcctgctactagaggttaccttccctgcggttgtgacctctccatctcaactgctctggttttgtcttttaaaaaatcttaaggttggcaactttggcttaattacctaagtccagttcagtggttttcaaactgtgttccaaggagtggcctctaggatagaagttaagtggggtggtggggcctggcccttttaaatttagttccaccagagcatgctgctttatatattgggttccagataaaaattcatggggagaaattgttccactcctttaaaatgtttgaaaatcacaagtctggatattggtttgtatggagtcaatactcactgcaaagcacatttcattcaaaccactcagttttttttttgtttttgtttttaagactgggtcttcaaatggacaaagggtgtatttttcatatcttctttccccatccccattttactgatgctaaaattggagtttaggagtcatttggggccaggcactgtagcataattctggcgctttgggaggtctaggcaggagaatcgcttgagcccaggaattcgaggttacagtgagctattatcacgccactgcattccagccaggacgacagaacaagactctgtctcttaaaaaaaaataagaaaagtcacctccttatttaatttggcctttgagaacactgggggatttacaaaataattacatatatccaggtactcatggtctatttttcatcattacacgacaatcaaatgaccaaaactaggagtgtgtggactggcacgtgttaaggtttttaagagaggtaagattgacaggtggaagcaaaaggtgtgcagacaacaaggtgacagcttttctcttacagaatcccagactcaacagcacatttcctgacgggaagggcttctctgtctgggagaggcctccacttcattctcataagccaaatctgatcctggctttgggtaaacctgctctcaatttaagagcaggtttcctttagacaagtagattaggggtcgcctcttcctcgcctcgggataagggcaaacaagacgccaggcttgggcgttgggaggacggcgacagcgacgctgggaacaggggtagaatccacgccgtccagcggcccccaggcctgtcagctcctcacccgcccacccacccgcccgcctgcattcttcggtctaaacttaccaggtggaagctacaactctagacaggaagtaactaactgggttggatccggtcgagttccgctgcgcttcttagagccgctgctgggaagaggccgaaacccagtggccgcagcagtagccaccgcctctgttactagggggtctcgcctccatcgctggctgcgaggagtctgagggcacgtgaccggaagtagcaaggcgggccctgggcacgtgactcaagagcgcggccgccatgacaccttccgctagttccctccctcccccacgggttcccgcctgtttcgtttcctctctccggtctcgagcggcgaagggtcctgggatcctggctggcccaaccatttggcctagagctcctccggttccagtcggcgccgtgtctccagcccgcaacggccctgcggtcgcaggccgtagagagcgtaatcgcgaccgcggcctgagggggagggaccacgcggaaggaggggcgtgactcgtcacgtgatgaggaagtgccgttagtagcgttgtttccagtctgcggctctcctggatgacgtcagcaaggaaggggaggaacgcgaggggagactgaagttcacgttccgctcttagtgcgcggtgagttccccggcgctaagccgggagacaagatccgatctactgagagctgcgaggtactgccctggatgtggtggagctgggctgggacctccgggctgctggtctgtgagcctggctttgaaaattggttactgggtctcctctcaagaaatctcaagatattaaagttactgctgttaaaaaggtagtagttccactaggcaaggagctttttgtgggtagggattgtgttttgttcatccctgtgtctctagcggtgtgttcaggtcctggaacatagtaggcactcagaatgttgaatgaatgaatgtataaatgagtcagtcgccatttgtctgaggcagagagttgttttctgatcatttcttcttggatagaaagatcccattgtgaaaatgaggcagtctgcaacttccccttctcatttcttcaatttttgctatctttcttacttctttctcctcttcctccacgcacctactggggcaaaagagaaacatgtttgcatttgatgtgtgagcaacaaacactgaactattttacgataatggaaagatgagatttggattcaggagacgcgtattctaatctcagctctaccatttatgaactctgtgatccttgggcaagccagtctcccaaaagttgtttcatttactttggttaagcatttgtcgccaacttctatgttcttagtttttggtagagtgccttcacagaagtaacatttaaactcagctttgcagaaaggtagggttttggtaaatgggggaagattccataaacatcatatattaaaccatggaggcacagcaagtttatggaatgaaaaagaaaaaaagagtcgagtccaatgtagttggagaatagagaggttaagatgggaaataaggctggaaaaagaagcagggaggagataacagattttcaagaaatagagctgttgaaggcttgtacaatattatgtatatattttttaaattttattgtggaaaatttcaaacgcagacaaaagtaggataataaattgaaccctcatgtacacttaacgcaacttgaacaattatcagcattctgctgttcctctttatactgtttgtacatttctaggtactttttatatccattgttgcatttgattaatagcagctttcaatttgagctcagttctactgtatgtagctactggctaagaagattttatttatgtaaacaatttctttgggttttagttgaccacttgctctgttgaatcaatgtgtaacatggccacttaaacacaactaatactgtttttaggttgtaatatagaaacttagtgtctagatccaggaagttagtgtttctactctattctgggctcatctaactacttaaggagtattatgctcagttctaggcacctcatttttaggcaaactacagtgcctctgtagaaggttgactggaacagagggttggaaaatgtcatgtcaggagtgatgaagaaactgggaatgttaaatttttagaagacctgataatgcttttcaaatacagaaggattgttttggaaagagacagcttgttcccttcagctgtagaagctacatacaattaggaataatggtagagctctaagtgatcaggcttcagcatagtattaaaaagaaccttataatagtgagccctttggaggactggaattggcagcttcatgagagtgagtgctttctttccatggctgaaaatgttcagggatctagggcaaaactaatttctgaattaggtggacatgttcactgaattacctatgaatctttttccatcttgagaattctaggaagtagggctcatgtgcgatcttgaaagctgggtatgt

SEQ ID NO: 914764 - DNA, 4001 bp, Homo sapiens
aggtaaaagccaagggtagctgaaatgcctgggcaggaataaggcagtactcctctggaaggatgcctacaaccagggggagtttgttgtacacctgaaactgctgatacagacatcccaagatgaccacaagtttggagaggcatttattcattccacaaatatttaggaagggcctaatataaagaagccaccaaaaaatgagagagaaagcactagagaatcaattgaagagagagtaaaggatgaggtgcaggtgcaagaagtacagagcggtttaaatagctaatgtgagagagaaagcactagagaatccattgaggagagagtaaaggatgaggtacaggtgcaagaagtacagagaggtttaaatagctaatgtgagagagaaagcactagagaatccattgaggagagagtaaaggatgaggtacaggtgcaagaagtacagagcggtttaaatagctaatgcatgcgaagcttaatacctaggtgatgagttagtaggtgcagcaaaccaccatggcacacgtttggtacctatgtaacaaatctgcacatcctgcacatgtaacccgggactttaaattaaatttaatttaaaaaaaaagaaatccagacaccaggtttacccagagaagaataaatgcctagtggataagaaagaaaaagaaaaaaagctacggggtgaggacaactcgagattagagattacttgaacagaaggcaactcagaaaagtatctggcaaaaagtatctgaagatgtgagaaaaaggatgcaacatagaatgcagatagcctgtggaattcaaagatgtcagagaaggtcacgctaagaccaagagagtgtgggaaataaggagaggaagggtttcctggaaggggttggggctcctttgggatgctggagaacaggatgaaagacagggaagctgaactgcagaacacagtgcctgggaaagtttaggggaaagaaaacaggtgggtgtgaagcagcactggggctgtccagggggaacagtggtgaagtagggttcaaggctagaggtgggcagacaggcccccgaatcaggataccccaaaggagtggaatcttattccttcccagtgctgtagtcccctcttccgccctagcctaggggatcctctgtcgccggagccactggaaccctaggccgtgcagggtaaggccgggccgccccccagcggtcgggctctgcgctcgcgccccggctcgcccagcgccaactttacagatccgcgttctctcccccgaaggcggtccccccttccgccccccgctcaccgagggcgccgtcaggcggctgatgctctcgcccagcgagtccaggttgacccgcctccggcgctgcaccctcctggccccggcagtggcagcggcggcggcggcagaagcagccggggtcggggccggggcggcggcagcggcagctgcggccgggctgggctccagcggcccgggcgggctccggctgccattccagcagagcctagacagggggcactccccctcctcctccgggctggtctccaggtagtcggagcccagggagctgaaggactcggacgaaatcttccttcgagacatgctgccggcggagctgcagcggccgaggcggtggcggcgaggacgcgagcggcggcggaggcggcggtggcgggaccggcaagcgacaacgttaagcgcgtcggggccgcggggcgctgcggtcgcgcccggcggggcgggagtccccggggccgcggagccccccgagccggctgctcatggcgggaacttggggcgccgccgcaccttggggcccgggctcggcggcggcgccgggctgggctgggggccgccgccgcctctgctgctgctcgcgcggcgccgcctcagcgcccgcctcggcgcatcgccgtgcgccgcgctcccgctcacggggaggctccgagagtgtgtgaccgcggtcggcggggcggggagggctgcggcccaagcagaaggggaggcagaggcagaggcttctgccgcctgcgcgcctatctcgccccctttccctctctgctcccgcctctctccacttgctgccctgcctccctccttctccctttatccccccgcccccccccatgctctccctccgcgggaatcacgtgtcgccatcatactcattgggagtctctgcctcgcctgtcgccacgtttcaggagcaacgaggacacttcgttgctgtcctctgcgcgccctccctgctccgaggaggtgcgcacaggagctcgggtcggactgagggccccaaccccaaacgccttatcctcggccctcgggagcagatgggtcccggcggcgctggtggggagaagggctcggggctggggggcgagaggcctccccctggagccaccttggggaaacctgacagtgtgaagtgggggttagggtccatgttgtcctttctccgagtttatttaggaagttccgaggcaaaagggaaaggccaagcgtccagccagcccactccagaggagacgctttcaggggaagggaaggacaggggcaacattttggcgcccatcctgctggagcagctcctggggacttgtgttccccgcctcgtgcgaggccgtgtgggcgcggagcgagcccagaaaggggcggcagtgaggacagcgtctgctctgacaagacagcactgttgctgagcctcagccgggcggggtgcgcggggctcccggctccgctggctcctcactagtgctggacagctccgcttgccacctatagccgcctttgcaggcgttgagaactggagaacagttcctcctcaaacgacctagcacctggcccgggggaaaccggggaatgatcccacgtccctcatcctcagggctctttgcgccaaatatgcgatctgtttgcacctgactgcaaatgctgctcagaaagctaaggggagtagggataaatgcttctcgaactgactcgccacagcgcgagcatgtcttgccgcgagttttcagctgtgcggcttcattccaaagcttatctctttgcaaaccagtccttccagcgcctgaccccactgccccttgccttagccccagaaaactctcatactggttctgaggatagagtaagagatgggaagaaggggcaaatgacagtatcccgaaaggggttccaggctgtacttccccctgcaatgaagtggatgagcaccctccccagctcacccgatctgcggagagaaaagtttaggggctctggctttagtttcccagtgaaaccgaagccaaagcgtttttttaattaaagaactggtccttccaggtgaaggcagatgggtttttgtggactgtgtttatttaaaaagcaaaacaaaaccaaaccacaaaacctgtgctgtacccccaccacaatttgcttttaacttcaaatcttcccaagtgtttgttagggcttaaatataaatgctatttgaggtttcatttggaaaaatccactcaaactggttcagagacatacctttttccccagatcttaaatgggctttaaagatagaaaagtgtgtactatcactcagacactcccccttcaaattatatatatatatatatatatatatatatgtgtgtgtatatatatgtatatgtatatacatatacatatgagaaagaatatatataatatatattcttatatatatgtattctttctcatcctgaggaagtttcttttaaaataataattgttacaattattatttaaactgttgtgcatctactattgatttccccattacttcaattaattctatgtgcatttgtgtccattgaaaattagactcaaattacacttttaatcataaaaaatcatcagttttgctaaaaaagtttcactagcccctttttctaaattataatgaaaattacattattctaactttggggtaattgtttaatatttctgctacacagtatcaatcagcataaagga

SEQ ID NO: 914765 - DNA, 4001 bp, Homo sapiens
agaaaagtgagcaaagagggcccagagctccgagatgtcagaggcgaaggtgacatccgtgtccaggacaatgacgcgggccagctcagcaggcaaggcactgggcagcaccagcttcattagcccatagaggccggagtagtgcttgttggggatccaggagacctggggctgtgtgggggaaaggcaggagatgagatggcagagaggggcctatgagcaccagaacacatgcttgcagtgacacagaggagagggggtaaacccccaaaagagaggggtttgcgcttcagtaggtggaggggggactgatgattctcttctccaaccccaccaggtcttggagagaggagagcggtggacacagctgaggggaggggggaagggctgggcccctgccttgagctggtcggcatgataaaagctgacacggacagcaggcaccatccatgtgtggaagagcgtctccaggatgtttctggccacggcgtcagtcaccaagtggaggtgcagtggatttttccttttgggtgggcaaagaggaagcctgagaggccccagcaggagcaacatgggacagcccccaccccgaggggcgcagagatggaagcgccatctgcaaagagcttttccacgcccggctcaggatgttcttttttttttttttttttttttttttttttttttttttgagacggagtctcgctctgtcgcccaggctggagtgcagtggcgggatctcggctcactgcaagctctgcctcccgggttcacgccattctcctgcctcagcctcccaagtagctgggactacaggcgcccgccactacgcccggctaattttttgtatttttagtagagacggggtttcaccgttttagccgggatggtctcgatctcctgacctcgtgatccgcccgcctcggcctcccaaagtgctgggattacaggcgtgagccaccgcgcccggcaggatgttcttacaactgcccttctaagggaggaaggggacactgtccccgcgtcacagatgaggaagctgaagctctgagaccagcagcctgtcccgggctttgtcccttccccactcctgaccctcctccacggacacctggctgtacctgtagaagagcatggacttcaccagggtgatgacgtctcggctggagttatgccccgcacacacgatggccacatgcaagagctggggagggacgcccaggtcggcagcagccccccttctccgctaggcggtgaggacccatgttgagctgccccaccccgcagcagagcccggaacagtgtgcggagggggcagcaggagccaacccttcatttcaaatggggaaatgaggtcgggagcagaggagctgcacgttcgaggtgcgccccagccggctggccagtgctggacagacgccaggtactgtgattcccgcagatgtccaagaggccgggctcgggggcggcgcccccaggactcccgccgccagggccgcgcgcacctacctcgcacttgggcggcggcggcggctgcgggccgcagtcggagcggttgtggtccccggggccggcccccgggtctccgtcgagggcggcggctctccgcagcctcccgtctggggggacacgtggcatgagcgggccggggaagcatcccggggcccccgctcgcccgccaggctcgcggcgctcacaccccaggtccccaccgaacaggaggaatccgagcagcagcagcagcagcaacagcgcggcggcccccagcgcccgggggcgccctcggggcagcatggccgccgacgggggcgctcagggagggacgcgacccggggctgcaggctccatcgcaggccctgcggaccgaggggcgagatgggagactcagccctgggcggcggggcccgacggccgggttgtgcggctcgcgccgagccacctccctcacctgctccagcggctcccgggctgggccctgcgctcgcagccgccggccagggtgcgggaaccaggggagaggcgcgggccggtcccgcccccgacctgggctcaggtttcacctcagcggggctgagcgcgaaggggcggggtgacccccccggggtcctggccccgccccttgggccggcatccgacggttccccagcccgcgaggagcccccgaagcccccttctgggctgagtttcccaccaggacgaggggagggctgggggagcgggagcagccacccgcgaaggcccgggccccgctacctgccctgaccccctgccctgcccccgctctggggccgcgtctcctcccctcactccccaaggggaggggccagtgtccccgggcccgggatcaaagacactgcgggagctcgacacgagggaggaggagggggccggaatgcaggccgcagggtctgggacacctgctctggggacaggggcggagccggccgacacctgcgccagagccgcggagcacctgaagccttcgcctcactcccccactctcagtccaggtggcccggccgggccctgccggcgccgccaggacaaagcgcccttgtgaaggccgcctcccgcccgggagctggcgaggggccccagacgcgggcggcctaggctgcctgggcagggccggggatccccactcttgtccagatcgtcgtgattgtgcccgggcgcaccggcctggagctcgtctttcctccctctcccccgcgcaccccatagcaggccagggaatgggtggggggcgctctggaccctaaaccagcacagcgtgccaggccctgtgctaaggatttaatcaccctcgattaatcccatgatgcgggctaattctcccccggagagtttaagtgacctgttagacaagaacaccctccggcccctcccgtctcaagcggccccactccgttccccaggctctgcgctgcagaagcagctttcttgctcctcctccggaagggtctcccgccccaggacttgcccttgacgttccttctggcagcggagcctcccagggctggctagcactcatggaaagttgaagttgtttgcttgtttattgcaggtctccctcccagaatgtaagctgctcaccggactggaaccttgtctgtccagtccccagtgcccaaccagggcctgcacataccaagtgctcaatacctgttgaaagtggattggaatgagaatctcccctcccatgacctggaaagggggctcaggctgtgtcatttgcccaacttctggctgcaaaaagtgaggcaaactcaaaagaagctgtggaaagcagcccaacctgagaccccctttctctgggagatggggaaggtcaggctttgggtctctggagggcagggataatggttgctatggagactgatggtggctccttgtgcacccagaaattgagaagggccatgcactggccactcaggcgtctggagcttgagcctccagcctccctgatcttcatctgtagcctaaagctggggtggggaaatgtgattccctctccaggaccctcaacagagacggtttgtgggggttaaacatgtgagaccaggccagaacagtggcttatgcctgtaatcccagcactttggaaggccaaggcaggtggattgcttgagcccaggaatttgagactagcctgctcaatgcggccaaactgtatgactgcaaaaaatacaaaaattgctgggcgtggtggcatgtgcctagtacttgggaggctgaggtaggaggactacctgaacccaggaggtcaagcctgctgtgagttgtaatcacaccactgcactccagcctgggtgacagagtgagaccttgtctctaaaaacaaacaaacaccatatgggatccatagttgggtgctggcccaggatgagtcttcaataaaggggctgggggagtcagtgcaggaagctgggtctgcagatctcactgtagtcactcacaatgttggcccttcttctggctcaacctcaccactcagggaa

SEQ ID NO: 914766 - DNA, 4001 bp, Homo sapiens
agcagcctgtcccgggctttgtcccttccccactcctgaccctcctccacggacacctggctgtacctgtagaagagcatggacttcaccagggtgatgacgtctcggctggagttatgccccgcacacacgatggccacatgcaagagctggggagggacgcccaggtcggcagcagccccccttctccgctaggcggtgaggacccatgttgagctgccccaccccgcagcagagcccggaacagtgtgcggagggggcagcaggagccaacccttcatttcaaatggggaaatgaggtcgggagcagaggagctgcacgttcgaggtgcgccccagccggctggccagtgctggacagacgccaggtactgtgattcccgcagatgtccaagaggccgggctcgggggcggcgcccccaggactcccgccgccagggccgcgcgcacctacctcgcacttgggcggcggcggcggctgcgggccgcagtcggagcggttgtggtccccggggccggcccccgggtctccgtcgagggcggcggctctccgcagcctcccgtctggggggacacgtggcatgagcgggccggggaagcatcccggggcccccgctcgcccgccaggctcgcggcgctcacaccccaggtccccaccgaacaggaggaatccgagcagcagcagcagcagcaacagcgcggcggcccccagcgcccgggggcgccctcggggcagcatggccgccgacgggggcgctcagggagggacgcgacccggggctgcaggctccatcgcaggccctgcggaccgaggggcgagatgggagactcagccctgggcggcggggcccgacggccgggttgtgcggctcgcgccgagccacctccctcacctgctccagcggctcccgggctgggccctgcgctcgcagccgccggccagggtgcgggaaccaggggagaggcgcgggccggtcccgcccccgacctgggctcaggtttcacctcagcggggctgagcgcgaaggggcggggtgacccccccggggtcctggccccgccccttgggccggcatccgacggttccccagcccgcgaggagcccccgaagcccccttctgggctgagtttcccaccaggacgaggggagggctgggggagcgggagcagccacccgcgaaggcccgggccccgctacctgccctgaccccctgccctgcccccgctctggggccgcgtctcctcccctcactccccaaggggaggggccagtgtccccgggcccgggatcaaagacactgcgggagctcgacacgagggaggaggagggggccggaatgcaggccgcagggtctgggacacctgctctggggacaggggcggagccggccgacacctgcgccagagccgcggagcacctgaagccttcgcctcactcccccactctcagtccaggtggcccggccgggccctgccggcgccgccaggacaaagcgcccttgtgaaggccgcctcccgcccgggagctggcgaggggccccagacgcgggcggcctaggctgcctgggcagggccggggatccccactcttgtccagatcgtcgtgattgtgcccgggcgcaccggcctggagctcgtctttcctccctctcccccgcgcaccccatagcaggccagggaatgggtggggggcgctctggaccctaaaccagcacagcgtgccaggccctgtgctaaggatttaatcaccctcgattaatcccatgatgcgggctaattctcccccggagagtttaagtgacctgttagacaagaacaccctccggcccctcccgtctcaagcggccccactccgttccccaggctctgcgctgcagaagcagctttcttgctcctcctccggaagggtctcccgccccaggacttgcccttgacgttccttctggcagcggagcctcccagggctggctagcactcatggaaagttgaagttgtttgcttgtttattgcaggtctccctcccagaatgtaagctgctcaccggactggaaccttgtctgtccagtccccagtgcccaaccagggcctgcacataccaagtgctcaatacctgttgaaagtggattggaatgagaatctcccctcccatgacctggaaagggggctcaggctgtgtcatttgcccaacttctggctgcaaaaagtgaggcaaactcaaaagaagctgtggaaagcagcccaacctgagaccccctttctctgggagatggggaaggtcaggctttgggtctctggagggcagggataatggttgctatggagactgatggtggctccttgtgcacccagaaattgagaagggccatgcactggccactcaggcgtctggagcttgagcctccagcctccctgatcttcatctgtagcctaaagctggggtggggaaatgtgattccctctccaggaccctcaacagagacggtttgtgggggttaaacatgtgagaccaggccagaacagtggcttatgcctgtaatcccagcactttggaaggccaaggcaggtggattgcttgagcccaggaatttgagactagcctgctcaatgcggccaaactgtatgactgcaaaaaatacaaaaattgctgggcgtggtggcatgtgcctagtacttgggaggctgaggtaggaggactacctgaacccaggaggtcaagcctgctgtgagttgtaatcacaccactgcactccagcctgggtgacagagtgagaccttgtctctaaaaacaaacaaacaccatatgggatccatagttgggtgctggcccaggatgagtcttcaataaaggggctgggggagtcagtgcaggaagctgggtctgcagatctcactgtagtcactcacaatgttggcccttcttctggctcaacctcaccactcagggaaactgaagtgctgagatacctgctaggcccccaaggggttgttctgggggcgtggagggagaaagagggacacgtatgggcatataaacaggtgctgttcctcttggcctaagacccattttgacccagctctgcccaggactttgctgtgtgaccctattagacgagtgaggctccatctctgggcctctggtactctcgtaggtaaatgttggactggtctacctctcttcccctgtgacttggggcaaactgaaggagagaggatacggctcaatctgcccaaaggtccttccagcccaacaaagacggccaagcccaggcagggggccagggagcaggggaggggcctcctgcacacaccgcaactctttgtctctgggccctaatccggcctgggatctagagaggaaattcaggcagccctgctgctgccaagctggctagacccatgctccccttcccagttctgcagggagggagaagaaactggttccagcccaagccccttcctattctgtcctggggagtctgcccctctcccctccacaccttgctctcagaatcaggacctccagcccaaggagtgctgaagaacctcaaattctctctctgtaccctctccacagctgcagagggagggctggaggagtggccaaactggaggtttgaggaacaagttcactaaggtgttggtgcacagcagggccctgcagggctcagtggctcacacctataatcccagcactttaggaggctgaggtaagcggatcacctgaggtcagaagttcgagaccagcctggccaacatggcgaaacctcgtctctactaaaaatacaaaaattagtcaggcgtggtggcgggcgcctgtaggcccagctaatcgggaggctgaggcaggagaattgcttgaacctgggaggcaaagtttgcagtgagctgagattgcaccattgcactccagcctgggcgacagtgagactccgtctcaaaaacaaacaaacaaacaaacaaaaaacaaggtggggcagaggaagggagaaggagcctcacct

SEQ ID NO: 914767 - DNA, 4001 bp, Homo sapiens
gggggcttcatctctttagagaagtccaagcaacagcctttgaatgtaaccaatcctactaataaaccagttctgaaggtgttgtgtgtgcgcgtgtggagttggcgggaagataggaacaaacacaaagccctttcatccttacctcagaggctgggacttttgcccagagttctcctggtacgtcctttctgcttctgcctcaatagttttcatttcacacagaataaattgtctcccaggaacaccaagaaacagagccacaatcttaaattcctatggtttgccccttcagttaacagtagagcctgtttatattgcatggcccctcccacccctattatcaggaaagtatagaaagtcactaattctacaactctcttgcaaaatgaaaacaaacgctccatttaaaaaaaaaacaatcctttaataaaattagtccatctaaaactccccaatgcctaaggttctagtcgtggaagggttagctgcagaattccagttcagaagccaacggaggctcagtccagacagggattaaccgacttgtgctggtatctaggtgcttggattgccgagttgagtttgctggaagggaaatggggcggcgtcggggggcccgacaggcctggctgccagtcggcttccgcgaaaacgactcttgctgtccacatagccagccgtgaagccaaactgcaggcctctgccctcccctaaatgtcctcctaggaggcagtcactcgggaggaagatgtgcctgttaccaagtgcttcgtcccggccccagcgcagacctatgaatgaagatggagggagagctgatgtgaaaggcctgggtcccggccgcagaaggggcgccagaccgaaatcggcgatcgcgtctctcccaccaaagcctcccggccagcggccgcgtctgaaagtcctgggctaagcaccacgccgggggggtaccagacaccccggctgcagctgccgagggcctcactcaccttcagggccgccggcctctcggcctggactgcccacctcggccctgcgtcagagcggaaggccaagtcttccagaaggtgctgcggcctccccgcagccccttagcgactcgggatggggcggctgagtcacgaacgccgaggcgggcaggtgcggcgccgccggcctccccccggcaggctcgggtcttccgcgccacggaggtccccgaagagcgcccaagccgcatccggaaggcccgaaccctaccggagggcggacggcggacagggcagggcccgaggccgacgcggcaggcggtgcgggacgggagcgggggcgggcggggactcgaggccgggcggcgaaggcgggcgaggggaggggaggggaagggagccgcggcccgcttgccccgcagtctgaagcggctcagctctttccatgagggcggtggtggcccttaaaagggcctttgtggtggcatggggaggcctggcggccggccgcggcgcgggccctcttagtactcctgggaggcctgggtggccttcttgccgcccgagggcgccttcggccccacggtggcgctggtcttcttgggcagcagcacggcctggatgttgggcaggacgcctccctgggcgatcgtcacgccgcccagcagcttgttgagctcctcgtcgttgcggatggccagctgcaggtggcgggggatgattcgcgtcttcttgttgtcgcgggccgcattgcccgccagctccaggatctcagcggtgaggtactccagcactgccgccaggtacactggcgcgccggcgccaacgcgctcggcgtagtggcccttccgcagcagccggtgtacacggcccactgggaactggaggccggcgcgcgacgagcgcgacttggccttggcgcgggccttgccgccagtcttgccgcggcccgacatgctagcgaggtagaccggtgaagcacgacggctcaaacactagaacagacgcccgccgcagtgtaactgctgtcgcgcgcgcgccgcgaggccgcctttataagcccccaggacacacctctgcgccctcctgattggctcttttctccaatacccgcctccggttggttgcggttaacccttgggtgtcgcggctcggctgagggagcgcgcccgctgattggtcgaatttgaaaaccttttgcccggggagaaaaggcgaggaggaggggtagcacgcagactgccaactatccgctgatgtagccaatccttgtaaagcgcgcgagatttaaacactacaatcggaaaccagaagcggaagaccaaaggggtggagtctgaggccacctagagagcgtctgggaaatctgtgccggcgtaggatttttaaaggaaaggggtcaatattatagctactgcagccctcctttccaggtccagtcactccctactcccttctcctacctgacaaagggagaatggaaaagtgaagaaattagaccccttaaaagttttcttttttttctttctttctttttttaatagaccgggtgtcactggctctgtcacccaggctggagtgcagtagtgtgatctcagctcactgcagcctcgaactcctgggttcaaggaatcctccctgctaaacctccctcgtagctggtactacaagtgctccaccacacttggctaattattttatttttgtagagacggagtctcgttttgttgcccaggctgtcttgaattcctgggctcaggcaatcctcctgcctcagcctcctaaagtgctgggattacaggcatgagccactgcacccggtgactctttgaaagtttgttcccatgccaggaaacaggataacttcaattttgtggccctccatgccacctctagtatcaggatttaaatatttattcaatatgttctgtttggtctcagttctgttcacttcttgttagacggggtctgatggggcagagagataggcatcctgttggaggaagtacccccaccacccctcccaatctacccaaaaatgcccatataggaaatatacctacataaacaataagaaaaagacaacactttattgtctccattgagagcatgtggccccctgcttagttcttactaatcagaacacttaatttacaatcaaatgacatgtcaccgtggagcctgtgttcctagccctggcccaagttctatcccaaaaaccagtggttccttgagagtcaggactctgaaatgtgagtgtggataactgcaaaaaaagctgctgtatcccaccctatgaggctgcaaagatgggatggagagggagagagtagcaagttgcagaaagccataggtaaaatccaatcagtagtcagcagagggcaagaaacgcccaggatgccaatgatcacagagaaaggaaaatgctgagaacaaaatctggaggagtatgaagagtgagagaggcctgggcaaggaggcagtctgggaccagagagagaggtcagcctgagtcaggaatcctagagactgtgaggtaaaggacaatgatcaagggactcagacatcatagaagagtcgaacgagctgatatcgaatggagaaggtgatggcactgcccaggatctgcaaggagaaatggactggagtaagaatcacgcagaaagggagacacggaggtataaactcgattcccatcctcacctgcagcagcagcaggagcaatgtgaggtttctctcatgtatgggcccaaggactttaagtagcaagttgatgagggtcatgttgttacattcagtgaattcaccatcttcagtctcactctggtgtactgtcaccagctggaggctctctgccacctggagggaccagaggtgaagagaacctcagctaatacctatgctttaggaatgtggatctatttaatgctttcaagttccccttggatctgatgtaggactaggttccccattcctcaaggtcaggatggcagcctagggccttacctccttgttaccctgttaccttta

SEQ ID NO: 914768 - DNA, 4001 bp, Homo sapiens
tttttttttttgagatggagtttttgctctgttgcccaggtgggggtgcaatggcgccatctcggctcactgcaacctctgccttctgggttcaagcgattgtcctgcctcagcctcccgagtagctggaactacaggcgcctgccaccatgcccaatttttgtatttttagtagagacaagatttcaccatgttggccaggctggtctccagctcttgacctcaggtgatctaccgcctcagcctcccaaagtgctggggttgtgtgagccaccgcccccagcctacataacttttctatgcctccaaacaaaatgaaaattcacacttgcaaacttacccagaagccagctatctttgtgcatacccgcttcaaactgactactgagggaagactgctgcagcacagcacagtcctgtaggctgccgggccagtttgtctccacggtcattagtgtccctctaatgtcacacaccatcaggcagtttaaagaatgcaggccttttcggttcacataggagaggtcttcagcatttggtgccttgatggccacatggatacagtcaaccacccccatcacccctggcatccctgccaacccatagaattcatccttcagagcctgaatggaggcttcatcagctggaaagcgaatgaactgtgaggccctttccacaagtgcttcagtgacattggcaacacaacgactcatagacgcctgactgattccaatggcatctcccatccgagtctggaaggaacctgaggtataaaaacccaatgctgcaaggacctgtgtctctgggctaatagccctggatcgctgagtaggcctagaaagattcgcccccaagagctccaccaagtaataaatgaactgccgtggaaacccatacatggacatcaagtattcatcagtcacatcatccagcttaaaacggtccaatgtccggtgaccacggccatatagcaagaggtcacagtcaagcactgttattggtatagccatggtaaatgtgaatgttggctctcctctttgctttttctgaactgttcccaatgaagatgttggtgcaagaacgtatttttaagaaagtatcagaatccaacagctaaccacagttaaatggctctgccatttataatcttctctctgtaaatgttaaaagaaaaaacattaggaacctaccaaagactttaaagtgactcaaaggctggagcagctccttttctacaaatttccattttgttgaggcaaaacgtactgtacttacaactccggatttttctccactaactcatggctgcacgacaggcttgctctgattcaaggataatgggaattcaatctttgtggctcatttaatgcttggcatttcaattgagaacaccaaaagaataatggaggtgatgacataattattcacaaggtaaaagaggtcggcttctaactatataggccaagaagcagctgacatatgtcataaccaccttgggtaagaattggtcacgggtttcattatccaaagacttctggtttcacctgacaaatacaggacagatgctggggtgttcaaaccagtctaacaagaaaagaaggggcaaaaaaaaaaaaaaaaaaaaaaaaaaaaaaacaaccaaagtccacaacccagccttatggacgtacactgtgtgctgtaacaaaaggcttttccctcactccaagaactccaaatcgtgaacctgagggccaggaagtacggaagaccagacacattggaagtcgggagcgaaaaagaggctggccgaaccaggtttgggaagcgactctgccacttttaaagggcaccctaaaaacggatgtcaaagtctgattgcgccggccactcagttagcccaggcccgtcacccacctctccgcggctgccaggttaccagccacacttcccacccacccagccgggttgggccctcctccggaaccggcgactgcacagaggccgccacggcgcgcaacagcggcaccgccccttccgcgtcagcgcccgccccgcgccgcgccctcactgccgctgccgcggctacctgcggttcatctccgcacattccacacgcggcccaaacggtctctctctctctctctcaaacaccgcctttccgtctttgttttatcttgagtagcttagaaagattggagaagaaagcttacgtggaatgaaaatcaacttttatggatattttgaggactaaaagaataaatagggcgtccgtactgtagcgaaagtgcgactaaggttaggcatctggatttcccccgtagccctctttcaccccccccccccggccattaccgaagcggatgaaaacaaacactaacgatggcggcgccgggaagcgaccggctgctgggcttaaggcgggagtgaccgcttaaccagtgagggaagcactgaagagcgccagtcgacgtgggtgcgacaactcgcggagtcttaggagcaaaacgtctggggcctgcgagccaggacccttctgaagccttaggtgtctatcggcgacgtgtacggtcactgcagctccggagcgcggaaccctcagccaggaggcgcggctggtcggtcccaggtcccggcctccgtaatgagagcccggaaccactctttgtgccgcagcttcgcaggtactaacttttgcgggggataccccaagatctctcagcgcccccgggtgggaggctgtggatctgcggccccttggctgctgcttcgtggaagtagaagggattagccacggttcaatcccctgggcccctgagttttctgtgggaagttgagttggtctaggccccgttggcccctgcttgtttggcagagaatcccctccaccccagagctttcctctccactttttcagctccttgggttaggtcgtcaggcgttttggaggtaatttggggggccataactccggggttgggtgccaatatgagtgaggtaggttttcattcaatcaagatttgctgagtgccaaatatgtactccgcgtgtaggtgagggtgactgttgactagtgaaaaaagggacccatggttcacgactgtcttcttactggcagtggaacgacctgtggaaacctgtgatccattctcattaaataaatctctgggtaagtggctaagcaccttcttgagctcatcactaattcttcccagttttcacttttccagtgagttcccagttagcctggtcaattcagcgtagcatttcacttttggtatttcttcgttctctggccaccccgcagccaaaaagaaaaaagagattttaaaaaattacctattttctcattacacttagtttaaaactcatctcctaaggtgatagaatttattggacacctttagtgggagatgtattataataagaaacaacaagctcttcctttacactaaattagcttccagattttgtgtgttgttttatgactgttagtccttttcatgtgtgcatgtagtggctccagctcaattatgaggttttttttttgttgttttcaactctccatttatcagctcaggagaagtcttttagttttttagattttaaaatttttattattattattagagataaggtattgctgtgttacccaagctggagtacagtggcgccttcatagctaactttaatctcaaactcctgggctcagggaatcctcccacctcagccttctaaagtgttggagttacatgcataagccacagagtccggcccaggagcttaatctcgaaggaagtttacttgaactttaggtgtggaatattcgaaagtaacttccaacatggggtgtggagctaagtaagatgaatttacataaaccgtcatttttcctgcatgtgcttagtggaggagagtgcatagagttgctggtcattgcttcctatcaaattgtggaaaccaataaaaactgaaaatattctgcgagagaatagaggtactgtagccaggaggaatgcaaa

SEQ ID NO: 914769 - DNA, 4001 bp, Homo sapiens
gaaggaacacttcaggggaaaggtggtatctctaagcaagagaactgagtggagtcaaggctgagagatgcaggataagcaaatgggtagtgaaaagacattcatgaggacagctaaaacaataagtaatgtaaaatacagcatagcaaaactttaacctccaaatcaagcctctacttgaatccttttctgagggatgaataaggcatatgcatcaggggctgttgccaatgtgcattagctgtttgcagcctcaccttctttcatggagtttaagatatagtgtattttcccaaggtttgaactagctcttcatttctttatgttttaaatgcactgacctcccacattccctttttagtaaaatattcagaaataatttaaatacatcattgcaatgaaaataaatgttttttattaggcagaatccagatgctcaaggcccttcataatatcccccagtttagtagttggacttagggaacaaaggaacctttaatagaaattggacagcaagaaagcgagcttagtgatacttgtgggccagggcattagccacaccagccaccactttctgataggcagcctgcactggtggggtgaattctttgccaaagtgatgggccagcacacagaccagcacgttgcccaggagctgtgggaggaagataagaggtatgaacatgattagcaaaagggcctagcttggactcagaataatccagccttatcccaaccataaaataaaagcagaatggtagctggattgtagctgctattagcaatatgaaacctcttacatcagttacaatttatatgcagaaatatttatatgcagagatattgctattgccttaacccagaaattatcactgttattctttagaatggtgcaaagaggcatgatacattgtatcattattgccctgaaagaaagagattagggaaagtattagaaataagataaacaaaaaagtatattaaaagaagaaagcattttttaaaattacaaatgcaaaattaccctgatttggtcaatatgtgtacacatattaaaacattacactttaacccataaatatgtataatgattatgtatcaattaaaaataaaagaaaataaagtagggagattatgaatatgcaaataagcacacatatattccaaatagtaatgtactaggcagactgtgtaaagtttttttttaagttacttaatgtatctcagagatatttccttttgttatacacaatgttaaggcattaagtataatagtaaaaattgcggagaagaaaaaaaaagaaagcaagaattaaacaaaagaaaacaattgttatgaacagcaaataaaagaaactaaaacgatcctgagacttccacactgatgcaatcattcgtctgtttcccattctaaactgtaccctgttacttatccccttcctatgacatgaacttaaccatagaaaagaaggggaaagaaaacatcaagcgtcccatagactcaccctgaagttctcaggatccacgtgcagcttgtcacagtgcagctcactcagtgtggcaaaggtgcccttgaggttgtccaggtgagccaggccatcactaaaggcaccgagcactttcttgccatgagccttcaccttagggttgcccataacagcatcaggagtggacagatccccaaaggactcaaagaacctctgggtccaagggtagaccaccagcagcctaagggtgggaaaatagaccaataggcagagagagtcagtgcctatcagaaacccaagagtcttctctgtctccacatgcccagtttctattggtctccttaaacctgtcttgtaaccttgataccaacctgcccagggcctcaccaccaacttcatccacgttcaccttgccccacagggcagtaacggcagacttctcctcaggagtcagatgcaccatggtgtctgtttgaggttgctagtgaacacagttgtgtcagaagcaaatgtaagcaatagatggctctgccctgacttttatgcccagccctggctcctgccctccctgctcctgggagtagattggccaaccctagggtgtggctccacagggtgaggtctaagtgatgacagccgtacctgtccttggctcttctggcactggcttaggagttggacttcaaaccctcagccctccctctaagatatatctcttggccccataccatcagtacaaattgctactaaaaacatcctcctttgcaagtgtatttacgtaatatttggaatcacagcttggtaagcatattgaagatcgttttcccaattttcttattacacaaataagaagttgatgcactaaaagtggaagagttttgtctaccataattcagctttgggatatgtagatggatctcttcctgcgtctccagaatatgcaaaatacttacaggacagaatggatgaaaactctacctcggttctaagcatatcttctccttatttggattaaaaccttctggtaagaaaagaaaaaatatatatatatatgtgtgtatatatacacacatacatatacatatatatgcattcatttgttgttgtttttcttaatttgctcatgcatgctaataaattatgtctaaaaatagaataaatacaaatcaatgtgctctgtgcattagttacttattaggttttgggaaacaagagataaaaaactagagacctcttaatgcagtcaaaaatacaaataaataaaaagtcacttacaacccaaagtgtgactatcaatggggtaatcagtggtgtcaaataggaggttaactggggacatctaactgtttctgcctggactaatctgcaagagtgtctgggggaacaaaaagcctctgtgacttagaaagtaggggtaggaggggaaaaggtcttctacttggctcagattatttttttcctctagtccactaagaatactgcgttttaaaatcatttccttgattcaagttcctatttctctttatattttgtttgtttaaacctcctttactaaaatttactcttctttctctatagcttcccaacgtgatcgcctttctcccatccccctgtactttttccccttgtactaaattaactcctcaggtgaggaaaaacttttgaagtgcagagttctgcttcctgctattaaaagatgtaattaaaacagcaaaggtagcaagcatttatgaggtcagcgtagggtctcagtgttccctaagggccctgtcagtcatcctgaatcctgcccctacctggaaacccatgtcggtttagtaaggaaagtgttatacttttactttgcatgtttctcctacttcttcctttcagctctaacactctgaaactacgattacacaaaataaaataaaataaaataaaataaaacaataaaatgaaataaaatttaggttaaccaaaagaaactggatcctctatttctagttatcagaaggaaatttacaaatttcttatttccattgctttattctcttaaatgctttctctattattgctaaataaatagagatctctcactttttctacctgtctcaaccctcatcaggtacttgtgaaaaaatctcactctgattattctcacacacgcagaaagtgtttggttcttctatggctatctggagcctaggttaaaaaattatgcctatgtatgattatagaggtaagagggataaaatttaagtattttctttttatattcattcctctgtaaaaaactaaagcaatgaggatctaggcacacgtgtatccctgagaaaagatttcacatgttgaatcctgggaaaagacgtctttaaaatattttaaatgttaaaacatgcagatttgacttggctgttagattttggattttattttattaaatttaaacctgcattagcattgttttagatttagacagttttcaagaccctgtttcacatccctgatataagaggcatgtatatgtgaaat

SEQ ID NO: 914770 - DNA, 4001 bp, Homo sapiens
ccagtattatctttgtatcaagagttcttgataatttctgctctttggaggtagaagtgtcacccattaatgccttgtacggttcccttgcttttctcttttcccatgtactctttgtaaaataaacaagtgctccctatctgtagagcctcaggaaccttcttacacacctggacaaaaaaatgaaataagtgaaattaatcaggaagttgagctgaacattctttattaggcagaagccatacccttgaagtaggcattgtgttcccaagttcagaaaatagaatctagggaaatagggtcttcttatggttatcaggaaacagtccaggatctcaatggtacttgtgagccagggcattagccacaccagccaccaccttctgataggcagcctgcatttgtggggtgaattccttgccaaagttgcgggccagcacacacaccagcacattgcccaagagctgcggagaagaggtaggcagatacatgcatatggttaacagagaaataaagactggcttctgagaaactgagccaacacccatttttttctgcccaaatcttagacaaaactgatccccaggttattcccatcagcataaataagtacatatatgaatgcatacatataacatatatctatacacacacatcctctatgtacttaactagcatgtagtctatatatgtacatatatgctatatatgctgtataatactatatacaaattaattccaaattagttttaattttgtatgtgtatatagcatatacaaattaattactataaacagattaatagatacaaattaattgattaatcagtgtgatgatgggctgtctcctagcaacgacttctgccccacctccagtgtaactgcctagtctttcataatcaaatattcactttcctttccattccatttactacagaatttataaaattccaattattccttattgtaaaatgatttatagcctctaaaacagtattctatgcctctcatctttgagttggagcctctcccatacccatgtggagagacaaaaggattattctaagtgcagaattagcaggtgagagctggtatgcataatttgagttgttgttagagaaggaaaaatgaagggagggggttgggagagaaagacaggatattaaataatttaaaatagcaagattgtgaggaaggaaaaaatgcagaatatttaaataaaaaattaacaaaattttagaagcattaaatgataaaatatagtaaaatgacaaaaatgtgggagaagagcaggtaggtaaaagaaccaaaatgtaagattagaaagtaaaaagagaaaagtgaagcatctcctggactcaccctgaagttctcaggatccacgtgcagcttgtcacagtgcagctcactcagctgagaaaaagtgcccttgaggttgtccaggtgagccaggccatcactaaaggcacctagcaccttcttgccatgagccttcaccttagggttgcccataacagcatcaggagaggacagatccccaaaggactcaaagaacctctgggtccaagggtagaccaccagtaatctgagggtaggaaaacagcccaagggacagagagtcagtgcctatcagaaacccaagagtcttctctgtctacacatgcccagtttccatttgcctccttgagcctctcttataaccttgataccaacctgcccagggcctcaccaccaactgcatccacgttcactttgccccacagggcattgacagcagtcttctcctcaggagtcagatgcaccatggtgtctgtttgaggttgctagtgaacactgttatgtcagaagaaagtgtaagcaacagtcgactctgccctgccttttatgctggtcctgtcctccctgctccagtgagcaggttggtttaagataagcagggtttcattagtttgtgagaatgaaaaatgaaccttcattccactattcccttaacttgccctgagattggctgttctgtcatgtgtgtcttgactcagaaaccctgttctcctctacatatctccccaccgcatctctttcagcagttgtttctaaaaatatcctcctagtttcatttttgcagaagtgttttaggctaatatagtggaatgtatcttagagtttaacttatttgtttctgtcactttatactaagaaaacttatctaaaagcagatgttttaacaagttgactcaatataaagttcttctttgcctctagagatttttgtctccaagggaattttgagaggttggaatggacaaatctattgctgcagtttaaacttgcttgcttcctccttcttttggtaaattcttcctataataaaactctaattttttattatattgaaataaatatccattaaaagaatatttaaaaaatgaatagtgtttatttaccagttattgaaataggttctggaaacatgaattttaaggttaacattttaatgacagataaaatcaaatattatatacaaatattttgaatgtttaaaattatggtatgactaaagaaagaatgcaaagtgaaaagtagatttaccatattcagccagattaaatttaacgaagttcctgggaatatgctagtacagaacatttttacagatgtgttcttaaaaaaaaatgtggaattagacccaggaatgaagatcccagtagtttttcactcttttctgaattcaaataatgccacaatggcagacaaatacacacccatgagcatatccaaaaggaaggattgaaggaaagaggaggaagaaatggagaaaggaaggaaggaagaggggaagagagaggatggaagggatggaggagaagaaggaaaaataaataatggagaggagaggagaaaaaaggaggggagaggagaggagaagggatagggaagagaaagagaaagggaagggaagagaggaaagaagagaagaggagagaaaagaaacgaagagaggggaagggaaggaaaaaaaagaggaaaaaagagacaagagaagagataagactgacagttcaaattttggtggtgatatggatcaatagaaactcaaactctgttggtgacactgtacaatagtataacccctttggaaaacctttaatagtatccacaaatgctggatgcttgataagtctattacctagcaattacatttttagatattcagaaacacatgcatgtgtgtatccaaagacatgtatagaaatgcttatgacagcaataatcataaaaacctcaaaccggtagccacttaaatgcttaccaacagtagaattgataaattacggtatagtcaaagaatagaatattacacagaaatgaaaagaatcaactactgcttaacacgtagcgatacaaatgcattttacagcatttggttgattaaaagtaaccagaggtgagttcaaactatatgactttatttgtatatagaaagatggatgatgtgcctgagattctgatcacaaggggaaatgttataaaatagggtagagaggagccatgaatgacctttaaactttgttacaagttatttttctgtaacctggaagccaacgaaagatattgaataattcaagaaaggtggtggcatggtttgatttgtgtctttaaaagattattctcacttagtgaagaaatgtattttagaagtagagaaaatgggagacaaatagctgggcttctgttgcagtagggaagaaagtgacaatgccatttctattatcagacttggaccatgacggtgatgtcagtcgtgaacacaagaatagggccacatttgtgagtttagtggtacgataaaatcagaaatacagtcttggatacattgtattgtatgcactcttgtaaaatgcaaaaagatgtacttagatatgtggatctggagctcagaaagaatacaaccaggtcaagaatacagaatggaacagaacatacaagaacagatcataatgtgc

SEQ ID NO: 914771 - DNA, 4001 bp, Homo sapiens
accccgataaagatttttctccatcatatcatcctccttggaatcctggaattctcccataacatccacattaattttacaagcccccatacatttcttaaggaagctcttggttcttcctatgtttctctccatccctcagcccatgaacactttttccttttaacacaagagtaaaagatggagaagataaaattgcaatttttgattactgaagaaaatgtactttattaaacagaaggctttctctcaaggccaagcccagtccccatgtgcagaaggagggtgtcagggtcacaggaacacctgcaaactggaagagaactcagtggtacttatgggccagggcaatggcgacagcagacaccagcttctgccaggcagcctgcacttcaggggtgaactccttgccaaagtgagtagccagaataatcaccatcacgttacccaggagctgttaggcaaaagacaaaataacacacaggcatgttgagtagaagtttccgaaaacaacttgatgaaaaaacaaacaaacaaacaaaaacggctttatacctacattcctagacaaccctgacctcaaactgttccaaggtttgtgcccacccaaaaaattcagatgagcttaggttcaattttattctatgagccctacattcaacattctacctacctacaccctcacccccttccccattttaccagtattattgggttccctctctccctgtttttctttaagcaattgtctaatttttgtaaatgtagaatgtgagtgctgcaagagttctcagcgggagtttaaaatccccaacaaattcggaaacaagccttcacttggtcacaatactgatgggaaatttaacatattttagaaaatgtgtcttatttttctttgagcaaatcttttattttttttgcaaaaatctctttctaaacctcaattatcatgacccacataaaataaggcatttctatttccttgaaatggactttcatctaccaaaagccaaatttcattcttctttcacaagtctacaattctataatacaattctctgggataaacacatcaagttctggcaagatttcctgaaaagttaagccaattcaggctgttagtagtcctttactgtcactagttctgaatcatgtaagttttggttatgctcactagaagtctgctgttctaacatcaagctcgacccatgatttctgagatctttgttggtctttccaataagattatgagcttcaattaatgtcaaaatataaagccaaaaaatcacatcaccagcacctgaactcaccttgaagttctcaggatccacatgcagcttgtcacagtgcagctcactcagcttagcaaaggcgggcttgaggttgtccatgtttttaatagcatctccaaaggaagtcagcaccttcttgccatgggccttgaccttggggttgcccaggatggcagagggagacgacaggtttccaaagctgtcaaaaaatctctgggtccaggggtaaacaacgaggagtctatgaaatgacaccatatcagatacaaaattagagatgcaaaaaatcttgaggactttcccaatcaacttgctagggtaatattcacccttcattcccatgcattgagaaccaatgcttacctgcccaaggcttcacctccagcctcttccacattcatcttgctccacaggctagtgacggcagccttctcctcagcagtaaaatgcaccatgatgccaggcctgagagcttgctagtgattgcagctgtgtcggaagcagatatgtgctgctgcctctctgtctggccttttattctttactgccgaagttctggccccctgttctccatggtacttaaaagtcattggtcaaggctgacctgtgtccctcaggggtggagtcaggtccggagagggtcagcagtgatggatggacactaagtttgtgataatgtgtgctggatcctgaggctcttttttgttggctcctcatctatctgcaacacaaatttccatttgtccccttttttaccctcttcatcatcttccaaaatgatatccatctctcccattctccttttccaagaaagcctcatataaaggagcaaatctcaaaataggaaaaaaagtttcagccaaagcgcatttaacatttgccttaaaggtggtgacagtgacaaaaacagggccaaggaaaagaaaataaagctgttaaaacagaatctcacccagttctagctctcttaaggagtgcattgtaaacaaaacttctgtaccttagtttctctagggagacaaaaaccgtacatagttccttctagaaactgaacagaatagcaagtagtccacagtgggactaaagccttaatcccaaagtacagtaccttggggtgattccctagagaggacagacagaaaagattacatccagtgcttccagagaatcctctctcttttcatttctctatgaccacaggggacattggctactttgtgagtattgcctggggctctcttcttgcttgcctgtctgtcctgcttatacttctcactgggaagggagctgagaagcctaaaatcctaaaattatttaaagccagaatttgtcatcaaacagagaaaaaagtgaatcgatatattaatcaggctaggagtcagggtatattattcctctagtgtccttttttttttctgtatgtccccattttgatgacttgctagctctttacttggtagagctgaaactggaagttgggatttacagtgtattcaattcgatccatgtgcctgaagaatattgctcatgctatatcacttaatctgcccttataataccattgtcattatcctcatattttagaatcaaggaataaattcacagaaattatttaactatcaatgtgacagaagtaatgattgggggaataatagaagcagagttccacaaattccagcattgttaattctataaaagtcccttacatcaccataatctcattgccccagcccagttcctccttctggcttgttctacatccatttattttttcttttttctttttcttttctttctttcttttttttttttttttgagacggagtctcactctgttgccagactggagtgcaatggcactatctcagctcactgcaaccttcgcctcctgggttcaaacgattctcctgcctcagcctcccgagcagctgggactacaggcgcatgccaccatgcccagctaatttttttatttttagtagagacgggatttcaccatgtttgccaggatggtctcgatctcttgacctcatgatctgcccacctctgcctccgtctccatccatttctaccatttctttctcctatggctccccttgccccaccagatctaggaatttctgttcctacaatttcctgtatgttcaggccctagaggttcttcgtctttttcacttagcagtatggctcctgtctcccaagtcaagtgcctttggggattccatattccaagtttactaagagcgtttctctcttctataacctgactttgttatttattatattttcttatgtttgtgataaaaaaaaaaaaaaaaaaaaacacttgtggcaagtaagaatgtctcccttgcttttctcccatgattccagaagtcttcacctgacttaatgactgcccaaattgttattattccaggccactgaatttctactccattttcttttagctattaaccaatggtatctttctgagcatatattctaaccattggctaacacagacaaaaccaggaattcctaaactttttttgtgtcacaggccagtttggcagactgtaagtgctaaaaaaatatgtttttattgcatcaaataatatacataggagtgctaagtttaattacactgaaatatcattatcagacatcaaacattacatttgtggtatagtatttattatatttgcttctttatgaaagcattagatc

SEQ ID NO: 914772 - DNA, 4001 bp, Homo sapiens
tgctacacctgactaaaccttgaattcctaaagcttggaacactttcccttccttaagaaccatccttgctactcagctgcaatcaatccagcccccaggtcttcactgaaccttttcccatctcttccaaaacatctgtttctgagaagtcctgtcctatagaggtctttcttcccaccggatttctcctacaccatttactcccacttgcagaactcccgtgtacaagtgtctttactgcttttatttgctcatcaaaatgcacatctcatataaaaataaatgaggagcatgcacacaccacaaacacaaacaggcatgcagaaatacacatacacacttccctcaatataaaccctttgtggctcatatatttaaaaagatgtaaaaaaaagagctgaagaaaatcatgtgtgatctctcagcagaatagatttattatttgtattgcttgcagaataaagcctatccttgaaagctctgaatcatgggcagtgagctcagtggtatctggaggacagggcactggccactgcagtcaccatcttctgccaggaagcctgcacctcaggggtgaattctttgccgaaatggattgccaaaacggtcaccagcacatttcccaggagctgttgagatgaaaggagacaataaagatgaacccatagtgagctgagagctccagcctggcctccagataactacacaccaagcttccacccagaatcaagcctatgttaacttccctcaaagcctgagattttgccttcccattaaatgcaggtagttgttccccttcaagcactagtcactggccataatttaaatcttgctatcttcttgccaccatgaaccctgtatgttgtaggctgaagacgttaaaagaaacacacgctgacacacacacacacacgcgcgcgcgcacacacacacacacacacagagctgactttcaaaatctactccagcccaaatgtttcaattgttcctcacccctggacatactttgcccccatctggaattaaaggatataagtttgtaatgaagcattagcagcattttatatgtgtccagctgatataggaatagccttagcaatgtatgtttggccaccaaagttccccactttgactgagccaatatatgccttctgcctgcatctttttaacgaccatacttgtcctgcctccagatagatgttttaaaacaacaaaaatgagggaaagatgaaagttctttctactggaatctaataaagaaaagtcattttcctcatttccacctctcttttctcaaagtcaaaattgtccatctagatttttagaggcactccttaggccctaaaacattaccactgggtctcagcccagttagtcctctgcagtttcttcacccccaaccccagtatcttcaaacagctcacaccctgctgtgctcagatcaatactccgttgtctaagttgcctcgagactaaaggcaacagggctgaaacatctcctggactcaccttgaagttctcaggatccacatgcagcttgtcacagtgcagttcactcagctgggcaaaggtgcccttgagatcatccaggtgctttgtggcatctcccaaggaagtcagcaccttcttgccatgtgccttgactttggggttgcccatgatggcagaggcagaggacaggttgccaaagctgtcaaagaacctctgggtccatgggtagacaaccaggagcctgtgagattgacaagaacagtttgacagtcagaaggtgccacaaatcctgagaagcgacctggacttttgccaggcacagggtccttccttccctcccttgtcctggtcaccagagcctaccttcccagggtttctcctccagcatcttccacattcaccttgccccacaggcttgtgatagtagccttgtcctcctctgtgaaatgacccatggcgtctggactaggagcttattgataacctcagacgttccagaagcgagtgtgtggaactgctgaagggtgcttccttttattcttcatccctagccagccgccggcccctggcctcactggatactctaagactattggtcaagtttgccttgtcaaggctattggtcaaggcaaggctggccaacccatgggtggagtttagccagggaccgtttcagacagatatttgcattgagatagtgtggggaaggggcccccaagaggatactgctaattttttttatagcctttgccttgttccgattcagtcattccagtttttctctaatttattcttccctttagctagtttccttctcccatcatagaggataccaggacttcttttgtcagccgttttttaccttcttgtctctagctccagtgaggcctgtagtttaaagctaaagcatgtaccaatttttgaaaagttcagggattgtgaaatgtgttttaggcataggtccaggatttttgacgggacaaatcttagtctctttcagttagcagtggtttctaaggaaaaagtgctatacttctttttgaatatactctttgtgacttttgccattatctcttaatttctcaatagtgcagtgaaaacaatttctataaagccacagtttcagcgcagtaatagattagtgttacataatataagacctaatgcttacctcaatatctacttatccgtacctatttgaaataaatcatgactgtttcatcttagaaaaatatttgattccatattcaggtatgtatgtatacaccagatgatgtgtatttaccactggataagtgtgtgtgctggctgatgacccagggttttggcgtagctcttctatgctcagtaaagatgatggtagaatgttctttggcaggtactgtggattagaattaattatcttgtataaatgctaggttcacttctcagggaatcttactctaagacataagatgtgcgtgtacatggaaaacaactctaaagaggcaagggttgtttttattgactaatagtccacacactattataactcgaatattagtgtactttagacagctttatttctaacacagtgctgtttctgacatattggaccattaacagggtaggaagtatttatggtggttttttggttctgttttgcttttggttagtttgtttttgtttttctctgaaagtgatccatgatctctaaccttgctagattataatgccagaagctctggaattctggcttatcggaggcaagctgtatcttcaaattagtttatcccctaagctatcaggttgattgaaattattataatattggtgaaattctttcatccttcatgatcctgtgtaaagcttatatctgctcattgatacagatggctaaaaggccagaaagacacacatttacccatgtaacaagcctgcacatcctgcacatgtaccttcgaaattaaaatgaaatgaaataaaattaaaaggaaaaaaatgccatggcaacatcaggaagttatcttttatggtctaaaaatgggcagcataaataatctaccccttgtttagcatactattgaaaaataacaataaaaatcggcaaccagtagcccttgcgtctactctgcctatgaagtagccattcatttattccttcaattttttataaacttgttttactaaaaaaaaaaaggacaaagaaagaaagtgcgaattgtgaaatggtagtgagtgatggcatttgaagtgggtcctttatgatttgatggagccaggcagaagacgtttggagaaagaagttcctgaaagtaggaagggcatgtggaaaactctgaggctgaggaaaaaaaagaaagaaagaaatataaagaaagaacttgacatttcactgtatataaacacattacaagcctaaagtacgttgaagaaaaaatagaattcaaagttagacagaagggctcaggcttactatttgcatcttacagatgagagtagtagagttggtattttattctgaaacaca

SEQ ID NO: 914773 - DNA, 4001 bp, Homo sapiens
ttgacttcctaaagcttggaacactttttcttcgttgagccccttcctcgctgctgtgctgcaatccagggaagggggttcagcccccttcactgaacctttccccatctcttccaaaacatctgtttctgaggagtcctgtcctatagaggtctttcttccaaccagatttctcctgcaccttttactcccacttgcagaactcccatgtacaagtttctttattgcctagttcttttatttgctcatcaaaacccacatctaacgtaaacaaaaaagtgtggagtgtgcacatgacacaaacacacatagccatgtataaatacacataaacacatccctcaacataaaaccctttgtggctcatatatttaaaaagacataaaaaaagaactgaagacaaccatgtgtgatctcttagcagaatagatttattatttgattgcttgcagaataaagcctatccttgaaagctctgcatcatgggcagtgagctcagtggtatctggaggacagggcactggccactccagtcaccatcttctgccaggaagcctgcacctcaggggtgaattctttgccgaaatggattgccaaaacggtcaccagcacatttcccaggagctgttgagatgaaaggagacaataaagatgaacccatagtgagctgagagctccagcctggcctccagataactacacaccaagcttccacccagaatcaagcctatgttaacttccctcaaagcctgagattttgctttcccattaaatgcaggtagttgttcttcttgcagcactagtcactggccataatttaaatcttgttatcttcttgccaccatgaaccctgtatgctgtaggctgaaaacgttaaaagaaacacacgctctcacacacacacaaacacacgcgcgcacacacacacacacacacacagagctgactttcaaaatctactccagcccaaatgtttcaattgttcctcacccctggacatactttgcccccatctggaattaaaggatataagtttgtaatgaagcattagcagcattttatatgtgtccagctgatataggaatagccttagcaatgtatgtttggccaccaaagttccccactttgactgagccaatatatgccttctgcctgcatctttttaatgaccatacttgtcctgcctccagatagatgttttaaaacgaataacaaaaataggggaaaggtgaaagttctttctaccgaaatctaataaagaaaagtcattttcctcatttccacctctcttttctcaaagtcaaagttgtccatctagattttcagaggcactccttaggccctaaaacattgccactgggtctcagcccagttagtcctctgcagtttcttcactcccaaccccagtatcttcaaacagctcacaccctgctgtgctcagatcaatactcagttgtctaagttgcctcgagactaaaggcaacagtgctgaaacatctcctggactcaccttgaagttctcaggatccacatgcagcttgtcacagtgcagttcactcagctgggcaaaggtgcccttgagatcatccaggtgctttatggcatctcccaaggaagtcagcaccttcttgccatgtgccttgactttggggttgcccatgatggcagaggcagaggacaggttgccaaagctgtcaaagaacctctgggtccatgggtagacaaccaggagcctgtgagattgacaagaacagtttgacagtcagaaggtgccacaaatcctgagaagcgacctggacttttgccaggcacagggtccttccttccctcccttgtcctggtcaccagagcctaccttcccagggtttctcctccagcatcttccacattcaccttgccccacaggcttgtgatagtagccttgtcctcctctgtgaaatgacccatggcgtctggactaggagcttattgataacctcagacgttccagaagcgagtgtgtggaactgctgaagggtgcttccttttattcttcatccctagccagccgccggcccctggcctcactggatactctaagactattggtcaagtttgccttgtcaaggctattggtcaaggcaaggctggccaacccatgggtggagtttagccagggaccgtttcagacagatatttgcattgagatagtgtggggaaggggcccccaagaggatactgctgcttaattttttttatagcctttgccttgttccgattcagtcattccaatttttctctaatttattcttccctttagctagttttcttctcccaccatagaagataccaggacttcttttgtcagccgtttttcaccttcttgtctgtagctccagtgaggcctgtagtttaaagttaaagcatgtaccaatttttgaaaagttcagggattgtgaaatgtgttttaggcataggtccaggatttttgatgggacacgtcttagtctcatttagtaagcattggtttccaaataagaagtgctatacttatctttgaatatactctctgtggttttaggccattatctcttaagttctcattagtgtagtgaaaaatcctataaagcaacagtttcagtgcaggaatagattaatgttatgtaatataatataagactgaatccttacttcaatatctacttatccgtacctatttgaaataaatcacgcctgtttcatctcagcaaaagtattttttttatattcaggtatgtatgtaggcacccgatgatgtgtatttatcactggataagtgtatgtgctggctgatgacccagggttttggtgtagctcttctatgctcggtaaagatgatggtagaatgctctttaccagatactatggattagaattaattatcttgtataaatgctaggttcacttcttagggaatcttattctaagacataagacatgtatttgcatggaaaacaactcttaagaggcagggactgttttattgactaatagtccacacactgtgacagctgggatgtcactgtagtttagacatctttatctgtaactcagtgctgtttctgacatattggccacttaacatggcaggaagtattcatgctgtttttttctttattttttctttgggatttttattttttggtaggtttggttttgcttttgttttttctctgaactcgatccatgaccttggtagattatgacgtcagaaactctggaaatctggcttattggaggagagctctaccttcccctaacctatcaggttgataggaattataataatattggtggaatcctttcagacttcataatcctgtgtaaggcttatatctgctcaaagtgttaggcggctaaaagaccagaaagatacatgttgacctgcgcaacaaagctgcacatattgcacttgttctttggaagttaaaataaaagttgaataagaaaggaaagaaaaagatttgtcaacttatcagtatcttccagttactcacataataataagtgacttctctcaatctaaggatgggtgagaaagatttttattggtatgctggtacagattatagagactgaggtgaacccaaattagggtctctttaagataggggatctgtgagatgggtgtgtatagatctttggccatatctgagagtctggttgggttccatttgtagagcctgacctttaagaatgtgtcagagactggtgtctaagcccgctaaggcctaaacaagtgaatcttttgaatctctcttttttttttttgagacagagtcttgttctgtcacccaggctggagtgcagtggtatgatctcggctcactgcaactcctgccttccaggttcaagcaattctccttcctcagcctcccaagtagctgggattacaggcacttgccatcatgcctgtctaatttttgtatttttgtagagatgggatttcaccatgttggccaggttggtcttgaactcttgac

SEQ ID NO: 914774 - DNA, 4001 bp, Homo sapiens
gcaatggggtcactgcagatctaataagaagggatcatactggagtaggatggacctaatctagtatgtgtccttataaaaaggggaaatgtggacatagacatgcaaacacggggaatgccataccaagactggagtgatgctgccacaagtcaaggaattaccagaagctaggagagaaccctaaggcagagccctccctagaagcttcagagagagcatggccctgctgacacctcgatctcccacttctggcttccacgactttgagataatgcatttctgttgtttaagccactcagtttgtggtattttgttataggagccctagaaaatgaatacaaacttcctttcttattttatttgcctccagtttcccctcgaatgaccccctgcagactgagtaagctatctgaaaggtacatgtaaccctgacagtccccaaattaaaaaccgctcattccctcacctctcaatccccagattacgagtctggtttacaaagctcttgcctcactcaattcatgcttttctctccagcagtgatgaactgctgggctctgactaaacacttgatgttatttcaagctgttgacctttgctcatttcccaaccctaacacccacttatactcctaccttttttccccatcttttaaaattcagtgcacacattccttctaccagaaaacctccccctgatattcccacaccctgtgtcctaccctaccaacaccccctccaccagcaccagcttcctggatggggtaggtgacctttctctgattgctatgcattctctgcataattgacttatgatagttcctgcagtttagtaaaatgatctccacatctgtttgcctcactaagttgtgaattcctaggtgctctgtaattgtgtgtgtgtgtgtgtgtgtatatgtgtatgtactcataaataggtatatttaaataagatcacttctcaaaggattggtagggggcggtagaggaggtaagcagctatggagtggagtgaattatggataggtgggtatgactatcccacattaggaggctcattatctccaaagcttctttcatctgccttactcttttacacacagagaagccagagtcgggggctggggaggtataaaaagaaaatttcccctacccctacccatcaagccccaccacaatcccttggaaagaatgccagactggcccacgccaacaagtcatcccatacgaaatggcccagtgcccgccatctaatgtactgaatgccgtgggagctccaaagtcatgcagccttttgggggaagggggtaggggccgcgcgggaggcacacaaaataaagaaatacgttcaacgctaatgcctgaattccctgacatgtttcccacggcagctgaactctcccccactcctgccccaaaggcattcaggccctccactctcccctccgtctgctgtaaaagccccgggtcctttcttcagaccctttcttaccctctggcctcctacctgtctggatcagaagaaggtagacaaaaggagcaaggcgcagggccctggaggctctggacagggctcccctttctctcttcattttgggtggcgttctccagctctagtgcagacaattagcatgatttctccactctgggcacgtcccctttgtaccactcggagtttctctgcccgaacacaaccctgccaacttccctctgaatacacagagctctgtgtattgctggacttgttctttcctctccctcagacctggcattttctagtttccaagccctacatccccagtttggaagcaggtatctgcttaggagataatctccaactcaggttccaacatggggggcaccggcagcccagcagttggttgcttgtctgtgctgagcctcactacccagggagatgaggatctgggctcagagcactgagctgggacacacacttaactggactttgtgtcccaacctaccctgtctccacctaacactccttctccctgaggaggagggtacatgccaggacagacctccaataagctctgaaaagggagggagaagagattttaaaaagctgggaagtgaaagactccagacaactgctgaagaaatggaaaacccctgttccatcccaaaggaagaagactggaaaacagcttgaattctattattgttacacttgtctttccgtggcttggaattttctcttctatcatagaatcacatagatgctggacacctctttccagaagccactctgttcattcccctgctttcaggcaattttctagaacatgtctgagcaaaatgaaggtcatctcctaacagccagcatcctagggttctgttaccagcttaacagcctagctgtgccctcctgttttgaggctgtgaagaggagaaacactctagctctactctgacccccattcatgtgttcacaccttttcatgagggcggccaagggaatggatgcctagtaactgtgatcttgggatgggctcgcaacctctttgagccttcaatttctcatctgtaaaatggggaaaagaagagcttccttgaggggaattgttgggagcgttgatggagatttggtacagaagagtacctagcaaatcctttgttacagagatgatgttttaaactttttaaaaattgccttgtttcttttttcattcatgctgggatctttatatttttgggagaccaaacttcacaacttccttcttggtcatccctaacccctggtcttggttttgtaagtgcagcaattatctctctaaatattctttttacatactggagaaagcctgagtaggtcaactttctagaactgaagcattattacatagcccttctgagcctcggcagagggagaagagttgggaagcactgaacttcacagacctctctgaaaacattctgaaatatataaaggggattcttttttccttttgcatttctgtgtttatgacttttccctagacaactcaaggcacctttcttccactggaagaggtaatgttattatagcaggtacacaaaaagagtcaatattcagcttctgacatttaaaatagcatttcaaagtccatagcaagatgaaaggcttagccagtctttgtaagggacaaaagagcattctaatttcttttatctaccccttgacatatcatagatcagcctgtggactggatcacagagtccttctggagtgtagataaatggcctctttgcctgtgatggctgggccttgaggcttatggatgggagtaaaaggaggatgcagtgtttgggaaatagaaagcccgaagtctgcccttgttatcctgaagcactgtggaaagaaaaatgtgctagagggagactaaaaggatctaagttctcaatatccccacttccccgccccagaggtggctctttatacctgcacagaatttgcaagggcttctaggtgtccagaagccctttaggagactcagaagtgccgagagggtaaagaactggcaggaaacagaagattgagcaaaggcactgccatgtacggggattctgaggccagaggcaacagctgggaccacctactgctgtggtgggagcctcaggtagctcatcaggccaggaaaaaatgtagaccctgagtagagactggtgggaaacctgagaataccacacaggtccacagacactgtctccccctgttgccacaaggttacttcagccacaccatgtatatttaccccaactcttattagagaggagctgggattgggagaggacattggaaagactgcttgagcaattgcctgagctgtccaagcagagactgagctacctaaagacagtgtgaaaatggttggatcagactgggcttactgagatggagtgatattttcctctgctaccctgggggcggtgagaggttcatgtggaagatcacagcaactacaaagacataaaggccttccctttcctttgtacgttgga

SEQ ID NO: 914775 - DNA, 4001 bp, Homo sapiens
ttgtgtggtgaaaagaaatatgggctgtggaaccaaagcaatgagtttggtgctaccacttacttataaactccggcaagtatttaacctcagagccttggttcctggttcataaaatgagaataataatatctgcaagcagtaatgaattgaaaaatccctcatagaatttttgggtcagaataaatgcccatacacagctatagtgacgtgggcattttaggaagaagaatttctgtgggtgttaatcttatggaaaggcaatccagtatcacatttagcttaaacgctatattcattacactcagtgtacacactttcaacattcttatccccagtagctgctcacattgactgtttcctactgagccctctctgagaatagcagagctctatttgtagagaaggctcctggcatttttggtaccctttcaatcccatagctattcatcacagtaaagacactaccaccaatggtcagcagatgtgggattgaaagcaatcaagagtttcctttggaaatagccctgcagacattacatttccaggtacaaagcttaaggaaaagtctgccttggcagcttgtctggcacaggcttcatctttggtaaacaaaacatgactataccacctttgttttgttagaaaacttggaagctgtatttccaagccaactggatctttggtctttcctcaaagacaaggggccctggctcttaaagacttgctggtaggccctgtgctgttcctgaattttatcaactaaactcatctttaggaaatggaacatggatgcagaatgcaactggttctgcctgtcagaaaagaagcaagcattcaaatatccaacagaggttgccaaaacatctgaaaagatgttctaataaccacaaagttgaaaatagcatgacatcttctggagtcaggaggtgacttcagagggagatccatgaaacaaattagatggttaagatactaggccctggagggggcagggagaaagggttattttctgccccaaattaaaaatcaggaacatagaacaccgtggcgccatctcacctagctatgctataggttctgggataagatattgccctcagcaagaatgacttggagctggaataaactttttaccagtgaaagcgctaattctaagtagactcaaggaaaccctgaaaatagcaggcaaatctcctgtgacttccccctcttttaaacgttgaaaaacatgacttagcatacttatctcccattatgatgtttcattccagaaatacaaactaagaaaacactgtgttttaaccataaggaattcttgaaatttctcaaatcttcatcccaagtgttgtcatttaaaaacaaacaaacaaacagaatcccccagaagttactagtagtacctggtggaaattgtcaaacacctggttgtgtatatgtcccttcacaggcaaggctattaataggtggctcaacaaatacatggagctatgaatatctcttccagattacacacccatccatactagggctcttcaagcaaaaaacaaaacaccttctcttggtctagatcaactcacccccattgtaagtacccaagaaatacaaccttccccacacaaagtcaaaaagaggccaaacctgggagtcaatgaggaccctaagttcactcacttgtcttctgtgaaacttttcccagtaataacattcttcccttggggtacatagttccagtattcttccacaatcccaatgtagtacgttctggtaactgtgccaaccagcccagacagacccaggaatgtgaggagaaagatgcagccagctggctgcttccgaggcatttgtggatgtaactcaagcaggcaggcagcctgcacaggggacaaatctgttggtccctccccctcactcagctcctcctcctcaggtagcttgggtttggggaagaggcaaaggctgaggccttgcgtaagcaaagcaagctcgatgggggcgttgctttgacaacaaaacttttgccagccatccgagaaatgtgtgactggctcatttatgtattgcccaagccaacaggcctgtttctatacgtttcggtaccatgctctgacatcagtcatttgtcagccaggatgacagtgtgactacttgagccgatggctttcccccaccccttcttcttcttttcttctccacacctcttacattaaaatctgaaaagtgagctggcctgagtggagcatcaggaaacactccaggcactaaagaaggcctcctctctgtcgggagggcagaggaagtgacataatcaccatccagcttgttttatgaggctatgtgaaaccacaaactaacatcataaagttcatcacaacaacataaaaccccactaatcctccactggctcgtgtaccatctcccccatattctctcaaatccttccagcaaaaatgagaaggttgactgctcagttcagccaaaatgttcgcggccaccacctccacacagggagccgcctttcttaggatgaatgaaaatgatgatggggaagtacccttcagacacatggagacaaaattcagtaacaggtctttgggtggaaaaggctgggccattcttctgtgtcttctaatctgtgtcccagaatctcggtattgaaagagaccttgatcaaccttggaaaagagttactcttatccccatgcacagttactcttgagggagcagccatggaatgaaggaaacagcctcctggcctttgaagttggtcagacctgggtttgaatgtgagttcccaccactttccaatttagtggcatggaggaatcacttaacatcattgagctggagactatagaagaaggattgagggattcttaaggaactttttaaaagatgatgtctgcaaagtgcttaccccagcccctagcatagggtaggtactaagtaagtgttaaagtccttcctgcccattcatgccctctaagagagactgtatcaacctgtgtatccacagacttgtgtttccccgcagtcttcaactttctttccactattctttgccaaagtcctatctgccatgccttccaccagtctcaagtaagagaattctttttctttaaatggtagctaccctataaatgtcccatagcacagtttgtattagcattcatcttaattaataaaaggccaggcacggtggctcaggtctgtaatcccagcaatttgggaggccaaggcagtcagatcacctgtggtcacgagtttgagaccagcctggccaacatggtgaaaccctgtctgtactaaaaatacaaaaattagccgggcgtagtggcaggcgcctgtaatcccagttacttgggaggcttaggcagaagaatcgcttgaacctgggaggtggaggttgcagtgagccaagattgtgccactgcactccagcctgggcaacaagagcaagattccttctcaaaataagtaaataaataaataaataaataataaaatacatactgagtatcctgtttcatagccaggctctttacaactttgatttactgatttgtttgttgtatcaaggacactggtagaataattgccacagcacatttccatttagctaaaatctcctcttcaacatgagtttgggagcttcgtatgagtctggcacttcaacggacactatagaggaggacttacgtggtaggcctgaggttggcctcagaagaagtagggagttcaaagtatggggaatctggccaggcgcagtggctaatgcctataatctcagcactttgggaggccgaggtgggtggatcacctgaggtcaggagttcgagaccagcctgccgaatatggtgaaaccctgtctctactaaaaatacaaaaataacccgggcatgttggtgcatgcctgtagtcccagctactagggaggctggggcaggagaatctcttgaaccctggaggcaaaggttgcagtgagccaagatctcacaact

SEQ ID NO: 914776 - DNA, 4001 bp, Homo sapiens
gggccccgagctcgcccggccgctcgcgcagcgcctcgcgcacactgcggactgcgggcgtgcacataatccgcgagcaagacgaggccggcccggtggagatcagcgcctgagccgcctcgggatcccctgagaggcgcccgcggtctgcggccagtggcccgggggaaagctggggctgggaagcccgggcgcggcgcgctggggacgaggggaggtcccgggggggcgctggtgtctcgggtgtgaacgtgtatgagcatgcgcagacggaggcgggtgcgcggaggcggcagtgttgatatggtgaaaccgggtcgcatttgcttccggtttactggctgtgtcctcacttggtataggttgtgccctcttaggaccacatagattattacatttctggcccaatacccaaaagggttttatggaaactaacatcagtaacctaacccccgtgactatcctgtgctcttcctagggagctgtgttgtttcccacccaccacccttccctctgaacaaatgcctgagtgctggggcactttttttttttttttttttttttttttttttgcaagttcagattagagaggccactttcccagaatccacagctgcactaagctaaggagaagccagatgccggttactgggtgtgcaggggctgttctgagctggggggatcattgtgaaggccttcttccctgggcacctggtacctggggacctacaaggtggtgagggaagggtacgagtacattccttttccctctgacctgggcgctagcaagggcaaagaacccgagcctgccagcttggcctcctcccacagcctccctcggaggcatgccatgccaagcactctttctgtctctgttcatgaataaaagagatggatgggcttattcttatagagaagtgaatttcacttactcccctggcccgaaaactagaccaaatgaggaactgttttagctcatcaaactcatatattcctcctggcttccttacaaaacaagcctttcaaacaatcattgtcctcaggaaagttgttgagcttcctccagctgtgagaataagtcctaatctccagagaaatggtggggggaggaggaggcttattgcttcccagcatttggggggaacatgatccaacccctggcctcctgccacccatctgccctgctcccacatgctcaggtcccagggcacagaaaaagggcagactccctaatcacactaacatcaaaataaagaggctgggccgctgtgtagccaggacatgcccatgccaccgcctattgaacagttcataggagtggcagtaatctactgtgtgaggagagagggcaattaaaaagctgaaagagaaggaggccctctgtgtattccattccctcctccttaatgcctccaagggtccttgcatccctagtctcctaaactccagctctgattcgccatcaacccatggagcaattccaaggccccagttacccatcacctccacaccaggtcaagttttgtctcagccccaaaggcactgacatttctagtttgccccctctgccctgaaccccacagcatgcctgtctcagctccctgtccctcggcacttccccaggctcatttgagcaggtgtgccttcgcagctcccctaaacttcccaggtgcctcatccataatgagataatgcatgtaggggaaaagtttctcaagaaggtggaagaggcagcaggacttggataaggagtacctgctggtcagccttgagatgcacaggtgaaggttagggtgagatgagaacatgccataccctggtgctgaatccctgaggggccagcttgccaggcttaagccaaatctgccttaaattgggggtggggaggggtaagtaaggaagtggggtttgtttttgtgttgttttcatcttcatctttgtattactagcatccagcagagtgcctagcacatactggatgctcaataaacttttgatgaaatgaaatgacaactttattccacataaacaagggtaacaaaacaagctgcttaaatataccagtcatttctcttcttctcctttcacctcctttaccctctttccaaaccccaaattgtccgttccaaaatcacttacccgttcattcatttacttattcaggtgttcttttatttattcgacaaacatttgtttacctaccatggactaggccctgtgctagacactgctgatacagcataactatgtcaggaagacagatcagtaaacagattacaatatagtgtgtaaaatgcaatggcagaagtagatacaaggtgctctgggagcatgtagattagatgtcagcaaaggcatcttggaggagaacagacctgagttgagtctttcttagaaagacttgttagttaatctggtttttaaaagtatgagaggacacactccaagcagagggagaagcatgtataaaagcttggaagtgcaagacacgatgggggggaattcagggtactgagcctagcagttgatgaaattatttcaggaaagtatacaaagtagaaggtgaagaaagctgcagatagatttctgaggcatcagtatgtgtagaaaatttaaaaggacttcaccaagaaggcttaaaaggcacagccagcaagataggagaatatataggagataactatatcacacaatcaaaagaacaagagagtttcaagaaaaagggagcattcgggactacaagggcagggggctcacatatgaaatgaagttaaaagtgcatgttaaatttggcaacaatgaaaacattgagtgacttggcataagtagtttcagacatgtagtaggggttaaagccagattgcaacaggtaaaaagtgatatgtggaacttctctgctaaatacttgagactagatgtttgagaggtcttcctgtttcaaaacaactaggtcttgcttaaatgatatttgttttgcattgctggcttcaagagatgggggaatttttttttttttttcagacagagtctcattcttgtcacccaggctggagtgcaatggcgcagtctaggctcactacaacctctgcctcctgggttcaagtgattctcctgcctcagcctcccgagtagctgggactacaagcacgtgccaccatgtccagctaatttttgtatttttggtagagacagggtttcactatgttggccaggctgatctcaaactcctgacctcatgatccgcccaccttggcctcccaaagtgctgggattacaggcatgagccacttccctgccagagatgggggaaatttttaagcagtcagaagtaaaacaaaatttaaaagcacagtgagctcaaagtacttagcactcattaaatatgagattaccaagggaggtgaagcaagatggctgaatagaagccttcactgattgtcttcctgcaaaaacaccagattgaacaactgtccacacaaaaaaagcaccctcataacaaccaaacatccaatgagtgatcacaatacctggttttaacttcatatcactgaaagaggcactgaagaaggtaagaaagacagtcttgaattgctgacaccacccctccctcatcacccggcagctgccgcatggaacagagagagaatctctgcacttgcgggagggagagtgcagtcattgtggggctttgcattggaacgcagtgctgccctgtcacagggagaaacaacaccaggcagaactcagccagcacccacagaaggagcatttagaccagccctcgccagagaggaattacacatcccagtggttggaacctgaattccaaaaagactcacgaccatgggttaaagtgctctggggtcctaaataaacttttaaaagtctgtctaggacacaaggactgcaattctaggggggattcctgatgctgtgctgggcttgaagccagtggacttgagcatatgatctagtgagacaccagctggtgcagccaaggg

SEQ ID NO: 914777 - DNA, 4001 bp, Homo sapiens
tgcttttataatgttgtggtaagaaaagtagaaaaaagcttcaaaagtcataaaatcccacacctcctctgactattacagtatgaaatgcaaggctcttctcaaagtggtctcaattttacttctccagttctaggtagggaaacgaacatctattgagaagctacagtgtgtcagccctgtggtgagtcctctctacacttcatctgatgtaagagcaccctcattccaatccaaagatcatgctctttctcccacatgatgctgttctctggcttcctcacccatacttcattccctcttcctctgattcaatcatctttgtctctgaatactctacattctcctaaaactctctgcctacgcaagttctttttttttttttttttttttttggagatggagtcttgctctgtcgcccaggctggagtgcagtgctgtgatctgggctcactgcaacctccgcctcccaggttcaagcgattctcgtgacttagcctccgaagtattatagctgggactataagcacgcaccaccacgcccagctaatttttgtagtattagtagagacgaggtcttgccatgttggtcaggctggtcccaaactcctgacctcaagtgatccgcccgcctcggcctcacaaagtgctgggattacaggtgtgagccaccgcgacaggcctacctatgcaacttctattcgcctttcaaaccccaaagtcttctctttgatgacccccttcccaattcatccaggtacagctggcatatcccatctcttgcccacggcatccacacacatctttgctatcaatgcaatgaaacttgtttcccctagactaggagtttctcaggacagtggccatcacttattcacttctcattctcagattcagcacagagctttgcacaccccaggtactcaataaatatcaggagataatcacattccgggaagccttcctaaactaccccatccctgaatctactcttgctccttagttctatggctggcacagctgacaccataaaacttcaaccctattttcatgttgccatggtcgttttatgtgttctagtctcgtttacccaattggactataagaagcttctgagcagaaaccatatcacacctgcccgtgtccctacactgtgccgagcacaaatattctaaacatacacctgctgttagactggtgggtaagtccaaggaggcaagctagctggcgatacagaatgatctgaaacctaggcaaaactccctgacgctctctgactgtcctcctgtcttctttaatttctctttctgtgtctcttgtttctactctgaggagataggggcatgatcttcactctaccctcttaacacttaagagggcatatactgtaacgcaagacaatgaatgaactgtggtattcaagaaaaaaagggtcctaaacgcctaagaactcataatttggccaaaaagataagactgatacgtgaagacaacgaccgaaacaaagtacccgatgagggagaccaggacagagagacacctccgcggtcaggcgaaaaggaagtctcccctaagcagtggggcccgcaccacgcctcgaaggacaggtagaatttggacagaaggaaggagaccgtcccgttgggcaaaacctctccactcgcagtcccgcaggcttcccggaatccttcacgctaaggcgtggcggcgaccgagtctcagccgcagcgaagcccctagactagaaagcagggaggttccagtcggggtgaggggaccggaccagggcagaccagcgtggccaagcggcaagaatactcgccgaggtggctcgggaagagcttggcctcctgcagcccctgcagagcacataccccagcttaccgtctgtcggctccaggtctcttcagctcttctcccacctcagaccatctccggagaggcgcttgagggacggtcaaggaaagccaatcgtcgttctcggatccgactgacagccaatggtagctgtgtctggcggaacccgtgcgcaccaaaacacggaaggggcgggaacagtgggtggggctaggcgtcccgggcggacagaggggcgacaggatacgtgcaaaaggtagcacgtgaccgcgcctcgctgctcagggcaacgcaaaggcggggagcctatgggcctgagttcccctaactgcgcaggctcggcctccgggacccaacgggcatgcgcagggctcgcgcctggtgcgcagtggggtctccctcacgtggttcttcgctttagttggctggttgcgtgggcctcgcggagaaaaaggcgtgggatgctgcccagcgctgtcggccccgctcggctcagattgaaggttctaccctttccttcagcctcttagtcttattatgttttaaatgttggtattatatgtttctctttccccccaaaactcggcttcccttcatccactcgttcaggtcagaaagctggcagtcatcactgattcctctcacttctcacatccaatccattgccaagttctgtggattctacctccttttaaaacaggatatttcaaatttatccccttttgtttatcttcaccgcctcccccacctcccctgtccagtgatgacctccaggcaggatttatacattagtctaatgggtcccgctgcgtgcacacttgcttccttccaaagcattctccactttgcaaaaagcagacctgatcaagttaccatctgcttcagacaattcaaaggcattctattgctttcagggcaaagctccaaaaccatactgaggttttctagacccttcagcatctgggctctccctgtctacttttttttagtccttctcgaccatatttcttgctctccagtcgcaaatttctttcaccttttccaccacaccaagccaccttttacctctcaagccttgaacttgttttctttacctggaataatccctttctcctcctcccacatttatttgactgactcctactaatttttatggtctcagtgtagatgcttctttttccaaaaagtcttcctgatagtcctttcttgtatttaacaatacagctcagtcacattgtatttgtctgtttactctcagtctgcattcttcactagactagttcttcacctttataactccatcagtgggccgggtgtcgtggctcacgcctgtgatcccagcactttgggaggccgaggcgagtggatcacatgaggtcaggagctcaagaccagcctggccaacatggggaaaccccgtctctactaaaaatacaaaaactagctgggcatcgtggcgggcgcctataatctcagctactcgggaggctgaggcaggagaatcgcttgaacccaggaggcacaggttgcagtgagctgagatggcaccactgcacaccagcctgggcaacagagcaagactctgtctcaaaacaaaacaaaaaacaaaataaaacaaaaaacccatcactcacttagcccagtggctgaaactcagtaagggttcaagacatacttgttaaataatataccttaataaagttggttaagactgatattttattgcattgtagttttctgtatcttctaatctaaaaataaacctatataatttgtacaatcagaaaacacattaaatgttcaatatatataaaataaaatttaaaatgccattaagatagtaaagtcatacttgtgcataaattttggttttaacaacagtgagttataacttggtccctattttaaaatagggttttgcagggcgcggtggctcatgcctgtaatcccagcactttgggaggccgaggcgggcggatcatgaggtcaggaattcgaaaccagcctggccaacatggcgaaaccccatctctacaaaaaatacaaaaattagccaggtgtggtggtgggtgcctgtagtgccagctactcaggaggctgaggcaggaaaatcgcttgaacctgagaggcagaggttgcagtga

SEQ ID NO: 914778 - DNA, 4001 bp, Homo sapiens
cagcttctgaaaaattaaataatataggattaaaatgtcttagttgggtaagcagtaaccaccgttacggctcaagacttttcatcaaaaatttgatcagaaaggaaacctctttaaaaattttaaagagcccagcaactaaaactttgaaattaactgagatggtttgaatgaatataagtactcccacttcagaagctacagctaaaagcaaatacctaaaatagcaaaaagggaaaaagtgtcagcagatctccaaactactagaaagtacgcaaaagcacacgcagactggtttgccagctaacttttccggccctgtaccagacagacatcaaaacaaagtttacaatagagccaaccatgcgctttccctctaaactggacgataaactgaaattttttgctgttgctaatagaagccccttattataattagaagcagccaactgacaggtggaaaaacaaattccctaacagggcagtaagaggttgtgaaaacacggttcaaggcctgaacgtgttacgactactctgtaacaagtccaaggtaatttacgcacacactcttcagcgcaattcctcaagcagagatgagacgggaacaacaggattccccgagagccacataccattttacaacagccgtctccctcccgacagagaaacagacattttcatccaaagtctttccgccagttctcccagtgcggcgaagggaagcgggcggcagccaccgtaacgagagaagccggcaacagccccgccgcgcggccgccacgccttcctcccgccgccgctggggacgcggagccgcggatcacatttctcctccccaacaatcacacacacgcacgcacgtccccagagttgacaccctgcaaacccgctgctccgcgacgctggggacggggccacaaagcccgggacgcggccatcggctggggtgctcaagctgcgtgcctgcgcgtttgtttgttccccttaatgaaaggaaagggatctccgtagttacggcctaggactgcggagggggaagagaggctccccgtgggactaaacaaaacttcggttgctgggaagagccgttgcgcaaccttggcagggggagggggggccgaggcccccgggccccggccaggcgcggcttcccggaggctacggcccccgcgtccggcggcccagggcctggcgtggcgccggcttcgagggagcggctcataccgggccacactgcaggggctagggcggaaactgggagcacgagagcgctggggatgcggatggggcacgggacgcgcaatgagtgcgggctgcgccggaggtgtcgggccaggcccgggtcaggcttggggtccgctggccgcggagcccgcagacggagccgatccccccaccccggggtggcggcgcccctcgctcgactcccttaccttcctagaggcccgcgctctctcctcttcgggcggccgcagccctgagcatgtccggggtggggcgcagggccgtgccggggaccgggagccaggcgcttcagcaggcggcaccacccagcccgggctcagcccctctccgcggccgctgccatcttgtcctggcggctgagaggaaacggcgaaacaccctcccccgaccgctgctgctgctgctgctgctctggctgctaagcgccgggcccgtctccctcatcttccttcccggggatttggggtggggacggcttggctagggcgaggggtagtgggaggccggtcggcctccggctactggggcctacgggcgacgcagggtgcggggcccacggcgattggggcccattcctgacgccccggccgggagcggagaaggaagactggcgggagtggtggcgacggcggggcctgcggcttgatctcctcaggtcgccgcgatgccggcagtcgtcactgaggcagctgccaccagccgccccagcctcgggcccctcctccgcgctcgtcggcctcggccaccgcctccgcagcgccaccgcccgcccggcagcgctgcgcgcccagcccgggcggctccgctccgctccggccgcggcgcctccgtgaagcccctccccggggtccgcccgccagtccgcagccgcgcccttgttgcccggagcccgcctgccagcccgtgcggccccaacccggagtcccgcaagccaagcctcccgcgaaagaagcatccgtcagcccggctctgctgttctgaacctcactccatgccccctccgccagaaatacacatttttaaaaaagatcccaatacccgaagaaaggatgaagatgcggaagcaggattttacaggcctttcgagatcccggaaccgtaattaaggatctgtttctcggcatttggtcgttaaaggtcccaaaataagtaaaggggaaatgctcaaatgaacgacctcaatctaaactaggttctacccgctcccctatcccaaagagtgaagagaattgtaaagccaggttcaaggacgggggaagggtcctcttggaaattttaagagcatctctactgtccaaaaccccataattgtgaagttcgcccacctccacattggtaattctccgttaaattagtcggtttaactcccaaagactagtttctttcctcctggagattaggaaatcaacagaatggcctgtttcagcttacataatcgtggaaccatagaattttaggaatgaaagaagctttgcgatccttggtcccaactcttacactcaggagttccaagaagtttaggtgacatgaccaaggttatacagtaaagcccatgtctcccaccccatctttcctccttttccctaggaaacaaatggctttctaatacctcacattcagagttgattttcttttatacccgtttcctcaggttccctttgttctgaatcaatgtctaaccttttgggaaacaaacacctttctggaatggaagtgtcctttctttgtttccttcataatcttcactagcaagattgaatttaccagagatgtatttattcccagaaattttctattgcagtaactggggcagggcaaagggagtggcaaattgctgcatacataatacacatttaatccctgctgctcttcaaaccggaagatgagtattttggataatgcctttaagagacaaaggaggccgggcgcggtggctcgcacatgtaatcccagcactttgggaggctgaggcgggtggatcacctgtggtcaggagttcaagaccagcctggccaacatagtgaaacctggtctctactaaaaatgcaaaaattagctgggcgtggtggcgggcgcctgtaatcccagctactcgagagctgaggtaagagaatcgcttgaatcgcttgagccactgcactccaacctgggcgacagggagagactctgtctcaaaaaataaaataaaagagaaaggatagtatgccctgaggccactggaaataacactttcgaatgacagttgttttcaggttagagaggataaccagctgaaaaggcttccaatatagaagaacaaaacaatggctgcctttcagagagatagcctatgaaccattccttttcacttagtatttcgttactttttatttttcttaagaacaatagtcaaaagaatcaaagaggataaaatcatttactcaacggagaaagctacaatagtagaaaaatctgtcaggaggaacagagaaactattccactagaacttcaaatttcagaatttttgcagacatttaaggaggccatctctaatggaaggcttccattccctgtatttgctacatccatgaagagatggaaatgagagacaaggatttattttcctttctatctcctgcatgttgctactcactacactatatattccaggaggggattcattcatctttttttttttttagatgaagtctcgctctattgccagggttcaagcaattctcctgcttcagcctcccgaatagctgagactacaggc

SEQ ID NO: 914779 - DNA, 4001 bp, Homo sapiens
aattaatttgatagctgctgcttttttaagttgcagggggtgcagggaggctctccatatcttgcattaaacataaaaacctatgtgcccacgccatacttgcaacagcaacctacgtctgtaatttacaccctattttatggtatccaaaaagttaagagtatgatctacagcttcttttcaaacatgtttacaagaagaagtatctcatataaaccatccattttaatgtgactctaaaatcccatgcccaaaagccaatgaccagtttataagcaaggtaatgactagttcaatggaaaatatattttgacaataaactaagtaaggctgacttatcatgttatgatctgcttgcctaatatgtatgtttagctactgtagtcagcaatgcccaaatataaagttgaaacatttaatggccagttctgttctagatttcaaactcatcttacttttttacaacagttttaatctaaggttctccacaaatacttttttcttagaaaagagatccccttggggcggggggcgggaggcagagggggggattaaggaacaaatttttccataagtacaaaaaaaaaaagacatgcccaaacatcacaaatatttcaacacatctctgccttaacataaattttaaataagtaaatttcaaaaaagaaaaatctcaaacaggttaagcattatagttcagaaataaaagtcctctacactttatgaatgcagccataaatacaccaagaaatatttcattgacttaaaactaaataactgtatctggctggtaaaattgcaattactgataagtggcacgaaagcataagataatcaataaaactatgaaaactttttttacaaaaggtcagtcatattttgtttacttaaaatactaagtttaatcatgacctatctaaaccttatcattgctcattgtataaaattagcactgcacttgcaaacataagcagaatctagacttatcaaacatatggtgagacttcaccagcttctgaaaaattaaataatataggattaaaatgtcttagttgggtaagcagtaaccaccgttacggctcaagacttttcatcaaaaatttgatcagaaaggaaacctctttaaaaattttaaagagcccagcaactaaaactttgaaattaactgagatggtttgaatgaatataagtactcccacttcagaagctacagctaaaagcaaatacctaaaatagcaaaaagggaaaaagtgtcagcagatctccaaactactagaaagtacgcaaaagcacacgcagactggtttgccagctaacttttccggccctgtaccagacagacatcaaaacaaagtttacaatagagccaaccatgcgctttccctctaaactggacgataaactgaaattttttgctgttgctaatagaagccccttattataattagaagcagccaactgacaggtggaaaaacaaattccctaacagggcagtaagaggttgtgaaaacacggttcaaggcctgaacgtgttacgactactctgtaacaagtccaaggtaatttacgcacacactcttcagcgcaattcctcaagcagagatgagacgggaacaacaggattccccgagagccacataccattttacaacagccgtctccctcccgacagagaaacagacattttcatccaaagtctttccgccagttctcccagtgcggcgaagggaagcgggcggcagccaccgtaacgagagaagccggcaacagccccgccgcgcggccgccacgccttcctcccgccgccgctggggacgcggagccgcggatcacatttctcctccccaacaatcacacacacgcacgcacgtccccagagttgacaccctgcaaacccgctgctccgcgacgctggggacggggccacaaagcccgggacgcggccatcggctggggtgctcaagctgcgtgcctgcgcgtttgtttgttccccttaatgaaaggaaagggatctccgtagttacggcctaggactgcggagggggaagagaggctccccgtgggactaaacaaaacttcggttgctgggaagagccgttgcgcaaccttggcagggggagggggggccgaggcccccgggccccggccaggcgcggcttcccggaggctacggcccccgcgtccggcggcccagggcctggcgtggcgccggcttcgagggagcggctcataccgggccacactgcaggggctagggcggaaactgggagcacgagagcgctggggatgcggatggggcacgggacgcgcaatgagtgcgggctgcgccggaggtgtcgggccaggcccgggtcaggcttggggtccgctggccgcggagcccgcagacggagccgatccccccaccccggggtggcggcgcccctcgctcgactcccttaccttcctagaggcccgcgctctctcctcttcgggcggccgcagccctgagcatgtccggggtggggcgcagggccgtgccggggaccgggagccaggcgcttcagcaggcggcaccacccagcccgggctcagcccctctccgcggccgctgccatcttgtcctggcggctgagaggaaacggcgaaacaccctcccccgaccgctgctgctgctgctgctgctctggctgctaagcgccgggcccgtctccctcatcttccttcccggggatttggggtggggacggcttggctagggcgaggggtagtgggaggccggtcggcctccggctactggggcctacgggcgacgcagggtgcggggcccacggcgattggggcccattcctgacgccccggccgggagcggagaaggaagactggcgggagtggtggcgacggcggggcctgcggcttgatctcctcaggtcgccgcgatgccggcagtcgtcactgaggcagctgccaccagccgccccagcctcgggcccctcctccgcgctcgtcggcctcggccaccgcctccgcagcgccaccgcccgcccggcagcgctgcgcgcccagcccgggcggctccgctccgctccggccgcggcgcctccgtgaagcccctccccggggtccgcccgccagtccgcagccgcgcccttgttgcccggagcccgcctgccagcccgtgcggccccaacccggagtcccgcaagccaagcctcccgcgaaagaagcatccgtcagcccggctctgctgttctgaacctcactccatgccccctccgccagaaatacacatttttaaaaaagatcccaatacccgaagaaaggatgaagatgcggaagcaggattttacaggcctttcgagatcccggaaccgtaattaaggatctgtttctcggcatttggtcgttaaaggtcccaaaataagtaaaggggaaatgctcaaatgaacgacctcaatctaaactaggttctacccgctcccctatcccaaagagtgaagagaattgtaaagccaggttcaaggacgggggaagggtcctcttggaaattttaagagcatctctactgtccaaaaccccataattgtgaagttcgcccacctccacattggtaattctccgttaaattagtcggtttaactcccaaagactagtttctttcctcctggagattaggaaatcaacagaatggcctgtttcagcttacataatcgtggaaccatagaattttaggaatgaaagaagctttgcgatccttggtcccaactcttacactcaggagttccaagaagtttaggtgacatgaccaaggttatacagtaaagcccatgtctcccaccccatctttcctccttttccctaggaaacaaatggctttctaatacctcacattcagagttgattttcttttatacccgtttcctcaggttccctttgttctgaatcaatgtctaaccttttgggaaacaaacacctttctggaatggaagtgtcctttctttgtttccttcataatcttcact

SEQ ID NO: 914780 - DNA, 4001 bp, Homo sapiens
tccctcccgacagagaaacagacattttcatccaaagtctttccgccagttctcccagtgcggcgaagggaagcgggcggcagccaccgtaacgagagaagccggcaacagccccgccgcgcggccgccacgccttcctcccgccgccgctggggacgcggagccgcggatcacatttctcctccccaacaatcacacacacgcacgcacgtccccagagttgacaccctgcaaacccgctgctccgcgacgctggggacggggccacaaagcccgggacgcggccatcggctggggtgctcaagctgcgtgcctgcgcgtttgtttgttccccttaatgaaaggaaagggatctccgtagttacggcctaggactgcggagggggaagagaggctccccgtgggactaaacaaaacttcggttgctgggaagagccgttgcgcaaccttggcagggggagggggggccgaggcccccgggccccggccaggcgcggcttcccggaggctacggcccccgcgtccggcggcccagggcctggcgtggcgccggcttcgagggagcggctcataccgggccacactgcaggggctagggcggaaactgggagcacgagagcgctggggatgcggatggggcacgggacgcgcaatgagtgcgggctgcgccggaggtgtcgggccaggcccgggtcaggcttggggtccgctggccgcggagcccgcagacggagccgatccccccaccccggggtggcggcgcccctcgctcgactcccttaccttcctagaggcccgcgctctctcctcttcgggcggccgcagccctgagcatgtccggggtggggcgcagggccgtgccggggaccgggagccaggcgcttcagcaggcggcaccacccagcccgggctcagcccctctccgcggccgctgccatcttgtcctggcggctgagaggaaacggcgaaacaccctcccccgaccgctgctgctgctgctgctgctctggctgctaagcgccgggcccgtctccctcatcttccttcccggggatttggggtggggacggcttggctagggcgaggggtagtgggaggccggtcggcctccggctactggggcctacgggcgacgcagggtgcggggcccacggcgattggggcccattcctgacgccccggccgggagcggagaaggaagactggcgggagtggtggcgacggcggggcctgcggcttgatctcctcaggtcgccgcgatgccggcagtcgtcactgaggcagctgccaccagccgccccagcctcgggcccctcctccgcgctcgtcggcctcggccaccgcctccgcagcgccaccgcccgcccggcagcgctgcgcgcccagcccgggcggctccgctccgctccggccgcggcgcctccgtgaagcccctccccggggtccgcccgccagtccgcagccgcgcccttgttgcccggagcccgcctgccagcccgtgcggccccaacccggagtcccgcaagccaagcctcccgcgaaagaagcatccgtcagcccggctctgctgttctgaacctcactccatgccccctccgccagaaatacacatttttaaaaaagatcccaatacccgaagaaaggatgaagatgcggaagcaggattttacaggcctttcgagatcccggaaccgtaattaaggatctgtttctcggcatttggtcgttaaaggtcccaaaataagtaaaggggaaatgctcaaatgaacgacctcaatctaaactaggttctacccgctcccctatcccaaagagtgaagagaattgtaaagccaggttcaaggacgggggaagggtcctcttggaaattttaagagcatctctactgtccaaaaccccataattgtgaagttcgcccacctccacattggtaattctccgttaaattagtcggtttaactcccaaagactagtttctttcctcctggagattaggaaatcaacagaatggcctgtttcagcttacataatcgtggaaccatagaattttaggaatgaaagaagctttgcgatccttggtcccaactcttacactcaggagttccaagaagtttaggtgacatgaccaaggttatacagtaaagcccatgtctcccaccccatctttcctccttttccctaggaaacaaatggctttctaatacctcacattcagagttgattttcttttatacccgtttcctcaggttccctttgttctgaatcaatgtctaaccttttgggaaacaaacacctttctggaatggaagtgtcctttctttgtttccttcataatcttcactagcaagattgaatttaccagagatgtatttattcccagaaattttctattgcagtaactggggcagggcaaagggagtggcaaattgctgcatacataatacacatttaatccctgctgctcttcaaaccggaagatgagtattttggataatgcctttaagagacaaaggaggccgggcgcggtggctcgcacatgtaatcccagcactttgggaggctgaggcgggtggatcacctgtggtcaggagttcaagaccagcctggccaacatagtgaaacctggtctctactaaaaatgcaaaaattagctgggcgtggtggcgggcgcctgtaatcccagctactcgagagctgaggtaagagaatcgcttgaatcgcttgagccactgcactccaacctgggcgacagggagagactctgtctcaaaaaataaaataaaagagaaaggatagtatgccctgaggccactggaaataacactttcgaatgacagttgttttcaggttagagaggataaccagctgaaaaggcttccaatatagaagaacaaaacaatggctgcctttcagagagatagcctatgaaccattccttttcacttagtatttcgttactttttatttttcttaagaacaatagtcaaaagaatcaaagaggataaaatcatttactcaacggagaaagctacaatagtagaaaaatctgtcaggaggaacagagaaactattccactagaacttcaaatttcagaatttttgcagacatttaaggaggccatctctaatggaaggcttccattccctgtatttgctacatccatgaagagatggaaatgagagacaaggatttattttcctttctatctcctgcatgttgctactcactacactatatattccaggaggggattcattcatctttttttttttttagatgaagtctcgctctattgccagggttcaagcaattctcctgcttcagcctcccgaatagctgagactacaggcatgccccaccatacccagctaatttttgtacttttagcagagacggggttttaccatgttggccaggatggtctcgatcccttgacctcgtgctctgtccacctcagcctcccaaagtgttgggattacaggcatgagccaccacgcccggcctcatctttttttttaaccattatattgcaagtgcctaatacagtgcctgacttgtggtaagaccttagtaaatgttgcaaaataagtaaatgatatattccagccccccttcactttatacctattgtctcctaacctaatttctttacctctaatctcttccccttcaaatctttctttttttgaggcacgatatcagctcctctgcctcccaggttcaggcgattctcctgcctcagcctcccaagtagctgggactgcaacttccgcctcccaggttcaggcgattctcctgcctcagcctcccaagtagctgggactacaggcccgtgccaccacgcccagctaattttttgtatttgtagtagagatggggtttcaccatgttagccaggatggtcttgatctcctgacctgacagagtctaattttgtcacccaggctggagcacagtggtgtgatctccattcaccacagcctcaactccctgggctcaa

SEQ ID NO: 914781 - DNA, 4001 bp, Homo sapiens
ttttttttttttttgagacagagtctccctctgttgcccaggctggagtgcagtggcatgttctcagctaactacaaccactgccttccaggttcaagcgattctcctgactcagcctcccaagtagctgggactactacagacgcacaccaccatgcccagctaaaatatgtgtgtgtgtgtatatatatatatatattttttttttttttctttttttgagggggagtcgcgctctgtcacccaggctggagtgcaatggcgcggtctcggctcagtgcaacctccacctcccaggttcaagcgattctcctgtcttagcctcccaagtagctgggactacaggcgcatgccaccacgtcggctaattttttgtatttttagtagaaacggggtttcactgtgttccctaggctggtctcgaactcctgagctcaggcaatccacctgcctcggcctcccaaagtgctaggattacaggcatgagccactgtgcccggcctaatttttatatttttagtagagacggggtttcaccatgttggtcggggtgctatggagttcttttgcacccagacatctggggcctctattgccgaagcaggtgacagctttctgccctcagactctggtctactccatgtgatcactccaataaattaaccctgggagaccctttgcaaattaggctaggcttgatattaaacgtggccaccaaaattctgggccacagggagcccacagaaaggactctaaggtcccagaactactaggttcaaacaattccttaagttcattgaatgtgcacagcatatccaagtcaaaccgtttcattaaaaaataaaacactgagcacttctatgttgaagctattgcttttgcatattgttgtcgtctcaaaaatcctatcaggtggacaagacaggcacctttgggaccatgttacagaagcaacgggtggcatcaagggatgaggtgacttgcctagggtcacagagctaataaccgaaagagagttggggccacaattcagatcttcctactcctagtccagggctctggaatgactgcaagagcaaagatcccagccctcaccaacaggctggacagggggagattagcagctccccatctctttcttatctcggcctggcagtggcctccaccagctctgcagtttgtctgtgcacaagcccagggctcggcaagcaggctcgtaatggaaaggcccacggcggcctcccacccacggtagtaattcagtaggtgtgtcacagctggggacttggagcgttggctgtggctgggagaccactataacacaaaaagaaggcgcacttctaagacgtttgtgtgcagttcggaggcttggctgatactctctcctatgaatcaaaagtggaacgtgtcttcccaaaggggccgtatctgcatccgcctcagcccagcctcgaatgaaaggaccccgtctgtgtagacgaacgttcttggtctgggtcactaaatctagagccgtgcatcccaggcctgatgggaatcccacccagatgcccgcagggaccggagttccgttccaaacaatccttccactcttaacccagtatcaccgctctctgatttccccattccttccggagggcaaccgagctactggccctttaaaagctactcggaccaaaaaaaaaaaaaaaaaaaaaaaaaaaaagatagccgttctgaccaatagacgactgaggatggcaacctggggccaatcgctgcacggctcgtccagaagcccaaagtgtgctggtcaccggctcagcactcaccgccgttgcagccgcattgccgttaccagacatggctccgcttggaaagtaggctgtgtgtgggtgccgctaaggtcccccggccccgggaagccgggggctccggccggcgagtaccggggacacgtgggacccgaggtcgtcctacagtctgactcctggtctccgcagagcctcgcgtcacttccggcgccctccctcgaaggggaggtccctccctctgggcgggaattggaacattgcgacagtggacctccccattcgaccaccccattccccagctgtgacatgagcaagtagtgcagcttctatggcgcttcctttgctctgttcaaacttagctttgctacaaccttgaaataggcagcatttttctttttgatacggggtctcactgtgtccccagactagagtgcagcggcatgaccacgggtcactgcagccttgacctcccggcttcagcgatccccccacctcagcctcccaagcagctgggactacaggcgcacatcaccacgtgggactaatttctagatttttttatagagacagcggggaggtggcctcactatgttgcccaggctagtctcgaactcctggactcaagcagtcatctcgccttggcctcccaaagtgctgggattacaggcgtgagccactggcccagccagcatttcaattcttaaaatgaggaaactggttcagagagattaaaggtcatgcctaaagacaagtaactgaagtgggagcacaaacgctacatgtagtgagaaaagggcttgttaggaaaagtgctttcccatgaacataattttttttttttttttgagacggagtttcgctcttgttgcccaggctggaatgcaatggcacgatctcagctcactgcaacctccgcctcccgggttcaagcaattctcctgcctcagccccccgagtagctgggattacaggcacgcaccaccacacccagctaattttgtatttttggtagagatgaggtttctccatgttagtcaggcaggtcttgaactcctgacctcaggtgattcgcccacctcggcctcccaaagtgctgggagtacaggcgtgagccaccgcgcctgtaatcatgaacataattaacaatcatgattattaataatcacccagctaggtgcagtggctcacacctatattcccagcactttaggaagccaaggcaggaggattgcttgagcccaggagtttgagaccaccctgggcaacatggtgaaaacctcatctccacaaaaaatacaaaaatagccaggtgtggcggcacacacctgtagtcccagctattcaggaggctgaggtgtgaggatcgcttgagcccaggaggtcgaggtagctgtgagctgtggtggtgccactgcactctagcctggatgacagagtgagacgcccatttttttttttttttttttttgagatggagtttcactcttgttgcccaggctggagtgcaatggtgcaatctcagctcaccgcaacctccacctcccgggttcaagcaattctcctgcctcaccctcctgagtagctaggattacaggcacctcccaccacacccagctggtttttgtatttttagtagagacggagtttcaccatgttggtcaggctggtcttgaactcctgacctcaggtgatccgcccacctcagcctcccagagtgctgggaatacaagcatgagccaccgcgcccggtgagaccctgtcttaagaagaaaaaaaaaatcacccatgtgctcagcactgtacaaagaactgaacacctatttgatccttaggctttcataatagccacacagcataggtgttataatccctaacgtacagatgaagacacaggttgagggggaaagggtgggagcagggtgagggataagagactacacattgggtacagtgtacactgcttgggtgatgggcaccaaatctcagaaatcactactaaagaacttattcacatagccaaataccaactgttccccaaaaacccactgaaaaaaatacatctcaaaaaaaaaaaaaaaacatgttgagaaggtaagatgtgccttaagtcaaacagcacaactaggattcaaacccagctcagtagatgcaaagtctactcatagcatagcagctacaatactgccactgttttttaattttttactt

SEQ ID NO: 914782 - DNA, 4001 bp, Homo sapiens
gggggaggagggaagggcacagaatgagggaagagatttaagttcagatcacctctattctctctcgattgccaactcactggtatttcttgagttttctgccaccagtcaacactcctcagggcagaggagataaccctgaagcagagggtcaggccccaaagggaaaggcaaaggttcacatgatgcctacccctgcccaagccccttacttgcaagactcttacttgcagatggctccgatggtgaagccaggaggaagcacagtgggcaggtccttcaaggagtgaacaaccaggtccactctatagagatgggagaggggggcaaagagaaagggtatgagcagccagccttcaccccttctccacccacccctgcctctacttcagtggtggagcctagggcagttcaggaagcacaccttctcaagatctcaggagcatgaaaactgctctcctctcactctccctcctactctccctcctaccctccctcccccagccattcttgcagtccaggcagccagatggctcagaaccagacactctccttttctgaagcctgaaaaaacccacctatgagctgccttcagcctctctgagggtttaagcccagcagcctatctgacaccccgggtcccagcaagagacctagcatactagggtcccagcaagagactgggagggcaccacactctcctatctttacttactcattcttctccagggcatgttcaagctccttggtaaacaggcttttctctccaatctgccggacagaaagagcctgagtgaatcccttcagggaaggaaagaagagtggggacaagaactggggaggaagatgttgttaccttagagagtgcagtatcaagaatcttgtcccctgtggtggacatagcaactgaggagagagtcaatcaatcaggtgctcattattgatcagcatttactgagcctagcgctgtgctacgattcatgatggggacagaggcacataatccctggttcctgccctctgagtatatacaatcgagcaggaagaccagaaacactcataaaaagacccaaagctcaagatgttaaatgccaggctaatccaggtagtcagagctggaggtattcagaggaaagcaccttcagaactgggagcagcccagaaggaatctcggggcagcgggacgggctttagctataggcaaagccagaaatgttgtgttctctcctctcggggtactgggcttcccattagcttccactcctttccagaaaactcactgatttcaaactgcaggccagggtacgaggctttcaatgttgccaccacactgtccgtctgtatgcgagcaagctgcgggtagagacttggattagtcctgcccttcccagccacggctcagactctttagactgtcacaggttaggcagatcctgaagggactggaatttccatctgggcatgagaaggggcttgggagccctctgcactccaacaattttcccagcctagggatgatcttgccatagaatgtaatctgccatttcccggggaacttaacgcccagccaccccatctccttcatactaggaactaaccctctgagtcccccaatttgtgatgctgtgagcatcataactgttctgacaaacctcctccaccccggctcctgcacccacctggctcttgcgggtacccacgcgaatcactctcatctttgggctgttttcttcctgcagaaaaagtccccaggtcacagtcccctctgtttctagtgttcctcaacaccttgtccaagaaccagaatcactggcttggaagaaaggaacttcagaacctggcctgtggccagctgagtctcagagtggggaaatactccaaggctggtccctttaaccttcctcagtaccttctgccctcctcagggatccagagaagcagagactagagggaggcgatagtaggacctgctgttgctgccgctgcagtaaccaggacactgagccctgaagcccaccttgaccaaggcagttgtcagtgggagtgctgtgcacagccaggtgggtaaagagataaggcccatcagcctggccacaggaagggtggggcctgcagctggcaggggcagggcagccaggaccacactggggaacctgtgctgagtcactggaggatagattcattatctacaacagacaaggcacttgagaaaatttcagtgccatccagatgccacatggagtagactagagtctaagagcagcaagctgccaccttctccagcaagaggcccagatgtctggctacaaaagaagtcaagaggatgaagatcccacagtggggaaagctgacagtattaagggtcccttaatctggctggactgcatgcattaaggactgaggtaaacggatctgacgtacagtcctgctcagcctcttggctgggtgaccttgggtacactgtcccaccaggatctgtttgttcatctataaaatgaaaaggttggactcaggtttcttctgcctcagatgttccataagactaggaggctgcgctgcctaaagttcgtgcacctagagtgctgcctctggtttcaccaacatggaaatattaacaggccagagcccaagtcaagaactcaagaggacacgcctcttcctcctgccagagtaccttggacaaaagtattcactgctaagcacgtagaactgaattcttcagtctaagacggaggtcccatttctctctttttttttttttttttttagacagagtctcactgttttgctcaggctggagtgcagtggcgtgatctaggctcactacaacctccacccctgggttcaagctggaactacaggcatgttccaccatgcccagctaattttcacatttttagtagagacggggtttcactgtgttggccaggctggtctcgaacttgtgatcctcctgccccagcctcccaaagtgctgggattacaggcgtgagccaccacgcctagcctgatcccatttctttctacatcagacagtagccactgtagatactgatactgtcgacagtcaacattccctgatctgggatgttcatcctatgtagttccttttttttttttttttgagacagagtctccctctgttgcccaggctggagtgcagtggcatgttctcagctaactacaaccactgccttccaggttcaagcgattctcctgactcagcctcccaagtagctgggactactacagacgcacaccaccatgcccagctaaaatatgtgtgtgtgtgtatatatatatatatattttttttttttttctttttttgagggggagtcgcgctctgtcacccaggctggagtgcaatggcgcggtctcggctcagtgcaacctccacctcccaggttcaagcgattctcctgtcttagcctcccaagtagctgggactacaggcgcatgccaccacgtcggctaattttttgtatttttagtagaaacggggtttcactgtgttccctaggctggtctcgaactcctgagctcaggcaatccacctgcctcggcctcccaaagtgctaggattacaggcatgagccactgtgcccggcctaatttttatatttttagtagagacggggtttcaccatgttggtcggggtgctatggagttcttttgcacccagacatctggggcctctattgccgaagcaggtgacagctttctgccctcagactctggtctactccatgtgatcactccaataaattaaccctgggagaccctttgcaaattaggctaggcttgatattaaacgtggccaccaaaattctgggccacagggagcccacagaaaggactctaaggtcccagaactactaggttcaaacaattccttaagttcattgaatgtgcacagcatatccaagtcaaaccgtttcattaaaaaataaaacactgagcacttctatgttgaagctattgcttttgcatattgttg

SEQ ID NO: 914783 - DNA, 4001 bp, Homo sapiens
acaggggtttcaccatgttgaccaggctggtctcaaactcctgacctcaggtgatccacccgcctggcctcccaaagtgccaggattacaggcgtgagccaccacccccagcctatccttcaattatttttttatctgctctttgggatatacataagtcaaaggttatgtaatgggatttttgctccgggacacaggacaaacaatctgcaagttgcatgtgattgttgtacaatgggttccgattataccatgactctccatagtggcctaaaaatattactaacaaaagaactgaggccacccactttatagtaagacttatcctccctactcggacacacactgttatggatcagttctaaccatccaatcacttcaaaagaaaggagaaaggtcactaactccctggggcgattctacaacacacctcttccacaaggttactcaacggacccaacagcacctcagtcattaccattcaggaaccgagggacctgaaacgtaaaagactagcaccaggtgttcagcaaatctacaaatatgcctatccacggactcagtgggacaattaaaatttaatcataatccaagcaagataaaaaccctagccaagtaacgttaactaactctaaatgaactagattaagatttttctcttcactggttaactattaaactcgacactgttacactagaggctctcccttacagctcaaagaggagcaaggttggattttcagattctctgtggctcaagctctggtaacatgcttttaatggaacggactttgacggacttcgatttttgcttaacatttttacggcgaaaaagttaggtcaggtagcccaaagacctgaccctctaactgtgggcctagttctccgtgtaatccccaattgcttagcactttctcagctaagaaaaatataacaagcaccgtgggagactgttccacaggtagctcacaagtagttcgcatgcaaaatcactcactgccatccactatcaccaaggaaccaagttaggcaggaaccttcctcctgcaaagagtagggccacgagaggcggcctaacccctcagaaaggtgggtagagaatgaaaggagttccatcaaatggcactttgaggcaagcgagaacaaggactcggaccctgcggtgcagggcggggtgctagatcaggggcgcagccggcaggttggagccgggctcggctgccagctcctcaccctgttcctcggcggccttgtcacccggcacctcggatcccggcgtctcgtccccgctccgctcctcgggttcgtcttcctccctcttgccgaggccctgctcttcgccaccatttaccccgcctgacccggccgtggcctccgccggcttctcggaagcatctggctcggccgcggcctccatggctgccgcctccgggggctccggcggcggctgcgcggcctgacccaaggcttgagcagggggtggctcctcgtcctcgtcctcaagcagcgcctcctcgtcctcctcctcctcctcttcgtcctcctcctcgtccccgcccgggccgccgcccgacgcggccacaggccgaggctccgccttgcaggccccgccgggcccggccccgccgccgccggcctcgtcctcgagcatctcggcgtccagcgcctcctgcagccgctgcgccagatccaccttgaggccgcgcgagtccaggccccgccgctgcagctccgaccgcagctcggtcactttcagccgcttcacctccatcgccgccgccgcctcctccgcctcccgccgcctcctcccctgcgaaccgtcgaccgagtccgaccgcgcaggcgccgccgccgccgcccgcctccgcctcacgcgccagcactgagcccgcgcgagcgagcgcacgcacgcaggagcggaggccgcgcacggtcccgctgcgcagtgtttgcttctccttcgtctcccctccccctttcggctcacggagcccaaaacaacgcagcagggagctgtttcccctccaggcccttggttccccagccgcgggcaggcgcgcgcggaggacgacggagttcctcccgcttcctcccgccctctggcgcccccgggccaatcgccgccggtgcttttatcgcgcagccgcagtggagtccaagacgggcaaggctggctgcagctcaagtgcctcgtagcacggaagcgtgtgcgcgccggtctttcagtacttccagccggggagttctgcgcagccgcccggagctccccgatgccatgcccctcccaccacccttacttccgtctgacttccatttgctgtggcgttttaggggtcgctagcctcttttccctactgtctgtgcttgcagcagtaacgacaaaaaaaaagtcattagagaatgtgttgcaacatgtaagcctagtagcaattgtttttctggctaggaagcaaaagggctccccagaacgaagaaatactgtaatccgggccctcctttttcctcaacgcctcaacttctacccagcaacagaggcccttgaacccgccctttttctcttattggacaacttgaatcgtcatttgccgttccgattggtcatccgtgatcgtccggatttttccaattggcgaagctgccaggggaattttttttttttttttttcccaggttggtccgctgaggaggcggggtcgtttctgcgggattatttttccggagcctcttctgattgggtggtgtggcgcaatgcgcgcgaccctcaagataccaaactgtacgcatctctgaccctttcctctccttgctcctgctggtaaaccgaagcccaggagacttccaggtttgggcatctgcagagggcgaggaactggtcacggcgccgggtgggcttgcagctgtgacgcttatgtggacacctcagtgtcgctggtggttcacctcggcttcccagtttatttattgacgtcaacaaataaatgttgaataaggaagaagagttagaattgcttgaagccctctggagttttagcactagtcccgcccactcccttctacttccaggtcgggggggggcgggtccaatagaaaggcggaagccagtgtcccaggcgttctcacgcccgcaacaattcctgagtagggccttgcttgagttcttcggaaagtctcatccacccccacatcgcctctttaggaagtcacttaatgttgggcttcattattcccacatccctttccttactacttgcctgcacttcttgagaaaaagactgcagaaaggagaggtggggctttcagtagaaacaagcaaaccgcaggtccctgtggggggactctccaggaagaagggtaatttcctgcctccttaaattggctgctactgtcagttattttgctcccaaccccagagcttcacttgctccttcacttcccagttccgcaagaaccgtgggcgacagttatggagaagcgtctgcaggaggctcagctgtacaaggaggaagggaaccagcgctaccgggaagggaagtaccgagatgctgtgagtaggtaccatcgagctctgcttcagctgcggggtctggatccgagtctgccctctccgttacctaatctcggacctcagggcccggccctcacgcctgaacaagaaaacatattgcataccacccagacagactgctataacaatctagctggtaagaacggggctaaagggtggctagagagcattaagacaggaacatgaacatctgtgaacattgggggaaaaaacgctgacttttttttttttttactgtcatccatttattctgccatgaattggaataacctgtcaatctgtgcggctgtaattaagttgccatagagcagggcttctcagacttcacctggagagtctgttaaaacacaacctcctcggccccatccccagagattcggatgggtctgacgtggggcctatcagtttgcatttctttatttttttattttatttt

SEQ ID NO: 914784 - DNA, 4001 bp, Homo sapiens
ggagcacaggggtggccagcgtagggtccagcacgtggggtggtaccccaggcctgggtcagacagggacatggcaggggacacaggacagaggggtccccagctgccacctcacccaccgcaattcatttagtagcaggcacaggggcagctccggcacggctttctcaggcctatgccggagcctcgagggctggagagcgggaagacaggcagtgctcggggagttgcagcaggacgtcaccaggagggcgaagcggccacgggaggggggccccgggacattgcgcagcaaggaggctgcaggggctcggcctgcgggcgccggtcccacgaggcactgcggcccagggtctggtgcggagagggcccacagtggacttggtgacgctgtatgccctcaccgctcagcccctggggctggcttggcagacagtacagcatccaggggagtcaagggcatggggcgagaccagactaggcgaggcgggcggggcggagtgaatgagctctcaggagggaggatggtgcaggcaggggtgaggagcgcagcgggcggcgagcgggaggcactggcctccagagcccgtggccaaggcgggcctcgcgggcggcgacggagccgggatcggtgcctcagcgttcgggctggagacgagggtgagtttttccccctctgccaccctcagcccccacccgcccctccccacacaaccaacacgttctccccacacgactctctcgttctccccacagccaggtctccagctggggtggacgtgcccaccagctgccgaaggccaagacgccaggtccggtggacgtgacaagcaggacatgacatggtccggtgtgacggcgaggacagaggaggcgcgtccggccttcctggtgagcgtgtctgccctccctgcgtcaggacgcggccctgcccagaccgccccgccgggccaccatctcactgccccgacctctgtcttctacagaacaccttaggctggtggggctgcggcaagaagcgggtctgtttctttacttcctccacggagtcggcacactatggctgccctctgggctcccagaacccacaacatgaaaggtgaggggcttcctgccacacttggggtggggggcacgcgagaggagctgagtgggacctcactccttccccatccacagaaatggtgctacccagctcaagcctgggcctttgaatccggacacaaaaccctctagcttggaaatgaatatgctgcactttacaaccactgcactacctgactcaggaatcggctctggaaggtgagcaccagcgctccttccggaagcctccaggcccccgagcaccctgcccccatcccacccacgtgtcgctatctctaggtgaagctagaggaaccagacctcatcagcccaacatcaaagacaccatcggaacagcagcgcccgcagcacccaccccgcaccggcgactccatcttcatggccaccccctgcggcggacggttgaccaccagccaccacatcatcccagagctgagctcctccagcgggatgacgccgtccccaccacctccctcttcttctttttcatccttctgtctctttgtttctgagctttcctgtctttccttttttctgagagattcaaagcctccacgactctgtttcccccgtcccttctgaatttaatttgcactaagtcatttgcactggttggagttgtggagacggccttgagtctcagtacgagtgtgcgtgagtgtgagccaccttggcaagtgcctgtgcagggcccggccgccctccatctgggccgggtgactgggcgccggctgtgtgcccgaggcctcaccctgccctcgcctagtctggaagctccgaccgacatcacggagcagccttcaagcattccattacgccccatctcgctctgtgcccctccccaccagggcttcagcaggagccctggactcatcatcaataaacactgttacagcaatttgtctcgaggactctggaatccgggctgtgggcatgatgtgggggaggccagccttgggcagaggggggctggggggcatggggaggagtacatgaaaagggggatgggggttccagggtgggggattctgggatgggtgcagcgcagcacacaccaggggtggggtgagcacagggtgtgtggacctcaggggtgcagggcaggcggtcagcatgcagtgatggcagtggaggggctgtgggaccaggggcttcacagactgggcgggggctgggcttgcggagggggcctgcgctctgaggcaggggtcggggaccaccaaaccatccccgagcgagtgcctcctgtcgccccaaagtcccatcagaatgacgccttggtgctggccccagacccctgaagcccgggctaggtgactggggtagagctggccatggccgctctgggaggcccacaaggtgctctgggcgaccccaccccgacaggggcacgaaccccgcgccagtcccgttcctgctccccttttgctgtgggtgggagccggggccacgccggagggacggccccgcacaaggagccagggggttgtgggggagccggtgggcttctcagtgggcaggtggccttggggcagaggtcctaaggaggccaggggaccaggaggagggaggaagaagttgagggtggccacagggaggaggtgaggaggagcgggagggcccagggtgaggggctcccgggctccctccccggggtcttgctgctggagctccaagaaccccggtatgcaggggttcgctccccaggtgccaaggcagcccactcatgggttccgggtcagcttccccgcagaggccagtggccggcagctccctcagccaggcctcccagctcccggcccctcgctgtgcaggcgctgggaacacaaggggcagcccctggaaataagggtggggtcccggcctccccattccttcccccctcccccctgccttccacccccattcccagtgcacagagctgtcaggaaaattcctccccgactgacaaagaacagacaggaaggcggttagggacgcccctcccctaccggcccagccgcccttggggtcttggtgtccagggcggaagagcagggtggttccccacgtcccttgggtctggcctcccctctgcaccctctcttgccccctccccatccagctgtgggccctggggactgtcagagaccgaggggtttccagggacacacttgtgtgctaaaacctgggcgggtggtcaccccccaggatgcatgtagacatccggtgagggagtctcttgaagtctctgggatggtgcccctgggactggctgccatctcatggaggaggtcagaggtcgctggggccagcccagggtgaggccgcattcatcttcctgaccctacaggccaatttgacttacccaagtgggttttggccggcaggatgaagtaacccatccattacatgtcaagagttaggtctataaacggcctttattataaacatccaactctgcaggaggtttacaaagcagggctcaggagataaaagccggcttccccaggtggcggctgcagggtgcggcaggcagccccaggggtgcccagggtggcggggcaggggaaccgtagggagggggagaggggcacccagaaaacctctcctggagaacatggaagactctgcccacttcaaatccctgcctggggaaggacacatgggaatggggccgggggaaaaggcgggccacctcgggccttcgtcacctgtgtcagctcctagggattgtctcctcctggtcacttggagagaacaggcgtgctggacacgtccacatctctgggcccggggtgtatgaatgacacgcttgctctggagtttccacctgggagctgtatggggacagggctgttcctcctcacacccgctggggaagggacacaggcctcttggtggcccccaccatctcc

SEQ ID NO: 914785 - DNA, 4001 bp, Homo sapiens
gctgctgaatgacagtgttaaaccaacttcaactttatactttatgtttactctccctgaaatgactgcttcccttccagattttcttatccaaacatacccagctttcaagatcgcacatgagccctacttcctagaattctcaagatggaaaaagattcataggtaattcagtgaacatgtccacctaattcagaaattagttttgccctagatccctgaacattttcagccatggaaagaaagcactcactctcatgaagctgccaattccagtcctccaaagggctcactattataaggttctttttaatactatgctgaagcctgatcacttagagctctaccattattcctaattgtatgtagcttctacagctgaagggaacaagctgtctctttccaaaacaatccttctgtatttgaaaagcattatcaggtcttctaaaaatttaacattcccagtttcttcatcactcctgacatgacattttccaaccctctgttccagtcaaccttctacagaggcactgtagtttgcctaaaaatgaggtgcctagaactgagcataatactccttaagtagttagatgagcccagaatagagtagaaacactaacttcctggatctagacactaagtttctatattacaacctaaaaacagtattagttgtgtttaagtggccatgttacacattgattcaacagagcaagtggtcaactaaaacccaaagaaattgtttacataaataaaatcttcttagccagtagctacatacagtagaactgagctcaaattgaaagctgctattaatcaaatgcaacaatggatataaaaagtacctagaaatgtacaaacagtataaagaggaacagcagaatgctgataattgttcaagttgcgttaagtgtacatgagggttcaatttattatcctacttttgtctgcgtttgaaattttccacaataaaatttaaaaaatatatacataatattgtacaagccttcaacagctctatttcttgaaaatctgttatctcctccctgcttctttttccagccttatttcccatcttaacctctctattctccaactacattggactcgactctttttttctttttcattccataaacttgctgtgcctccatggtttaatatatgatgtttatggaatcttcccccatttaccaaaaccctacctttctgcaaagctgagtttaaatgttacttctgtgaaggcactctaccaaaaactaagaacatagaagttggcgacaaatgcttaaccaaagtaaatgaaacaacttttgggagactggcttgcccaaggatcacagagttcataaatggtagagctgagattagaatacgcgtctcctgaatccaaatctcatctttccattatcgtaaaatagttcagtgtttgttgctcacacatcaaatgcaaacatgtttctcttttgccccagtaggtgcgtggaggaagaggagaaagaagtaagaaagatagcaaaaattgaagaaatgagaaggggaagttgcagactgcctcattttcacaatgggatctttctatccaagaagaaatgatcagaaaacaactctctgcctcagacaaatggcgactgactcatttatacattcattcattcaacattctgagtgcctactatgttccaggacctgaacacaccgctagagacacagggatgaacaaaacacaatccctacccacaaaaagctccttgcctagtggaactactacctttttaacagcagtaactttaatatcttgagatttcttgagaggagacccagtaaccaattttcaaagccaggctcacagaccagcagcccggaggtcccagcccagctccaccacatccagggcagtacctcgcagctctcagtagatcggatcttgtctcccggcttagcgccggggaactcaccgcgcactaagagcggaacgtgaacttcagtctcccctcgcgttcctccccttccttgctgacgtcatccaggagagccgcagactggaaacaacgctactaacggcacttcctcatcacgtgacgagtcacgcccctccttccgcgtggtccctccccctcaggccgcggtcgcgattacgctctctacggcctgcgaccgcagggccgttgcgggctggagacacggcgccgactggaaccggaggagctctaggccaaatggttgggccagccaggatcccaggacccttcgccgctcgagaccggagagaggaaacgaaacaggcgggaacccgtgggggagggagggaactagcggaaggtgtcatggcggccgcgctcttgagtcacgtgcccagggcccgccttgctacttccggtcacgtgccctcagactcctcgcagccagcgatggaggcgagaccccctagtaacagaggcggtggctactgctgcggccactgggtttcggcctcttcccagcagcggctctaagaagcgcagcggaactcgaccggatccaacccagttagttacttcctgtctagagttgtagcttccacctggtaagtttagaccgaagaatgcaggcgggcgggtgggtgggcgggtgaggagctgacaggcctgggggccgctggacggcgtggattctacccctgttcccagcgtcgctgtcgccgtcctcccaacgcccaagcctggcgtcttgtttgcccttatcccgaggcgaggaagaggcgacccctaatctacttgtctaaaggaaacctgctcttaaattgagagcaggtttacccaaagccaggatcagatttggcttatgagaatgaagtggaggcctctcccagacagagaagcccttcccgtcaggaaatgtgctgttgagtctgggattctgtaagagaaaagctgtcaccttgttgtctgcacaccttttgcttccacctgtcaatcttacctctcttaaaaaccttaacacgtgccagtccacacactcctagttttggtcatttgattgtcgtgtaatgatgaaaaatagaccatgagtacctggatatatgtaattattttgtaaatcccccagtgttctcaaaggccaaattaaataaggaggtgacttttcttatttttttttaagagacagagtcttgttctgtcgtcctggctggaatgcagtggcgtgataatagctcactgtaacctcgaattcctgggctcaagcgattctcctgcctagacctcccaaagcgccagaattatgctacagtgcctggccccaaatgactcctaaactccaattttagcatcagtaaaatggggatggggaaagaagatatgaaaaatacaccctttgtccatttgaagacccagtcttaaaaacaaaaacaaaaaaaaaactgagtggtttgaatgaaatgtgctttgcagtgagtattgactccatacaaaccaatatccagacttgtgattttcaaacattttaaaggagtggaacaatttctccccatgaatttttatctggaacccaatatataaagcagcatgctctggtggaactaaatttaaaagggccaggccccaccaccccacttaacttctatcctagaggccactccttggaacacagtttgaaaaccactgaactggacttaggtaattaagccaaagttgccaaccttaagattttttaaaagacaaaaccagagcagttgagatggagaggtcacaaccgcagggaaggtaacctctagtagcaggccttggacttagagaaggactaaactctggagagaactttgtacctgttagcaggcttaagtccctcattcagaaaggagaaaaaagagatggtctgctatcctcactcagccgacatttttttttttttttgagacggagttttgctcttgttgcccaggctggagtgcaatggcgcgatctctgctcactgcaacctccatctaccgggttcaagggcttctcctgcctcagcctccc

SEQ ID NO: 914786 - DNA, 4001 bp, Homo sapiens
gagtgcactgagaatatagacagagtgcctaagtctgcctagagaagttgtggaaggtttcacaccaaagaggaagcattgggcccaagagctgaaaaatcagcaggaattttccaggttgacaagtgaggaaagggtgttaccagcagagggagcagcatgcagagcccaaacatgaggaagcagtgtgctccaacctcatgtagattcgtatggctggcacacagtgaatgtggcaggggaggagataaacctgagaagataaccaaggcccagatcatgagaccctgtgtgcacttggtttgtagtaatcaggcacattttggggtcatttactgaaacaggaaacacaggaggaaaggttggtttgtaaagaagatgcaaagcttagtttgggggatgctgaattttaggtgcctgtagaacatacaattggaaagagatgtctggagctcagaaagtagatctagatccagtgtccacagcatagatattcctcagagccaaggtgatggttgagatcactgagggaaggtatatggaaaggctaggatggatccccaaggaacattagggaactggttgagatagaatgagacatttgagaagagagagaaaagaggcaggagggaaaacaaagccgacagtcaggacttccccaaccacacagcacctttggcaaggtaggaaaaggcaccccttcctctgagcagacacagcctgggtcacatgggacttggtgagcacagcagactggatttcatgctccacatgctcttctagccaggtgccattgtgttgggaacaacttgccttgccctatgaagaggacttgatacagggtcatggaaggcaagggaagcaattgccagagaaaaaaaggatggccagcagtgtgaggtacagcagagcggtgtagaactaagactaggactgaagaacagccactggatggtgcacctgccaggcccacacgcatgcacactcccttagcccaagcttttacaggaaaggagggcacatgggaaagaaatctgctacctattgctatgggctccatgccaaggccatttgggggaagggtccccagtgtcgattccagccctttccagcctggccctgattttggcccagcagtaccttgatcagaaagacactgttgtgaccttgacggaatgcagcatccacagggctggggaaattcttccatctctctgagattaactcccggtcccatttgtgactcttccacacaaactcccctgaaaaaacccacactcactgaggggcccagtgagaaacctttgacctactgagatagcttgagagaagctgtcagtgataccatcagataattcctaagacctcccacagacagggacaccctttgtgaaggagagtaagtctaaggtcctaaacgccctaacctcagtccctcctacctttaaaaaacagcatggttccattgtcatccagggtggtagcatcaaagctccagccatctgagcagcgttctggggtggaggtagggagatggcaaagtaaaaaaaaaaaaaaaaaaaaaaaaaaaaaaaaaaaaccagaaggtgataaaatgcagagacacaaccagacagataagacagacttagggagtcagggcctcaccagtcacgtctgggtctggcttggtctcgccttcagcaacattcccatgggcactagtcctagggagaacaaaatagatatcttgatccattgggaccgatccctttcccatagcccctgaccccaaatttgaccgaggcctaaaaactggccctaccttaccctagcccagaactcaatccttcgcttctagtcccagctttactcacggaggaagaggggtggcaatggccagagaccagcataggctccacaaccccagtgcaacgggtgctcccagtaccctagccatgctgagctgcagaggccacaggacagctctgggtgaccagttgaactccctatatagagttggcagcagcaccacccccacctccaactctactgggaatgtgctgtctcccaggactaagccaatattggctgattacatcactgcaaataaggtcagggtctggacagaaatctgaatccaagactcctttttcccggcagctgccccccaacccccttcagcaattttcaagcagtaactgggctacactgctgacgtccagctgtgactctcacactggcaatgggtccaggcatccataagtcagggaagtgagtagactgaggatcaccttttgtgattgagtttatctccacaatgggggaggtgagaaaaggagggaactaatattgctgtgtactgtgtcaagccctgctctaaggcagctagagacagcaatacttactacttttagtaaccacacacacagataaacttacttagaaatactcagagaacagctttttccaagcttcatcaggggcctttctggggcatgcccaagcctcttcagctttacccttgggctagtgagtctggggacaataatgtctcactgttgtcaaatgtccaagccccatgcccagcctctcgccttccctgactggcaaagggctttgcaaaaagtgcctggaagtgaagggttgacagtaatgaggcagaaacaggaggtgtctctcttccagagagcaccaccactactagtaattagtctttcttggtagtttccaccttgggggaaaaagctttatttaaccaacccagaacaaatagaactgtaactggaatttcacaatatttctagctgactcctgcttaaatgctaccttctcaatgaagcctttcttgaccaccttatctagccatttcagacccttgcttgttttattttacttactaaaacttgaaattctttcatctgtctacttatctggtgatggttgttgttgctttgctttgttttgcctgtcttgtttaccattatatatccctgactcctaaaatagtgcctggcatataagagttgttccagaaatatttgttgaatgaaaaaaatgcaaaaatgcatttcaagtactgagtagtgttgctagtgttgcagccaaatttctgacaatttccccccctctagggtaggagaatattaggaattgggggtaggttatggtagtaggcataatgagatctaggagtcacagacgccctttatctgacagtcctgtttctctctccagtgtctcggccccacatccatctcttcctgggatctcacctgctatcctcagtacttcctgggcccactcccaaagctgccccatttctgtgtgagatttgcctagtgagtcagaaaagaattatgggcagactcagctatgggccaggatgaagttccaggacccctgctccctagccaaggctgaaagggccctgatccctcacagatggctccagacccctgacagtcccatatataatcttaccaaaagtctcagatcccttttctactctgcgaagtttccttccaacaggaaaacacacattccggaacctctggaacaacatgtcaccaggcctctgccatcaggctcaatgtcctctcctgacttacgaatgaaaatgtgctgtgaacatcattccctcctcataggtcagtgggcaaggctggactctctgagtccttggcagcctgggcaatgccatcgctgctacagccaatgtctcatactcaccttctccccattgcagggcatgtcttctttctgggtgttgggcaatgggagccactattctaagactccccctcaccttttctttccctctcagcctctgaaaccttatattctccctcctgagcaccccatgatcctccatcaggaatttcctcaacaacttgtcttcagctgtcagaaccctgtctgaatcctacagattttgctgggcctgcctggggagagggaagctttcaccccaagaaacaaacaccccacagaaaacccatagtgagagtcttcaatagtcc

SEQ ID NO: 914787 - DNA, 4001 bp, Homo sapiens
acttgttccccaccagcaccatgggcacgtcatccgagtccttcacccgtttgatctgctccctgagaggtggaaagcgagagctggctacgggggctgcaggcgcagcggcatccaggacatgcgcagagaggacaggaggcccctgcctggacgcagccggcctggccccacctgtgcggcgtgggctcccgggccagcctcacggggttcacctgtactggtggatgtcctcaaaagacttggtgttgttgatggcaaacacacacaggaagccctccccggtgcgcatgtactggtcccgcatggcgctgtactcctcctggccggcggtatccaggatgtccaacaggcacgtctccccatcaatgaccacctgcttccggtaggaatcctgcaggaggacagggctcagggaccccctcaggaccttccgtggggggagttcacacagccagcctctccctggtacctctcatgcccctcatgccccctcctctcctggggtgctgagacgagggactcccctcctctagaggaagcaggagacagggccacagcaccatgcaggggaccaggggctgcagccagccctatcctggctgtgtcctgggctcgcccgcagcagctgctggcacctggacggcggcgccaggctcacctctatagtggggtcgtattcgtccacaaaatggttctggatcagctggatggtcagcgcactcttgcccacaccgccggcgcccaccaccaccagcttatattccgtcatcgctcctcaggggcctgcggcccggggtcctcctacagggtctcctgccccacctgccaaggagggccctgctcagccaggcccaggcccagccccaggccccacagggcagctgctggcagggccatctgaagggcaaacccacagcggtccctgggccccaacgccaggcagcaaggactgcagcgtgcctacctgtgcagctgcaacccagcgtgcgggagggctgtcgcctcgcccccacttgctcttaatgacccagtgatgggaaaagggacccagccctcaaaggcagggctgacagctgagcgctctcaaccacgcacccaaattagaagctgctgggtcggcagaaaggctaaagggaggcgcccgagggctgaggttaccgtcctccagaacaggtctggccacggcggagcgcgccacggcgtgcccgggcaggctagtgccagcctgcaggccccgcggcgctggtgcctccgacaagtatttgctgagcgcctactgcgtactaggcgccgccgaggggagggcagacccgggcagcgccccgcacccccggcggggaaccgggggcatctttcagccacagaaagctggagaagacagaggagctcctgggaagcagggactgagcgacaggaaggggccgagaagcggcgcgggagacccggagagggaaaaggcactggggctgaggcccccggcctggtccgcgacctgtgatgctgaatcgggggtgcccgggcgtgccgtggccgcggccgcctcctcccagacgcccccgggtgtgagggcgccgggcccgaggctcccgggtacgccggcgtggggaccgtgcccagcgcgaggccacgggtggggcccggattcccgcaggccccagggaggaaggggcccccgcccgccgcagcccccgacgcccgctcacctgtgcccgcgggccccgcccggccccacccacccgccgccgccgccgccgccgccgcttacgcccgccggccccgcgcccccggcccgcgccgcgcgtattgctgccgcctgggggcgaggagggcgcgcggcccggccgatccctgcccgcactcaccgttcacaggcgcgactgcccccggggccagggccggggccgaggccggggcggggcgggggcgggggcgcgcggttcgccccgcgcatgggctccgtccgcggcgggtgcggctcgggttgcgggcgcagggcacgggcggcggagactcgggcgggcctgcgcacgccccgccccgcgcccgtccgtctgccaggcgcggcctaccattggctgcgcgccatcgggccccgccccaccccggttggctgagcggcccgtctgtcaggagccgcggtcgggcggggcttccgggagcaacgcgggaggcggagccagtagggccgcggcctctcggggttgggcttggctggagaccggagccgagctcggggttgctcgaggaaggccagggagccggtgtctgggggcccggggcggcatctccgagcagggccccgggctctcccgggaacaggccggcgagagaacccgactcagcggtgccggtgcaccagaggccctccctgcgccggcagcgcggcgccgcccaccgcggaggtcccggggctacgggctggggaaaggctgggatccgccgggaccaaggcgggatgctcggagctgggggcccccgggtggccgcggggtccggttgcccggctgcccttccgcgcaggtggagcggccgcgcaccccacctaccaccacgcaccccagctcccctactcccaccgcaacccaccccgaggacgcttgcagccccggtggggttccgggcggcgggcgcagccgtgtgccctggggccaggcgtgagaacgccccctccaccactctcctctttctcgggcctgcgtggcaggcgaccctgcccgcccagtccccccaaacttgaggttccaacgctgcagaagctcagcgtggtccagttaaaccgtacccacaagttgccacaggggagcgaagtgcccagggctcaccccaagcacatagacgcacatcctagctctttcaaacccaaaaagacatgtttttaacattttttaaaattgcaaaggaatcagaaatacatcctcattaaaaaacaaaaagggccgggcgcggtggctcacgcctataatcccagcacttcgggaggcctaagcgggtggattacttgaggtcaggagttcaagaccagcctggccaacatgatgaaaccctgtctctactaaaaacacaaaaaattagtcggctgcagtggcgcgcgcctgtagtcccagctactcgggaggctgaggcaggagaatcgctggaacccgggaggcggatgttgcggtgagccgaaatcgcgccactgcactgggcaacagagcgctacttcgtctcaaaacaaaaaaggcgttttacagtcaggcaaaccctgcctctgcccagtccagcgcccgcctcgccctcctgcgccggtcgctgctgacccggggctccacccacgtgcggtcccgggggtcccgcctgccgtccgtccaccgcgcggtcgcagtcagagctcggctcggggcggacacgcatgaacgcgagtgagaagcggcgactggacggcgggcggcagcgtgtcccgcgggccgggcactcgggtgcgctccggcgtccggtgtgtgtttcctggtcctcgggggcgcttcccccggtgcttccttttgccgtcggcctcacttccaaccgaaggtcaggacggcaggcctcggccccaggggcgacccttccacctgggaaaggtgggcgcgagcctccagcagagaccgcctttacccgccccgcgtgggaagcgccaggatcgcgaggaaacgcgacacgtgcatcgcgacggcccaggcacggagccgcaggaagctggcacctgacgcgcctgcgcccacccaactcgagttggtggcgcgtcaccttcccctgggatcgcccgcagcaggggcgcccacgcacgtgccagtccacgtggccccgccctagcgaccgttgctaaggggcgtggctcagccgcacggaacccgagcccccggcgacttataaatatttgcgtattcaaatgaggcctggctcccgttgctatggcgcccaggccgcaaccccgcggcggccggaagaacagcctggagtaggagacagcgcctggaggt

SEQ ID NO: 914788 - DNA, 4001 bp, Homo sapiens
ctataatcccagcatttcaggaggccgagatgggtggattgcctgaggtcagaagtttgagaccagcctggccaacatggtgaaacccccatctctactaaaaatactaaaattagctgggtatagtggcaggtgcctgtaatcccacccacttgggaggctgaggcatgagaattgcttgaacccgggaggcaggggttgcagtgagcagagatcgtgccactgcactccagcctgggcgatagagtgagactccatcacaaaaaaaaaaaaaaaaaaaaaaaaaaagactacgcattgggtaccgagtacactgctgagatgataggtacaccaaaatctcagacatcaccactaaaaactaatttatgtaaccaaataccacatgttcccccccagaacctcgaaatttaaaaaaaagtaaagcctttgactagaggggtcaagagtcaacttgaccaaataagggacaatttgagcatcaaaaaaaaataataaaaataactgtacacaaactgaaacacatcaaatatgttaaaacccacgtgttcataaggatattttttaaaaacactaggcatctttggaggatggaaaagaatcaccctattattccaaaagctggtaaataaaggaaaagattcaagcatttcctaactgaattgtcctcacggaatgcaatttaaaactacaacaaaccccaaagctacaaaccaatacttgtaaggtagccatatatgtatgcaaaaacagaaaaatatttggaagaatacgcaccaggttgtacagaggggaaaggctgtacagatgggaaggatggtcaaaggggacattagtttttatgctaatagttttggtttttggcttttggctttttttgagacatgatctcattttgtcacccaggctggagtgcagtggcactatcacagctcactgcaggaagcctcagcctccccagctcaagtgatcctcccacctcagcctcccaagaagctaggactataagcacataccattatccttggctaattttaatattttttgtagggatgggatctcactatgttgcccaggctagagtttcggtttttcagacaaagtgaatgtgttcacgtatttctcctggaattaaatacattctttcttttttaagtcgaagctttagagtcagagcctcctaagttcgaattccctctctgacttttgggcagccccctctctatacttaccagtatatcattcctcctatccatgaagttggcagtaattatgcctacttcataggattgcttattaactacctggtgtggattaaataaaagaagtgtttagcatggtgtctggacccctgagcacttgggaaatgtggctgctattgggtctaaaggaagaaggaaactaagaaggaattggagggaaggagggaaagtagagggactggccctgcctggaggcgagggagacagagccctttctgacagcccccattgccacccacacagctggagccctttccctggaccctccctccccagctaatccctcccactgaggatgatgtgacagaggaggcggcctgtggggtaaaccaagggctgctctccctgagcccaccattcctgccttcaggaggcttagcagagccactggtagtttggccagaggagggcttggaaaagcataaacgcaaactttggccacagtagaaccagaccccatgcggcagctgaggctggggagcctccagggtcataacccagcaccgtggttccttcccacagtgtctgagagagccagacccccagaactcagcatgtgcccatgtgccctccatgccagagctgtagaccaacaagaatacacataatcatcactaatagggtggttgttcctcaaatcaaagctttaaaaccgtttctggggacttaccaaagccatccttccttcaagatgatgtcttgtgtgttgctgactctgtgtccagccttaaattagctctgagtttcactttccctgtgacccagcccatatacaactatttcagaacataggctgggtgcggtggctcacacctgtaatcccagcactttgagaggctgaggcgggaggatcacaaggtcaggagatcgagaccatcctgactaacacggtgaaaccccgtctctcctaaaaaatagaaaaaattagctgggcatggtggtgggcacctgtagtcccagctactccagaggccgaggcaggaaatggcgtcaacccagtaggcagaccttgcagcgagcagaggtcgtgccactgcactctagcctgggcggcagggcgagactcagtcaaaaaaaaaaaaaaaaaaaaaacagaacatagatcaaggttcatgtaaaattttccctgtcttcaaacaggggcagagcacatatcaagtaggcaaggcggcatgaaaatcagccagacagaagaggaatcagagctcaggatatagattgagaaggacttagtggcagtgtggtcaggggcacagctgacaatcaccaagtttcaggtggaacaagcaagatccagtggttgtgggggcaagggaggatatagagacagagaccatgggggaaaatttcaaaaaggagagaggagccccagagagactgagattcatgcctccaaattgggaatgatggttgccgggacaggcaaacatttccaccaacctcaaaccccatggccctagaaaaatcgtattattggaggcacattcctctaccctggaaacagagtgagcctgcttggacagcagtatagaaaccactcccctttctgcctctcacccacagttcagaaacactcattccacaccaaatggaaaccaaaacccagtactgggtgtgtagaggttgcttctttgaggcacctgcatgcttatctcacccaagctccaaataagtatctcttctgtcatctacatatagttgtccggtcctgagcaaactggacaggaaggggtgggtggggctggggggagctgagcatcctcactgtggggcatgggggcgaggaccaataacttaccctcttcaggctataaacaaacaaacaaacaaagagctttagtgtggggatgcagatggactggagccagaactggaaaactctttgggagccacagcagttctgcatgaccagctactccctcagctcacgtggtcatgtggtcttgctcccatggagacggcctctctcagcacctccactccattctcctctgagttgcagtgggacaatcttcaaagtattccttctggagggagacagtagggttggcttggctaattatctcctgccccattgtccagagacctctgggccggtcccactcaggcttgctgatcatctttttaggggctgacctccagtccagcaatctcagttcttcctatgcctgccctccccttgcaaccacatcacacccctgtttcctggggcaggaggacttccacgtgctgtctgctgaaaggatctcaggtgggttggcacaatgaccaaccagaccatgcagggcggagttggggaggaacatcactgtactcatgctggggcttgtggcttttcaccgaatccaagctgttcagagtgtcaggaaattatgtccaggagctataggaaaggagagtctgcaaatcaagggccagtggaatgagaattctgctgtctccctactgttcatgctgagcaggaaaggtgacaaagttctactgacagagaacagggtagggcaggccacacccagcctgctggtaagctctaggcctacagcctggaatacttacatttttgttcacatgcacgctctctatgtttgtttaattgtataaaaggctataaaaggaaagataagcctccattctccccacctccagcctccagcctccagcaacccagttcccctttctagaggcaatgttatctttctatgtacatgccaggaatatcttgggctacatataatttta

SEQ ID NO: 914789 - DNA, 4001 bp, Homo sapiens
ttttattttttaatttgctaataatgtctttttaatgtttatcaaagtgatacttgcacatggtttccagtacataagaatttataatgaaatgcaaggagccttcctcctttcccttttcatcccagccctactgcccagaggcaaaccccttgaactctttcttccaataattagccccagatttctaagaaagcttgataagccacaacactgcaactgcaagtaatatgaatgaaatcagtatatttctcccttgaaacaaaatgttacaggagaggacagaaatgaaaggcaagaatatgctttcaagcatattaaattaaggtagtatagtagagtaaaatacttcgaagccaaaagatctaggtttgaatcctagctttcatgattgctgtcccaccttgagctagtaaattaatgtctgactctcagcttgattatctttaaaaatagagatgaaaatgtgtctcacagtggtcaagaaggtgaaaggacacagcacatgtaaacatctggtataccaccaactcagaaatgactttttctttaccttttcccatgctttaaactcttctccagaaaaaaatagtgtgtggggcagaggggacacccctcattttcagtagagctcctctccaaaatttcagcccctcggaattttttaaagcagcaatcatcatgttgttaatgaaagtgaattcaggaaatctgccaaaggccgactcattgttcactgattagtgagaccaaggacaatactgtaagcctcctgctaaagccattcatttctctggggtctagagaatggccttgtggctagaaacagctgcaacgcatgcctgtggccagcaggtcccaagcccagtaccatctgttatcacccaggatcacaccagccttccccttgctgggtaccggctggctggttcacacaaaaaccacctctgggtttgttttacagaactgcattccaagtcaattctccaaaagatttcttccacccaaagaccccaaccttacaatcttcttacccttgctggatgcttctgccctgttctaatgtgcccggcggaggctgcttggctgggagctggaccaacgctgcgaatcccacggattcttctaattcaaggggggaaatgctatttagacctgtgaaaggagagttcgagcaagcaccttgaccgctacggagagtgggctcagagctctagtctagcatcgtgcctggcccctggttaggcctcagaaaatcttgggatgaatggagagggttgtggaactaggtgctggagcgggttcagttcctctgccaaagagagactttgggattcctgggaacggaatcggggagaggatgaagaagggcgcctcgcctctatcctaagcccgatgggaggaacctctgccgagccagagccggtcttaacaccaccctccggagctgccaccactgcctcacttccatatgagatatagcgggaaggagggagtggctgcctggctcgctttgattagctttataacaagcggtcgttctgaaatactcgctcatgatggctaacagacaacacaatcgccaaatgtcttaagaaaaggagctttgagggtaaccgcccgctgggacctgaaggacaattgcggattgtccttcagccgcattcttggggctgacctgagtggggcacagctgaacgtctgagcgcaggcggctggtccttgggcccggtactggcggttcgcgaggcgggtttggggaggggtgggggaatcctagggaggcggagcgcgtactccccctcggcgcccgggctcaggcccatcccgcctctgcggcctcgccggcccccaggccttgcaggggactacgcccctggcgagttcccagtcggcgcggcccctggtcggcggagccgcggaagcttgggcactgggggcggctcggggaggaaccgcggaggggaaagcgccgcgggctgcaaacggcagaggcgcgcggggtggcgacagtggcgcgggcgcagtgagcgcgtccgagaacagaatgggacgaaacggggcgcttagaggcccgggaatctgtgggtcttttaggcggagaggggcgaaggaggttattcgttttggggaaggtcatggaaacagcaaaggctcagaggtggtgcctaaagtggctggagaagctgaacggtttggaacagaggcgtgacttggaggggtaaatggagaccagattaggaagccttgggaggcacaatcaggggttaaaatcttgaacaattcagagttgttttatttttaaaaatatatagaaaatgaaatctacacttacgtaatagataacttatgaaaaagtacatggaatacacatgttgcagtcttgccaatgtaccttaatgtagcagtttctccttgtctggactgatacccgggattctttgtcctactccaagaaaattaaggaacgggacataaggtgaggtgggagcgaaagtttaataagcgaaagaagaaagctctccacagtgagctgagtatgcaagtggattgccctgttacagctgaattcaaaagcttttgcaagaaaatctcttatctctgtagtagtttgagtaacttctcttatcagtaaagctgtcttacgcagctgtggttatgtatctatgcaagcacaaagcaccgccttttttgtttgcataactgtgggtttgttttaggtaagcccccctcctccctgtgaaagttcccaccatgtatatgcctgaaaaggggagaaaactttcctgggagctccctaattatacaaagaacaaaaggcttctgtgctggaccctgtctgcttatctgtgtgcaggtggagcctgagttttttaccaggttgttttatttttgcctgttgctgtgacttttcaggcaggccgcttctgcattgagtcttccccaactgattttctctttccttctctctcgcacacagttaggaaacataatgtaattactacccatgacaaaaccatcctacgtaagaaatggaacattcctagtacagatgctccccacctatggattccttccttatcccttctccctctgcacgcccaacgtctatcctgacctttgtgtctgtcataccctcactttttaaaatagttttttaaatcgcttctttgtatccctaatacatcactttgttttgcttctctgaaactttataaaaatggtgctatggtctgggtgtttgtgactccataaaattcatgtgctagaattctaacccccaaagtgatggtatcaggagatgggccctttggtcatgagtgggattcataagagcccttataaaggaggtcctgcagagctacctagccacttccaccatgtgagaacacagcagttgctgagaccagtccctcacaagacaggaatctgctggtgccttgatcttggacttcccagcctccagaactgtgagaaataaattgttgttgtttataagccacccagcgtatggtattttgttatagcagcccaaatggactaagacaaatggtatcatgctgttaagttctcttctgcaattttcttctttcaaagttgtttctataatacatacacagtgctgtatagtcctgtaattcattttcactgcagtaaaatattccactatgtggctataccacaatttattgacctagtgataaagccacttggtgatttgttggttcttttttttttttttttttttttcaatttggggttggaaacaattgagaagaacccaatttgtatcctggtgtatgcatgcagacatcacacaagatgtaatacctaggagtatatacaaatatccaactttacaataaaacactagaactatttccccaattggtggtcccaatttcacttctaccagcaatgggtaagatttattaatttacatcctcaccaacacttagtattgtcacacttcttgatttttccaggtgagtgaatgtaaa

SEQ ID NO: 914790 - DNA, 4001 bp, Homo sapiens
taaccaagttgaatacttcactttctgttttttttttttttttttttttgagatgagtctcgctctgtcacccaggctggatggagtgcagtggcatgatctcggctcactgcaaactccgcctcctgggttcaagcgattctcttgcctcagcctctgggactacaggggcgcgccaccacgcccagctaatttttgtatttttagtacagacggggtttcaccgtgttggtcaggctggtctcaaactcctgaccttgtgatccactcgcctcggcctcccaaaatgctgggattacaggcgtgagccatcacacccagctgaacatttcacttcctttttcagagaaacaggtgactgtgaaacagaattataatgttgctccacatcgtccaaagatttcacatacatatccactgctaagatgttttctcttaatgttaacataaacccaaaaggttaacatatgtctttcctactaggttgtttaaatgtttctaaataaacaaagaacatggagtaacattattagtgtatcttacctgagcccagtctgcaggcaatgcctaaccaccccaaaattcaataaaatgcttaggaagtgcacattcgattataaaacatcaaaataaataatcatctcagggtaggaccacaagcatatcataagtaatcactcggtttaaagggaaaaaaggccaagagacgaaaaataaagcaaagaaggaaacaaaataggttgaaaaagaaaaaaaaaaggggggggggagcaaaacttccctgcagataattttccctatttcctcaacctgaccttcgtcctccattttaaaaatcctccgactacaagttccatgtgtttggttcactctttacgggtatactttttcctacaaacgtccttgtgaaaaaaaaaaaaaaatctgattttaacatgatgagttatcattttacagaagcaatagttcttgctactcgttaggactccagaacagtttagcgagaattccttttaaaggggctttgtaattgtatgaaataggccaaatccagatacgattactatcttaatcgtaactggggaggtacgattccgcagtgcaaaaagccttctgaaattgtgtccctacacccctttccatcctctgcccaaacatgttaacagaatgctctgcatccttagcacagggccaatattcaaaccgagcgaaaaactttattttaaaaacacttacaaggggcgaaccaaggaggacagcgtgtgactgaggaggcagcagggcgactgactggctccatgaacacggaatggcttaaagggcacaagccccagagacttaaggcagttttctcctacaccctaagctgagcttagattcccaggattgagcgagcagtgtatttcgtaccttaaaactctgcaagtagtctaagcaagcagaagacagccaagggagccaggaggggcccgcggggcacaggagcctgagaaagaggagagctggggaggggaaggccaggagcagaccccagaactagtcatcacggcccaggcctggtccgggccgccgcgggagcgaggacgcggcgctgcatccgactcacctgcccattctccgagccccgggccgacccccgcctcattccccactccccagacccggagggccgtgaagagcgagtacgaaatacgcagggctaggtaggccacggtgcccgcgccgacccagtacaggaagccggcggcggggagagcgctctccatggctttccactaggcctcactaccttcgtgaatgaaaagagcgagtgaatgaatccaggaggaggcgccggccgtgacggtgaggatgacactaataggcgctgctccgacaccactttgggcctaaaccccgcccgcggggccatatccgtgtcgctattggtgacccgtctttccctctgcgcgtagtgcgtcagccattagctgactccagttccactgcccctcccacactcctcccatcaccgcgtcccccggggttccgccagtgagcgccctgtctcaccccaccgaggcgccccggtctctcattggctgcagccgtactcgcgactgcggaagactgcgctcggattggccggtcagacccaggctggtttgagctcaggttcgaagaggaaatgggatcagagaagccgctagtgaatggaaagattatagtaagaagtgggcgtaggcagggcgcggtggctaacacctgtaatcccagcactttgggaggccgaggcgggcgaatcgcttgagcttaggagtccgagaccagcctggccaacatccgaaccccgtctctactaaaaatacaaaaattagccgggcgtggtggcgtgcgcctgtaatctcagctactcgggaggctgaggcaggagaatcacgaacccgggaggcagaggttgcagtgagccgagatcgcgccactgcattccagcctgagcgacggagtgagactccatcccaaaacaaaaacaaaaaaaaaaagaaaagaaataggtgtggagccacagttttattttcaactctttattaaataaatatatattttacatatatgatataattatataataaatatatcattgttaagcgtgctgtcattgttgccataaacttttccagataaaggcttgcagtcttctgtgtctgtgccttcctcgctgcaggcattcgcccgggttacactcactcatagagagcccttaaatgccagacctccctcccagctgagcactaaacatcacttagttcccaacgatttggggttcaaggcaaataacctgatggagtctaataactgttagacgatggcatcagagctgtatggtgaatgaaaaatataggaacacagcttgctgaacaattagttttggaaggagactatatcttttaatttgtcttcaaagggggatagaaaattttactttcttttttaaatttcccttttttggttggggagtgggggagtggtatttccagggggcacagaagtgtgaagtccagatagaggcatgggaactacgttagcaaagttgcagaggagaaagatcacaaggtaagtttaaaaaattgtgtaaaacttaaggagattttgggctgagacgatggggttttctaaatatacaattatgtcatctgcaaacagggacaatttgactgcctcttttcctaactgaatactctttatttctttctcctgcctgattgccctggccagaacttccaacactatgttgaataggagtggtgagagagggcatccctgtcttgtaactcaatgtgcaaaaatcacaggcattcttatacaccaataacagacaaacagagagccaaatcatgactgaactccccttcacaattgcttcaaagaaaataaaatacctaggaatccaacttacaagggatgtgaaggacctcttcaaggagaactacaaaccactgctcaacgaaataaaagaggacacaaacaaatggaagaacgttccatgctcatggataggaagaatcaatatcgtgaaaatggccatactgcccaaggtaatgtatagattcaatgccatccccatcaagctaccaatgactttcttcacagaattggaaacaactactttaaagttcatatggaaccaaaaaagagcccgcattgccaagtcaatcctaagccaaaagaacaaagctggaggcatcacactacctgacttcaaactatactacaaggctacagtaatcaaaacagcatggtactggcaccaaaacagagatataaaccaatggaacagaacagagccctcagaaataacaccacacatctacaactatctgatctttgatgaacctggcaaaaacaagaaatggggaaaggatttcctatttaataaatggtgctgggaaaactggctagccatatgtaggaagctgaaactggatcccttccttacaccttatacaaaaattaattcaaga

SEQ ID NO: 914791 - DNA, 4001 bp, Homo sapiens
ggattaatgctggtgaaagaacagctggagcaccccccccaccaaaatgtaaattactgtgtaattgtcaagattcactggtttctggtgttgacagacccatctacctagagagcctagggcactgttgggcacgtggtcttaaccctgagctgagccccatctgttcccctccctcgccaggtgccagtgcccccgggagtcatcgggcttttaactactccggaatgcaccccatactgaaaaaccaacctcaccttcccaaggtaggcttctgcaatttccttcatctttgtcagaaccatagaagacacctcctctggatagaagcttttggtctctcccttgtattctacttggaccttgggcctgccagcatcattcaccaccataaagggccaatgtttcatatcagactggacaacagcatcatcaaatctgcgtccaatcagacgtttggcatctgtaaaaggtgtcaaatgaaaacactttcaatttcatagctcttctgataaaactcaagtccatgattactcaaatacctaacagttcataggtaggtgaattcaactaccatataggtagcaaaggttcaaacttcaacctcctacgttatccagatttcagcctgaaaggtttctacaacctgttttataacagacttgataacaagtctctcagctcagtttttctaaaatcaaaaagttccctcctcacgtttcataaacttttgtgcttcctagccctgttatatttgttctgtcatttaaaattaggaactcaccaaaaactgtgttggtggggttcattgcaacttgattctttgcggcatcaccgatcaaccgttcagtgtccgtaaaggcgacatagcttggagtggttcggtttccctgatcattggcaattatctcgacttttccgtgctggaaaacacccacacaagagtaggtggtgccaagatcaataccaactgcaggtcccttggacatggttgctgaaaaaaagaaaaatctggtttaaaaattcaattaatcaaaatatttccctcatcccttaacagaacacttaaccaggaaaaacgtatggccactgccaagaggtaatagtgcccatcacctcctgtctaagcacgcgcgaggtccagaactagtgctgcagtccaggttgccgtgccaaccgcagcagagcacgccctagatgaaggacccatctacccagacggcgtggggcgttgctcaacacgtggtcttaccccgaactgagcactgtctgttcccctccctcgccaggtgccagtgcccccgggagtcaacgggcttttaactactccggaatgtacccccatactggaagcacgccaagaacagctctgaagaaccacggtgggactggactaagcagggaactgggtgaaagaaaacgctggctccacttccccgcgcgccaggcaaaccgatgcagcaaccctcccccgccacgcggccgccgggcgtctcccagcctcccctggggccactgcggcccactccctacatttccgtcctgccggctgcaaccaaataccgctgccatcccaccgaaaactgaggccctttaagccggtagaaggagccgcacactcgcctcgacgagattctcagaacccccaagcctcagcaagcccaacaggcctgtgtggaggctgcacgctcccagacccacaacccaactcttgagcagaggttttacctggggtgtaggcctggctccaataacgaaggaagccacaaaaaacccaagagctgcaggcgagttcaatgagaccggtttccgcccgccaccctgcctcttataccctatcttagaaccttccagaaggggcccgcccctgctgcctgccattacggcttccccggccaatagacgcccggctgcccttacaagacccaatcacaagcccggctccactcctcgggcctcgcccccttccgcacccaccccaccgcgctccgcctcacgataacgcactcaccgcagcgttctggaactttcaagctcgcccccgctctccggacggccccggggaaagggagggtggggcgcagcgagtccgcgcgcgggagtcctcagttaccccgggcgggggaggggagcgtccacctctacgcatgcgcccccagcttccgcgggagggagggggcggaaaaaggaggaggaagaggggcgggcaaacttggaactaaccaatgatagcggcgctagccgggatcttggccggcacagaactgggggcggaatcgcgcggggcctgaagggaggggtttgggcgcgggagccgggcaggagaagacggaagtggagcgaggacaaaatggctgcgaaggttgttgctcccctcccccacccacgtccgaatcctcctttccatgccccaccttcgtgttccagacgggcctctaagtgccccgggtttcgcgaatctgtatttcatagcgtggctttggacaagggctgaccccgaggggctggggcgaaggttccggcttcagggtgccactagggctgctcgctcacggccccccaggattgggattggagggagccgccaggccgccgcggggtggggcgggttagctcggcaggcctcccagcacctgcatttccctacggcaactgtcgggaggcagcccccgacgcagaggtttaaggggcccggcttttcagaaccgcctcaggacgcggtcgtgtctggatccctccgcggaaaagaaggcgaaaccgcttctctgagccctgaccgttaggccccttcccacctccgtctagaacagattcggcttcttggctcagtccttccccaactagcccaagccctacatttccccgttgtttataaaataaacaggtttaaatggtggcgagtgtgttcttggttaggtgaaccaggcattaggaatcataggttccagtagccgtgcgtccttgatttagactttctgaacgtttgtattttcagtaacatgaggtgatatctttcctggtttgactttcatcaaaaattaaacgacagaccataccgacgctttgaaaacgtgactgagctggtgcacaaaacaatggtgcctagaattttgaattgtgcaatgttgtgcatggccgcggatatgtggggccttgtggttccaagagcctgtctcaggtaccttgaacactccctgtatcctttcaagcaggcgaggtagctgttattcctatttagtagataaataggcaccgatgggggaaaagattttttaaggctacaccaaaagaacttttagtagcagggctggaattagaaggtctctagactgcgaaaaaggctgtcagaagagcgaggacatcttgtccttgtcaaagccagtaaagggtagagacagactcaaacatatgaagaatttccttttcatattttccttttggggaggaatgttggcttagagttcatggagatatattcttagcctctcccacgtcccaagaatttaattttatacaatgctttcactacatacaaaatgctttcatttgtcatttaatcatcaacacaattctctaaggtgtgtattattcatccccatatcaggggaaaaatgcagctcagagataatcatttgtgggaagataagcagctgggtaagctagaatcaaatctagcttttttttggttcaagatttgttttatgttttttgttagttacgctacagtgtaatttccttcctggaaataaattgaactcaactccagaaagagttaagatatgtactgtgagccactgttttcagtttcctttggtatttggaacccccagtcccccacgctaactgctagtaatgttatctggaatctttcttttcacaccccagtgcctagagtttaacaagcacaaattttaaactacaccctgtgctgtattttgcgtttttgtaattattttaatcattgaatagtggaaaatagaattggggcgcacatccacttg

SEQ ID NO: 914792 - DNA, 4001 bp, Homo sapiens
tgtatttggaggcaggaaggtcttttggacacttcccccaaatcatgtagctggatgttctcttgattgcagagaataactgaggggacagacctcaggctttcctgaatacaccgtacccccagaggatgggaaggtaatggggttccgtgataattggagaggctttgtgtctgtgccctgtgtatgcatactcaggctctcaaaatcagtgaccatttaagtggacagaccttagtacatgaaaacaaagtattcactccaggactttaggcaactctcaccagccaaaaaccattttcccagcccctacccaaaaagggccagacagtctggagacccttgtttttgtgtctctaatcaccagctcagacagtgccctctgggctgtttggatggcatatcccttttccctcccaggatcactctctcttttgttgcattgtgagaaaattatggctaggaatttgatctggagccagagtcagcttccgggtgtgatctcagcatccaagtgcgagctcagggtcctatgacgttgggcacatcaaactgaggagctttttgtctagctggctgtgacctcctccctccctccccatcccagcttcccggccacagaatagggagcagtacaaacaaggccctgagatttgggtttattcagctccacccaaaactaaaccaaggctatgacatgtcccatgggaccaaaccatacattgtggaccatgcacctttcccttcccccaaggatgctgctacctctggagtggtgggcagctgcccatatcaccttgggaggtagagagggatttgctgggtgctgggtctgtggcaatcagggctcaactatggctgcctcctcctcttcctctggatcaggaggcgcagggagcagggagatgtagacctcattgacctctgtgtccaaatgtcggccaccccgaggtgcttccaggtttaagatgccatcatgggagagagcagctcggactcgccaggggtcgacatcagcaggcaggacataggtgcggcagaactctcgggacacgaagccgtggcggtccaggcgctgggggtgccgggcagacacctccagcaggttatccacagtcctcacagtcacctcgtctggggtaaagtggctcacatccagaaatgcctggaacttgccctcactgagcctaagctcggaggcccctgccctgctgccctccccagctggggcggcccgaggccggacatagtagccatggtagagtgtgggggtcaggatctcttctggcaggaggcctaaagggcagagagaaggcaagaggcaggatgagggaggatgaggctggcacaggggcgaaatgggaaatctggagaggagggattgggaagagcaagaggggagtcaggaggagtagggaacgggagggaggccacactgtagctaggaggagaaggcagctcggaagaggggaaagagaacggaaaggaaagggaggaggaggaggagaaggaggaggagggggaggaggaggaggcaccaaacggcctgggtggatagaagggggacaaggaggcacacccaggccggcaaagagcaggtatcagcactgcaagcaccaagtgtgtcttgaggtcagcaggaatgggaaagatctctgcttggaggggatgaggggtagtctggggtggggggtggctggtcccaggagatcagttaagcccagagtggggtggaggccagcaacgttgggaggtcagcccagaatttcagggggtgggggtggggggcaagggggtggtgtctgtgccataccttctccgaagcgctgctcacccaggcggctcgggttggcaaattcgtactcggcggtggccgggtgggcatgtggcactgagcggcccgacatggctgcagatgcagcagaagccctggtccgaggtgcagccccaacaggcgcagcgcgacccctccagctgcccggagagccagggctcgataggaggtgggggcggggtcgacaccacccaaaatagtgccgagcctcttggggggggaggggctgggagtgggggccctgagtgagagcaacgagggtgtgaccagcgccgcccggacccctagtcccctcccccgcacactcttcagctgtcgcagggggcctgagaggacagctgagggtcctggctgggaacgagctggggagggggagctggtggtgcctggggcatgaagaggcctcgctgagaccctcacaaacggtttgcacgtttccacacctcattttctcctcttcggtggcaggcactgtgcacccaattcctaaagcactcctggatttaatgttctgagagccacatagaacgaaagatgcaagaaatctgtttgctcttttttcagggggtggggtctttctgcccagatgtgggatcctctcctaaacccaggtcaacccagggcacgaggcagatggctggtgctgacatgttgaccatcactgctctcttccaaggactcacaaagagttaatgtccctggggctcagcctaggaagattccagtccctgcccaggcccaagatagttgctggcctgattcccctggcattcaggactggaaaggaggaggaggggcacactacgccggctcccatcctccccccaccccgcgtgcctgcttgggattcctgactctgtaccagcttcagagaacaggggtgggggtgggtgccattgggtgtggacagaaagctagtgaaacaagaccatgacaagtcactggccggctcagacgtgtttgtgtctctcttttcttagctcagtgagtactgggtatgtgtcacattgccaaatcccggatcacaagtctccatgaactgctggtgagctaggataataaaacccctgacatcaccattccagaagcttcacaagactgcatatataaggggctggctgtagctgcagctgaaggagctgaccagccagctgacccctcacactcacctagccaccatggacatcgccatccaccacccctggatccgccgccccttctttcctttccactcccccagccgcctctttgaccagttcttcggagagcacctgttggagtctgatcttttcccgacgtctacttccctgagtcccttctaccttcggccaccctccttcctgcgggcacccagctggtttgacactggactctcagaggtgagtctccccacagctaggacgggagagtccttactggaacctcctggaaacttctccatccattttcctttcctaccctgcctaaaccattttaggcacatgtgtgtccaaatgtgaagaaaaatgaggaggttgctagtgccttcctcccccatcacctgtttctatttgatagtcctctgtatcccatttattacattttttcatgcactgtcaagtttatcctccgtcccctaacttctctacaggatacccctttctggtttggttcatgacaatctgcagggaaagagctgccttcaaactcctttgcttatctcttccaacaccttggactcttgaccgattttaccatctcaggtttcagagccaggagagagccctgcctcatcctgagctgttcatccccatgggtattttctgcctttctattccctcttctatgattttctgggtttctcagggctacgacagggcgctggcctgggtccaatcaagccctacgaggaaacaatatagggacgcccatttgtcctaagagggtggaagaacagggtgaacaaataaggttgacagagctgtcacagataacactctggtttaaaaatattcaagtgtgagtaaacaggagctgagtgggcaagggctttggaaggacaagcaggaccagcagaacattccagattgggtgggtggaaaactggcaaagagacctgagccagaagaagaggcctttgtctcacagacaaaccacaaagccaggcattggagtcagagaggcagca

SEQ ID NO: 914793 - DNA, 4001 bp, Homo sapiens
tgcctcggactcccaaagctctgggattacaggcatgagccaccacgcccagccttcagtttcagcttctaattaccatgaatatctgacacagcccatgaaaccggtgagaacacatctgcctcagcctgaggaaagatgtctgttttaaataaacaagacttgatggaccaaaggcattcacaccatgacctgaacacagacctgcgagaatcaagaacatttatttgcaagatggcttgttatttgaaatgttctttctatgaaacctgtggggccaaattctgtagctgtggtgtcttgagatcacactatgttaatttgttgcagttcacagataattccctttaaataaagaacagaatctccaagaaactcaggcttctgatatttagggggtcatgacaagacagaagtctggtatatcattcctataatcataaaagtgtaacttaggctgggcgcggtggctcacgcctgtaatcgcagcactttgggaggctgaagcgggagcatcatctgaggtcaagagttcgagaccagcctggccaacatggtgaaaccttgtctcgtctctactaaaaatacaaaagttagccaggagtggtgacgcacgcctgtagttccagttactcgggaggctgaggcagaagaatcgcttgaacctgaaaggcagaggttgcactgagccgagatcgtgccactgcactccagcctgggggacagagtgagactccgtctcagaaaaaaaaaaaaaaaaacctttaacttagagtgaagggaatatccgatttacagacacaagcctgggaagtcaggcagggcaaattcttgtaagtgaataatcccacctttcactgccatagacctatctcactctgcaaagcagtttcagaatccctgacaatattagtgtgaagtgcgcaggttgacaaaatcagcaaagtggctgagaaaattctcaaggtcaccagggctgcctctagaatacagcttgtatgaccctgaaaacagtgctcttctgtctcaccagcccccacccccattacaacccagacccagctttatagggttgcagatggagagaagggctttgcccaagaccacacaatgagcgggagggaggcacacctgggctacaatccaggagtcagacttctgggagggactctcacagaccaatcttggccaagttttgatggcctctcactacccccaccactggcagggcagtattcagcctttaggcatgaaatatgttcacctcgcagaatcctgggggtccatttgagtcccagctgaaatacccaccacatttttataagcttcctcgtcgaaggtgagcttcctccggccaatgagcgtgactttggaaaacaggccctgctccaggatttcctttaagagcactctgccggtttctccgctggcgcccaaaataaagacggatttattctgcatcctgaagtcttcccgaagcttcgacagggcttctgtttcggccatgctggggaaataacatcgacagatgccggtcttagggtgtcaggggactgccagtccttatcccgaggaacaagggctgtttatctgttagggaggaggatattgttctccgcagtccgggctctggggaaagtgctgagtcacgtgcggggcgcggctccccggccatcgcccgcacctgagccagcagacccatcggaaggggcccgagctggagggtgcgcccaggtgccacaagctgctggcatcactgggcataccccacggtatccccggcccggccaggagacctggcccagctcggtcccatacgcggaggggttacctggggccagcccccggccccgggtcctcacgacgcagcaggagcagggcggccgccagagcagccgccgccgccgcgctcagcgccgcaggcccggccatcagagcatcccaccttccctggtcggaccgggggggttggaggcgacggagacagcgcctacccggcttggtcttccgggtggcctcgcggcgacgctgcctcgccccgcccacaggggcgggacctggagacgaactcctggcaccctcacaggcgcggggaaggtgaccccgagagcacgtgcgcggagccgcgacccttcctaagtttggaatctgcaagaccctcttcccgcgttttccctcacctgctgggctcagctcacccaggcgccagctagtagacttgccagacttgatcttcaatggtccccccagctggaatgtcaattgtatattggccatcatctcaaattcaccaagtcaaaaacttaaccctgcctacccaaccaccccaaacaggaataaaacaaacctattcctagcctctcttgggtgtcactgtccctacataaacatacacacacacacgcacacacacacacacctccttctaccctgtcaagtcagaaatcaggattcctttgattcctttcttttctagcctttccacactacagacttatcaagtcctgttatcccatctgccttacaaatatttctcccatgtaattcaagctcgcatcatatctccccagaataaatggtctacctgcccaggtcctggcctaattcatcacctagatggttgaacccgggtgaccttccacacctgtgattcagtcttcctagcccagatcagtggtttgggacacaggtatctacactgggcctgtcctggatcttggaagtcctgaacagaggttagaatgacaagcagaaatctgaataatttcagattgttcaggttttgttgggaacattggtcatttgggggccccacctcccatctagaagccaatgaaacacattgcctcttccatctccatgggagttattatatgtaggctttgcctaggctcagcaagccagaggctcacgcataggttttcagttttggaggagtaatgaaaagatgcagtgaaggcctgagatatatgtgggttggttggggcaagggtataggattatggcatcatatgatccaccagccatctgatggtctgatcttgtcttaaattcctgcctgttttcagagactgttgtgaatacagtacttcctgttattcttctgataaattcctgtgctgtataagcttaccagatatattctgttgtttgcaataaaaaagcttgattaatatagagcagtgtggttcattccccactggcctgtcacagtgcctggactcttccctttgagttcctaaaggttttctacaagaatgcaatgttaaaccttgtcagcaaacactgtcctagtaattcatttatcaaatctgtcacagaaattattcattgtaccctgtctattcttcccctttgtttaaaattgtggcataattaatatacaataaaatgtacagaacctaaaggttctgttccatgattttaggagattgtatatacacctaaataaccaccaccaaaaacaagatatagagcatgtctgccatccctgaaagtgccttcattcccttcttgcaatctctccccactccagaggtaatcactttctggtcactatcaacatagattagttttgcctgttgtagaattctatttaagagtacagcatgtactcttttgtgtcccaggtttttggcttaacacatattttagtatttattcttgtttgtaggcctgcattatgatttctatgggccctaagcacttcatgagccccttcattttatgtacacacactatataatcaaaaattatgtcttatgactatgttgctataaagatgaatatgacaaactatttatataatcaaaaattatgtcttatgactatgttgctataaagatgaatatgacaatttctttcacctaaaacattttcttccacctaaaagtttattttcacaggccccagaactgtgcctactgtgccaaatgagtaaatcagccctggttgtttcatgtatcaggaattcattcctttttattgctgagtagccttcc

SEQ ID NO: 914794 - DNA, 4001 bp, Homo sapiens
ccacgcccagccttcagtttcagcttctaattaccatgaatatctgacacagcccatgaaaccggtgagaacacatctgcctcagcctgaggaaagatgtctgttttaaataaacaagacttgatggaccaaaggcattcacaccatgacctgaacacagacctgcgagaatcaagaacatttatttgcaagatggcttgttatttgaaatgttctttctatgaaacctgtggggccaaattctgtagctgtggtgtcttgagatcacactatgttaatttgttgcagttcacagataattccctttaaataaagaacagaatctccaagaaactcaggcttctgatatttagggggtcatgacaagacagaagtctggtatatcattcctataatcataaaagtgtaacttaggctgggcgcggtggctcacgcctgtaatcgcagcactttgggaggctgaagcgggagcatcatctgaggtcaagagttcgagaccagcctggccaacatggtgaaaccttgtctcgtctctactaaaaatacaaaagttagccaggagtggtgacgcacgcctgtagttccagttactcgggaggctgaggcagaagaatcgcttgaacctgaaaggcagaggttgcactgagccgagatcgtgccactgcactccagcctgggggacagagtgagactccgtctcagaaaaaaaaaaaaaaaaacctttaacttagagtgaagggaatatccgatttacagacacaagcctgggaagtcaggcagggcaaattcttgtaagtgaataatcccacctttcactgccatagacctatctcactctgcaaagcagtttcagaatccctgacaatattagtgtgaagtgcgcaggttgacaaaatcagcaaagtggctgagaaaattctcaaggtcaccagggctgcctctagaatacagcttgtatgaccctgaaaacagtgctcttctgtctcaccagcccccacccccattacaacccagacccagctttatagggttgcagatggagagaagggctttgcccaagaccacacaatgagcgggagggaggcacacctgggctacaatccaggagtcagacttctgggagggactctcacagaccaatcttggccaagttttgatggcctctcactacccccaccactggcagggcagtattcagcctttaggcatgaaatatgttcacctcgcagaatcctgggggtccatttgagtcccagctgaaatacccaccacatttttataagcttcctcgtcgaaggtgagcttcctccggccaatgagcgtgactttggaaaacaggccctgctccaggatttcctttaagagcactctgccggtttctccgctggcgcccaaaataaagacggatttattctgcatcctgaagtcttcccgaagcttcgacagggcttctgtttcggccatgctggggaaataacatcgacagatgccggtcttagggtgtcaggggactgccagtccttatcccgaggaacaagggctgtttatctgttagggaggaggatattgttctccgcagtccgggctctggggaaagtgctgagtcacgtgcggggcgcggctccccggccatcgcccgcacctgagccagcagacccatcggaaggggcccgagctggagggtgcgcccaggtgccacaagctgctggcatcactgggcataccccacggtatccccggcccggccaggagacctggcccagctcggtcccatacgcggaggggttacctggggccagcccccggccccgggtcctcacgacgcagcaggagcagggcggccgccagagcagccgccgccgccgcgctcagcgccgcaggcccggccatcagagcatcccaccttccctggtcggaccgggggggttggaggcgacggagacagcgcctacccggcttggtcttccgggtggcctcgcggcgacgctgcctcgccccgcccacaggggcgggacctggagacgaactcctggcaccctcacaggcgcggggaaggtgaccccgagagcacgtgcgcggagccgcgacccttcctaagtttggaatctgcaagaccctcttcccgcgttttccctcacctgctgggctcagctcacccaggcgccagctagtagacttgccagacttgatcttcaatggtccccccagctggaatgtcaattgtatattggccatcatctcaaattcaccaagtcaaaaacttaaccctgcctacccaaccaccccaaacaggaataaaacaaacctattcctagcctctcttgggtgtcactgtccctacataaacatacacacacacacgcacacacacacacacctccttctaccctgtcaagtcagaaatcaggattcctttgattcctttcttttctagcctttccacactacagacttatcaagtcctgttatcccatctgccttacaaatatttctcccatgtaattcaagctcgcatcatatctccccagaataaatggtctacctgcccaggtcctggcctaattcatcacctagatggttgaacccgggtgaccttccacacctgtgattcagtcttcctagcccagatcagtggtttgggacacaggtatctacactgggcctgtcctggatcttggaagtcctgaacagaggttagaatgacaagcagaaatctgaataatttcagattgttcaggttttgttgggaacattggtcatttgggggccccacctcccatctagaagccaatgaaacacattgcctcttccatctccatgggagttattatatgtaggctttgcctaggctcagcaagccagaggctcacgcataggttttcagttttggaggagtaatgaaaagatgcagtgaaggcctgagatatatgtgggttggttggggcaagggtataggattatggcatcatatgatccaccagccatctgatggtctgatcttgtcttaaattcctgcctgttttcagagactgttgtgaatacagtacttcctgttattcttctgataaattcctgtgctgtataagcttaccagatatattctgttgtttgcaataaaaaagcttgattaatatagagcagtgtggttcattccccactggcctgtcacagtgcctggactcttccctttgagttcctaaaggttttctacaagaatgcaatgttaaaccttgtcagcaaacactgtcctagtaattcatttatcaaatctgtcacagaaattattcattgtaccctgtctattcttcccctttgtttaaaattgtggcataattaatatacaataaaatgtacagaacctaaaggttctgttccatgattttaggagattgtatatacacctaaataaccaccaccaaaaacaagatatagagcatgtctgccatccctgaaagtgccttcattcccttcttgcaatctctccccactccagaggtaatcactttctggtcactatcaacatagattagttttgcctgttgtagaattctatttaagagtacagcatgtactcttttgtgtcccaggtttttggcttaacacatattttagtatttattcttgtttgtaggcctgcattatgatttctatgggccctaagcacttcatgagccccttcattttatgtacacacactatataatcaaaaattatgtcttatgactatgttgctataaagatgaatatgacaaactatttatataatcaaaaattatgtcttatgactatgttgctataaagatgaatatgacaatttctttcacctaaaacattttcttccacctaaaagtttattttcacaggccccagaactgtgcctactgtgccaaatgagtaaatcagccctggttgtttcatgtatcaggaattcattcctttttattgctgagtagccttccagtattccagtatgaatatcccacaacatgtttaaatattct

SEQ ID NO: 914795 - DNA, 4001 bp, Homo sapiens
ctgagattacaggcgtgcaccaccacgcccagctaatttctgtatttttagtagagacagggtttcaccatgttggccaggctggtctggaactcttgacctcaagagatcccctgcctcggactcccaaagctctgggattacaggcatgagccaccacgcccagccttcagtttcagcttctaattaccatgaatatctgacacagcccatgaaaccggtgagaacacatctgcctcagcctgaggaaagatgtctgttttaaataaacaagacttgatggaccaaaggcattcacaccatgacctgaacacagacctgcgagaatcaagaacatttatttgcaagatggcttgttatttgaaatgttctttctatgaaacctgtggggccaaattctgtagctgtggtgtcttgagatcacactatgttaatttgttgcagttcacagataattccctttaaataaagaacagaatctccaagaaactcaggcttctgatatttagggggtcatgacaagacagaagtctggtatatcattcctataatcataaaagtgtaacttaggctgggcgcggtggctcacgcctgtaatcgcagcactttgggaggctgaagcgggagcatcatctgaggtcaagagttcgagaccagcctggccaacatggtgaaaccttgtctcgtctctactaaaaatacaaaagttagccaggagtggtgacgcacgcctgtagttccagttactcgggaggctgaggcagaagaatcgcttgaacctgaaaggcagaggttgcactgagccgagatcgtgccactgcactccagcctgggggacagagtgagactccgtctcagaaaaaaaaaaaaaaaaacctttaacttagagtgaagggaatatccgatttacagacacaagcctgggaagtcaggcagggcaaattcttgtaagtgaataatcccacctttcactgccatagacctatctcactctgcaaagcagtttcagaatccctgacaatattagtgtgaagtgcgcaggttgacaaaatcagcaaagtggctgagaaaattctcaaggtcaccagggctgcctctagaatacagcttgtatgaccctgaaaacagtgctcttctgtctcaccagcccccacccccattacaacccagacccagctttatagggttgcagatggagagaagggctttgcccaagaccacacaatgagcgggagggaggcacacctgggctacaatccaggagtcagacttctgggagggactctcacagaccaatcttggccaagttttgatggcctctcactacccccaccactggcagggcagtattcagcctttaggcatgaaatatgttcacctcgcagaatcctgggggtccatttgagtcccagctgaaatacccaccacatttttataagcttcctcgtcgaaggtgagcttcctccggccaatgagcgtgactttggaaaacaggccctgctccaggatttcctttaagagcactctgccggtttctccgctggcgcccaaaataaagacggatttattctgcatcctgaagtcttcccgaagcttcgacagggcttctgtttcggccatgctggggaaataacatcgacagatgccggtcttagggtgtcaggggactgccagtccttatcccgaggaacaagggctgtttatctgttagggaggaggatattgttctccgcagtccgggctctggggaaagtgctgagtcacgtgcggggcgcggctccccggccatcgcccgcacctgagccagcagacccatcggaaggggcccgagctggagggtgcgcccaggtgccacaagctgctggcatcactgggcataccccacggtatccccggcccggccaggagacctggcccagctcggtcccatacgcggaggggttacctggggccagcccccggccccgggtcctcacgacgcagcaggagcagggcggccgccagagcagccgccgccgccgcgctcagcgccgcaggcccggccatcagagcatcccaccttccctggtcggaccgggggggttggaggcgacggagacagcgcctacccggcttggtcttccgggtggcctcgcggcgacgctgcctcgccccgcccacaggggcgggacctggagacgaactcctggcaccctcacaggcgcggggaaggtgaccccgagagcacgtgcgcggagccgcgacccttcctaagtttggaatctgcaagaccctcttcccgcgttttccctcacctgctgggctcagctcacccaggcgccagctagtagacttgccagacttgatcttcaatggtccccccagctggaatgtcaattgtatattggccatcatctcaaattcaccaagtcaaaaacttaaccctgcctacccaaccaccccaaacaggaataaaacaaacctattcctagcctctcttgggtgtcactgtccctacataaacatacacacacacacgcacacacacacacacctccttctaccctgtcaagtcagaaatcaggattcctttgattcctttcttttctagcctttccacactacagacttatcaagtcctgttatcccatctgccttacaaatatttctcccatgtaattcaagctcgcatcatatctccccagaataaatggtctacctgcccaggtcctggcctaattcatcacctagatggttgaacccgggtgaccttccacacctgtgattcagtcttcctagcccagatcagtggtttgggacacaggtatctacactgggcctgtcctggatcttggaagtcctgaacagaggttagaatgacaagcagaaatctgaataatttcagattgttcaggttttgttgggaacattggtcatttgggggccccacctcccatctagaagccaatgaaacacattgcctcttccatctccatgggagttattatatgtaggctttgcctaggctcagcaagccagaggctcacgcataggttttcagttttggaggagtaatgaaaagatgcagtgaaggcctgagatatatgtgggttggttggggcaagggtataggattatggcatcatatgatccaccagccatctgatggtctgatcttgtcttaaattcctgcctgttttcagagactgttgtgaatacagtacttcctgttattcttctgataaattcctgtgctgtataagcttaccagatatattctgttgtttgcaataaaaaagcttgattaatatagagcagtgtggttcattccccactggcctgtcacagtgcctggactcttccctttgagttcctaaaggttttctacaagaatgcaatgttaaaccttgtcagcaaacactgtcctagtaattcatttatcaaatctgtcacagaaattattcattgtaccctgtctattcttcccctttgtttaaaattgtggcataattaatatacaataaaatgtacagaacctaaaggttctgttccatgattttaggagattgtatatacacctaaataaccaccaccaaaaacaagatatagagcatgtctgccatccctgaaagtgccttcattcccttcttgcaatctctccccactccagaggtaatcactttctggtcactatcaacatagattagttttgcctgttgtagaattctatttaagagtacagcatgtactcttttgtgtcccaggtttttggcttaacacatattttagtatttattcttgtttgtaggcctgcattatgatttctatgggccctaagcacttcatgagccccttcattttatgtacacacactatataatcaaaaattatgtcttatgactatgttgctataaagatgaatatgacaaactatttatataatcaaaaattatgtcttatgactatgttgctataaagatgaatatgacaatttctttcacctaaaacattttcttccacct

SEQ ID NO: 914796 - DNA, 4001 bp, Homo sapiens
cgacagagtgagactccatctcaaaaaaaaaaaaaaaaaaaagaaaagaaaagaaaagaaaaagaaaaatagggtttcacaaagtacctagtcaaacagatgtgccaccaaaactcgacactcaaaacacagatttcaatttgtttcttttctttttttttttttttttttgagacagagtctcgctctgtcacccaggctggagtgcagtggcacaatttctgctcactgcaacctccatctcctgggttcaagtgattctcgcacctccgcctcctgagtagctgagattacaggcgtgcaccaccacgcccagctaatttctgtatttttagtagagacagggtttcaccatgttggccaggctggtctggaactcttgacctcaagagatcccctgcctcggactcccaaagctctgggattacaggcatgagccaccacgcccagccttcagtttcagcttctaattaccatgaatatctgacacagcccatgaaaccggtgagaacacatctgcctcagcctgaggaaagatgtctgttttaaataaacaagacttgatggaccaaaggcattcacaccatgacctgaacacagacctgcgagaatcaagaacatttatttgcaagatggcttgttatttgaaatgttctttctatgaaacctgtggggccaaattctgtagctgtggtgtcttgagatcacactatgttaatttgttgcagttcacagataattccctttaaataaagaacagaatctccaagaaactcaggcttctgatatttagggggtcatgacaagacagaagtctggtatatcattcctataatcataaaagtgtaacttaggctgggcgcggtggctcacgcctgtaatcgcagcactttgggaggctgaagcgggagcatcatctgaggtcaagagttcgagaccagcctggccaacatggtgaaaccttgtctcgtctctactaaaaatacaaaagttagccaggagtggtgacgcacgcctgtagttccagttactcgggaggctgaggcagaagaatcgcttgaacctgaaaggcagaggttgcactgagccgagatcgtgccactgcactccagcctgggggacagagtgagactccgtctcagaaaaaaaaaaaaaaaaacctttaacttagagtgaagggaatatccgatttacagacacaagcctgggaagtcaggcagggcaaattcttgtaagtgaataatcccacctttcactgccatagacctatctcactctgcaaagcagtttcagaatccctgacaatattagtgtgaagtgcgcaggttgacaaaatcagcaaagtggctgagaaaattctcaaggtcaccagggctgcctctagaatacagcttgtatgaccctgaaaacagtgctcttctgtctcaccagcccccacccccattacaacccagacccagctttatagggttgcagatggagagaagggctttgcccaagaccacacaatgagcgggagggaggcacacctgggctacaatccaggagtcagacttctgggagggactctcacagaccaatcttggccaagttttgatggcctctcactacccccaccactggcagggcagtattcagcctttaggcatgaaatatgttcacctcgcagaatcctgggggtccatttgagtcccagctgaaatacccaccacatttttataagcttcctcgtcgaaggtgagcttcctccggccaatgagcgtgactttggaaaacaggccctgctccaggatttcctttaagagcactctgccggtttctccgctggcgcccaaaataaagacggatttattctgcatcctgaagtcttcccgaagcttcgacagggcttctgtttcggccatgctggggaaataacatcgacagatgccggtcttagggtgtcaggggactgccagtccttatcccgaggaacaagggctgtttatctgttagggaggaggatattgttctccgcagtccgggctctggggaaagtgctgagtcacgtgcggggcgcggctccccggccatcgcccgcacctgagccagcagacccatcggaaggggcccgagctggagggtgcgcccaggtgccacaagctgctggcatcactgggcataccccacggtatccccggcccggccaggagacctggcccagctcggtcccatacgcggaggggttacctggggccagcccccggccccgggtcctcacgacgcagcaggagcagggcggccgccagagcagccgccgccgccgcgctcagcgccgcaggcccggccatcagagcatcccaccttccctggtcggaccgggggggttggaggcgacggagacagcgcctacccggcttggtcttccgggtggcctcgcggcgacgctgcctcgccccgcccacaggggcgggacctggagacgaactcctggcaccctcacaggcgcggggaaggtgaccccgagagcacgtgcgcggagccgcgacccttcctaagtttggaatctgcaagaccctcttcccgcgttttccctcacctgctgggctcagctcacccaggcgccagctagtagacttgccagacttgatcttcaatggtccccccagctggaatgtcaattgtatattggccatcatctcaaattcaccaagtcaaaaacttaaccctgcctacccaaccaccccaaacaggaataaaacaaacctattcctagcctctcttgggtgtcactgtccctacataaacatacacacacacacgcacacacacacacacctccttctaccctgtcaagtcagaaatcaggattcctttgattcctttcttttctagcctttccacactacagacttatcaagtcctgttatcccatctgccttacaaatatttctcccatgtaattcaagctcgcatcatatctccccagaataaatggtctacctgcccaggtcctggcctaattcatcacctagatggttgaacccgggtgaccttccacacctgtgattcagtcttcctagcccagatcagtggtttgggacacaggtatctacactgggcctgtcctggatcttggaagtcctgaacagaggttagaatgacaagcagaaatctgaataatttcagattgttcaggttttgttgggaacattggtcatttgggggccccacctcccatctagaagccaatgaaacacattgcctcttccatctccatgggagttattatatgtaggctttgcctaggctcagcaagccagaggctcacgcataggttttcagttttggaggagtaatgaaaagatgcagtgaaggcctgagatatatgtgggttggttggggcaagggtataggattatggcatcatatgatccaccagccatctgatggtctgatcttgtcttaaattcctgcctgttttcagagactgttgtgaatacagtacttcctgttattcttctgataaattcctgtgctgtataagcttaccagatatattctgttgtttgcaataaaaaagcttgattaatatagagcagtgtggttcattccccactggcctgtcacagtgcctggactcttccctttgagttcctaaaggttttctacaagaatgcaatgttaaaccttgtcagcaaacactgtcctagtaattcatttatcaaatctgtcacagaaattattcattgtaccctgtctattcttcccctttgtttaaaattgtggcataattaatatacaataaaatgtacagaacctaaaggttctgttccatgattttaggagattgtatatacacctaaataaccaccaccaaaaacaagatatagagcatgtctgccatccctgaaagtgccttcattcccttcttgcaatctctccccactccagaggtaatcactttctggtcactatcaacatagattagttttgcctgttgtagaattctatttaagagt

SEQ ID NO: 914797 - DNA, 4001 bp, Homo sapiens
gtttcagcttctaattaccatgaatatctgacacagcccatgaaaccggtgagaacacatctgcctcagcctgaggaaagatgtctgttttaaataaacaagacttgatggaccaaaggcattcacaccatgacctgaacacagacctgcgagaatcaagaacatttatttgcaagatggcttgttatttgaaatgttctttctatgaaacctgtggggccaaattctgtagctgtggtgtcttgagatcacactatgttaatttgttgcagttcacagataattccctttaaataaagaacagaatctccaagaaactcaggcttctgatatttagggggtcatgacaagacagaagtctggtatatcattcctataatcataaaagtgtaacttaggctgggcgcggtggctcacgcctgtaatcgcagcactttgggaggctgaagcgggagcatcatctgaggtcaagagttcgagaccagcctggccaacatggtgaaaccttgtctcgtctctactaaaaatacaaaagttagccaggagtggtgacgcacgcctgtagttccagttactcgggaggctgaggcagaagaatcgcttgaacctgaaaggcagaggttgcactgagccgagatcgtgccactgcactccagcctgggggacagagtgagactccgtctcagaaaaaaaaaaaaaaaaacctttaacttagagtgaagggaatatccgatttacagacacaagcctgggaagtcaggcagggcaaattcttgtaagtgaataatcccacctttcactgccatagacctatctcactctgcaaagcagtttcagaatccctgacaatattagtgtgaagtgcgcaggttgacaaaatcagcaaagtggctgagaaaattctcaaggtcaccagggctgcctctagaatacagcttgtatgaccctgaaaacagtgctcttctgtctcaccagcccccacccccattacaacccagacccagctttatagggttgcagatggagagaagggctttgcccaagaccacacaatgagcgggagggaggcacacctgggctacaatccaggagtcagacttctgggagggactctcacagaccaatcttggccaagttttgatggcctctcactacccccaccactggcagggcagtattcagcctttaggcatgaaatatgttcacctcgcagaatcctgggggtccatttgagtcccagctgaaatacccaccacatttttataagcttcctcgtcgaaggtgagcttcctccggccaatgagcgtgactttggaaaacaggccctgctccaggatttcctttaagagcactctgccggtttctccgctggcgcccaaaataaagacggatttattctgcatcctgaagtcttcccgaagcttcgacagggcttctgtttcggccatgctggggaaataacatcgacagatgccggtcttagggtgtcaggggactgccagtccttatcccgaggaacaagggctgtttatctgttagggaggaggatattgttctccgcagtccgggctctggggaaagtgctgagtcacgtgcggggcgcggctccccggccatcgcccgcacctgagccagcagacccatcggaaggggcccgagctggagggtgcgcccaggtgccacaagctgctggcatcactgggcataccccacggtatccccggcccggccaggagacctggcccagctcggtcccatacgcggaggggttacctggggccagcccccggccccgggtcctcacgacgcagcaggagcagggcggccgccagagcagccgccgccgccgcgctcagcgccgcaggcccggccatcagagcatcccaccttccctggtcggaccgggggggttggaggcgacggagacagcgcctacccggcttggtcttccgggtggcctcgcggcgacgctgcctcgccccgcccacaggggcgggacctggagacgaactcctggcaccctcacaggcgcggggaaggtgaccccgagagcacgtgcgcggagccgcgacccttcctaagtttggaatctgcaagaccctcttcccgcgttttccctcacctgctgggctcagctcacccaggcgccagctagtagacttgccagacttgatcttcaatggtccccccagctggaatgtcaattgtatattggccatcatctcaaattcaccaagtcaaaaacttaaccctgcctacccaaccaccccaaacaggaataaaacaaacctattcctagcctctcttgggtgtcactgtccctacataaacatacacacacacacgcacacacacacacacctccttctaccctgtcaagtcagaaatcaggattcctttgattcctttcttttctagcctttccacactacagacttatcaagtcctgttatcccatctgccttacaaatatttctcccatgtaattcaagctcgcatcatatctccccagaataaatggtctacctgcccaggtcctggcctaattcatcacctagatggttgaacccgggtgaccttccacacctgtgattcagtcttcctagcccagatcagtggtttgggacacaggtatctacactgggcctgtcctggatcttggaagtcctgaacagaggttagaatgacaagcagaaatctgaataatttcagattgttcaggttttgttgggaacattggtcatttgggggccccacctcccatctagaagccaatgaaacacattgcctcttccatctccatgggagttattatatgtaggctttgcctaggctcagcaagccagaggctcacgcataggttttcagttttggaggagtaatgaaaagatgcagtgaaggcctgagatatatgtgggttggttggggcaagggtataggattatggcatcatatgatccaccagccatctgatggtctgatcttgtcttaaattcctgcctgttttcagagactgttgtgaatacagtacttcctgttattcttctgataaattcctgtgctgtataagcttaccagatatattctgttgtttgcaataaaaaagcttgattaatatagagcagtgtggttcattccccactggcctgtcacagtgcctggactcttccctttgagttcctaaaggttttctacaagaatgcaatgttaaaccttgtcagcaaacactgtcctagtaattcatttatcaaatctgtcacagaaattattcattgtaccctgtctattcttcccctttgtttaaaattgtggcataattaatatacaataaaatgtacagaacctaaaggttctgttccatgattttaggagattgtatatacacctaaataaccaccaccaaaaacaagatatagagcatgtctgccatccctgaaagtgccttcattcccttcttgcaatctctccccactccagaggtaatcactttctggtcactatcaacatagattagttttgcctgttgtagaattctatttaagagtacagcatgtactcttttgtgtcccaggtttttggcttaacacatattttagtatttattcttgtttgtaggcctgcattatgatttctatgggccctaagcacttcatgagccccttcattttatgtacacacactatataatcaaaaattatgtcttatgactatgttgctataaagatgaatatgacaaactatttatataatcaaaaattatgtcttatgactatgttgctataaagatgaatatgacaatttctttcacctaaaacattttcttccacctaaaagtttattttcacaggccccagaactgtgcctactgtgccaaatgagtaaatcagccctggttgtttcatgtatcaggaattcattcctttttattgctgagtagccttccagtattccagtatgaatatcccacaacatgtttaaatattctcctgttgatggacatt

SEQ ID NO: 914798 - DNA, 4001 bp, Homo sapiens
gtggttggggcgaggtgtggagggagtgagaagaaatcaaacgacttccggggtaggtggcctatggggacaaaccagtaatgagacagcccagctcctggaccctggtgctgttctatgaagatttcatgcacagctcagttttcacactggaagcagcaggagcacttccagaagggtggcctgacatgcaaaagtgaaaattcatgggacggtgaagggagtacaacctagagggccagcatacgggcagcaaaggggagatggagctggcaggtagccagggtctttcactaaccaggtgctggcaaggcctggcttttgctaaacaagactgtgtcttctctcatctagtgtgcaacctgtacaacaaatcactcctgcagattccccctcctttcacccccttttccctgataagctactggcttccctcagaaggacagagaagagcagagagaacacacacacacacacacacacacacacacacacacacacacaaactattttttaagtgtctcctttggaataacatcaataaacatattcttcatttaactttagaacagtccaccagagtggctatttgcacacaaggatccccaagcaccagaaaggtgagcaccttgctctgcaagtggaggaactgagattcaaacgcagacccgtgtgcgtctttactacaccagcaagagcctgggtcctattgactgggatcctgaccagcttggagagcactgaactcatcccagcaggcccggggcaaaggaccattgctaggagggacagagtttcttctcagtcaaggaagccctcgaccacagtcatcacttacagcttgcgtttgcttaacccacggagcactcccaaacgaccgctcccgggaggaaggacatcttacccagagctcttcacgtctgtccaacccctggatggcttcctctaattgtgccccagtatgctccaccccagctctgtagggagagaaacctcctagaggggaatgaacatggtctgcagcaaaaggaagccggtccctttgtggctaaaacaccctacattcaagggagtcaggagaagatgggtgtagcgaatgtggagagaaattgggcgttactggagtttagtcctggaaaggaacttggggaaccgcaggcccagagaacgaactcatgcaacaaaaccagtgaagctgaggaaagaggactagactagttctggtccccactctgctgctaacaagctgtgtgaccttgaatgaattatccgctccccactctctgggccacagcattcccatttataacaggcaagggtggacccaatgagttctaaggtcccttgcagctttcattcaaatagtttagggaaaggacaaaaaggagaggagccccctcctggtgcctgtctttttatttctgatacgccaggctacttctctgctcccttctttgcaagctccgctcttgccccaccccaggactcaacattcctaactctctctagcttaaccatgatgcctcaaatgctgtcatgctcataggtggtaagatagctgaccttcctgcagctgcactgttccccaccctcctctccacagccctcggaggactgaagcatcccctgccccacctcagcagatggtcagccaagtcctgctgcttcccgaagtctgcttaccttctccctgtgccaggagtgtggggaggagcaaggcgagcagcgcctgctggacccacagcagcatagcgagctttccaagcataggagtgcctccgagtgctcaggacgaggcccaccaagggccagcttgcctgccctctgccaacctcatgtcccagccagcctgcctctcgtggccactgctcacaccttctgaggctgcagcctcacactccctgggccaccaaggttggggagctgccaagttttcctgcaatcagtccttcagctggatcatgtttcaggcgggaggaaaggggaggggacagctgagaggggagcccgccctagctgatgtcatgctgtgggagctcagtccacccattcagccagggggcttggccatgtttccccaaggagtaacttaggtggggacaggggctgcagaagcccatgagacaagggtgcagcctgacccctgggaggtgcaccacgctgctgctttcattgatgtcccttggcaagtatgtttctgtggcactgggctggggcaggatagggtgagtcaggcaggagcaggaagaccattcttttactccccagggtgacataaccaagcaggtgactgggcacctctgtagttacgggaagggtaactggagtcaccacaggtctgcccttttgtcctcatctaattagttatacttaaatagtaaaatatatattaaaaataataaaatatataataaaaataaacttttactatacatatttatttcatgcattcttgccatacataataaatacatatagtaaaaataataataatacatgcactttgtagaaaaatatgaagaaaaattaaaatcatctgtaaacttatgactcagagacagccactcttaacgttttggtatatattcttccataattttcttcagtaatgtgtatacaatgaagtaaatatcacatacatataattttgtgccctctttttttgcttgatatcatttcgtaagcatttcttttcttttctttctttctttttttttttttttttgagacagagtctcgctctgtcacccaggctagagtgcagtggcgcaatcactgctcactgcagccccaacctcccccatctcagctgatcctcccatctcagcctcttgaagagctgggactacaaatgcgagccatgcctggctaatttttgtatttttggtagtcccccaaagggactagaggcatgagcaatcacacctggcctcggaagcattttcaataccttcctcttaaatggaagcgtctttcttgaaagaagtgtttctttcttcattgcaagttaaatagacaagtatctatccctcaggcctcagctgtgtacccctaaagttgcctgcaagaagaattactgtgcatttttatttgaaggagtcctaccctagctcaccatttgggtagatgtccccgtaccaatcaagttaagtatcaacaacaaaacattttcttcctttttaatttattttccacttgactctaagtgtggaataggctaggaaccctgcagtaaggaggaattttctgaattgtaggtaagttaaaaagaaagaaaaaaagaaagaaactaccttggtcagggctgcatcctttcagttcttattcctgtgcattatgaaatctgcataaagcattataccattcaccattggggtcctttcctgtggccgttagcggggtgtggttctgcaacgtgcagtcaagttcagggagcctgggctactcttctcttaagtcatgtgcttcatcactgcacaatccagaaaaacatggacaattagctccaagcatttccctcaggggaatggatatgagggcagtgaatagaaagagggccccaaacttttagagaatttatagagccagacctccccagaattccagaatgaatgtcctcagacctgaggtttgacagcaggataaagcaaggcaagaagaaccaggctgcctcctaggccaccaggctgaggtcttgaatggggcccaagcagaacactatagattcctaaatgcatcttcaagcccaacaaagattcttttttcttttttttttttttttgaaacaggatctcactccatcacccaggctagagtgcagtagcatgatcacagctcactgcaacctcaatctccctggcttaggtgatccctccacctcagcctcccaagtagctgagactacaggggcatgctatcatgcctggctaatttttgtatttttagtagagacagggttttgccatgttgcccaggctggtctcaaattcctgggctcaagc

SEQ ID NO: 914799 - DNA, 4001 bp, Homo sapiens
cagaagccagagggggtttggagggtttctcctccactatctttaagcctacttccactctcagacctgagatgaggagattccacactcctggatctcaggctgagggtgcccctcagcctctccgctcaccttccctcgccaaggccactgaaactcccgaattcccgactccttcccaggaggatgggtaacgggggcagggaggggcgggtctgctcacctgccggtaccagatgtaggtggtcagcacctgattcttctcatcctgggaaaggaaagggagcttgaacaagtaaccctgtggactggagggccaccctgcacatgccagcccctaaaggaggggcttccttgtgtccctattgctttgggaagtgaaagtgaagagcaggggccggggtcgggaaagtagatagactggagctccctggccagacaggaaaagttagttgttcactagagcatacgcagaaagaagtaaaaatgattcattttttaatttattttgagacagtcttgcttgctctgttgcccaggctgcagtgcagtggcacaatctcagctcattgcaacctccacctcccaggttccagcgattctcatacctcagcctcctgagttgctgggactacaggtgtgtgccaccatgcccgactaatttttgcatttttagtagaaatgcagtcgctatgttgtccaggctggtcttgaactcctggcctcaagtggtctgcccacctcggcttcccaaagtgctgggattacaggtgtgagccactgtgctctgccaacagtgatttatgtttcaacttctaatatacatataatgccgggagcagtgtcttacgtctgtaaccccagcaatttgggaagcttaggcaggtggatggcttgaggccaggtgttcgagacctgcctggccaatatggaaaaaccctgtctctactaaaaatacaaaaattagtcaggagggctgactaattttggtagagtaattttactagactaaaattagtagccactgtgaagttgggtcctgcttacctgaccccaacacagagccactgcatctctgcaattgcctccttgtttatctctgcacaatgtctgaccacctcttctgagtagtgcaccccaccctactgtggtagttgatgaaggaattgaggaataattgatctgttggctgattcttcaacaatcatttagtgacacctgccaggtaccagggatgtgtgtaaggcactgggagcatagagatgcatgggaccgtcttaatcctcatacagctgacatagagagatggttatcattatgcagtgtatgaagaaccacatgtgggaagtgaccccctcactgtatgggtgtgggagcagcagccacaaggtgaccccaggtttctggtttgggcagctgtgcagatgatgctacaatccatcctgagctgtggtgccagaccgtaggtcctatgggttctcaaatgcctaacaagctgcatagggggtgacttgtctcacatggccttctcccacccccaaaaggtctgcctgtgtgcagctcggggctgagcctcaccacgttgaggatggcatagacaatgacgtcaatggatacggtggttggcttcctccagtccctcacggggcgcacacccttcctgtagttggtcaaaaggtaatccgacagcctcagcagagcgggcctggtggtgtttcggctcctcctggctgggaaggagaacagttcaaagtagacaccagccccccaagacttcccccggttctcttgtcctggtttgtaagctgttaaaagagacgtatccccaccatccccacctcacaaaattctaaacacagactgacattctcaccactagagcattttgtctgcagagatttctaccataattcaaatgtattaccttgtagaaaggacctatgcattcattgacaggaaagcagagatctggcttggaagagcaagtggcacaagacagctgagattcaaatcaggttgagggctaagaaggtcggagcaggtggcccacggggcctaagcgagggcctctggggagcaacaaggaagctggctctcagggtatgatactaaaagcaagagggttgcaagaaagcatgaccccaagtgcacaatttctaagcccaagggtctgcatcagggttttcctcagccaaggtcaaacctcagcatctgcacacaacatctcctttttgagtatgaaacaggtaaagaaagaaggaagtgtgggcatctggtgaaaactgacatttcctctacatcctgcaaaagccaccccaagaggatcctcgcaccctgccccaggcacacacaagctatgggtggagggctggcccagtccacctcctagggttgctgtatgggcaaacatgatgggcttagataggtggttggggcgaggtgtggagggagtgagaagaaatcaaacgacttccggggtaggtggcctatggggacaaaccagtaatgagacagcccagctcctggaccctggtgctgttctatgaagatttcatgcacagctcagttttcacactggaagcagcaggagcacttccagaagggtggcctgacatgcaaaagtgaaaattcatgggacggtgaagggagtacaacctagagggccagcatacgggcagcaaaggggagatggagctggcaggtagccagggtctttcactaaccaggtgctggcaaggcctggcttttgctaaacaagactgtgtcttctctcatctagtgtgcaacctgtacaacaaatcactcctgcagattccccctcctttcacccccttttccctgataagctactggcttccctcagaaggacagagaagagcagagagaacacacacacacacacacacacacacacacacacacacacacaaactattttttaagtgtctcctttggaataacatcaataaacatattcttcatttaactttagaacagtccaccagagtggctatttgcacacaaggatccccaagcaccagaaaggtgagcaccttgctctgcaagtggaggaactgagattcaaacgcagacccgtgtgcgtctttactacaccagcaagagcctgggtcctattgactgggatcctgaccagcttggagagcactgaactcatcccagcaggcccggggcaaaggaccattgctaggagggacagagtttcttctcagtcaaggaagccctcgaccacagtcatcacttacagcttgcgtttgcttaacccacggagcactcccaaacgaccgctcccgggaggaaggacatcttacccagagctcttcacgtctgtccaacccctggatggcttcctctaattgtgccccagtatgctccaccccagctctgtagggagagaaacctcctagaggggaatgaacatggtctgcagcaaaaggaagccggtccctttgtggctaaaacaccctacattcaagggagtcaggagaagatgggtgtagcgaatgtggagagaaattgggcgttactggagtttagtcctggaaaggaacttggggaaccgcaggcccagagaacgaactcatgcaacaaaaccagtgaagctgaggaaagaggactagactagttctggtccccactctgctgctaacaagctgtgtgaccttgaatgaattatccgctccccactctctgggccacagcattcccatttataacaggcaagggtggacccaatgagttctaaggtcccttgcagctttcattcaaatagtttagggaaaggacaaaaaggagaggagccccctcctggtgcctgtctttttatttctgatacgccaggctacttctctgctcccttctttgcaagctccgctcttgccccaccccaggactcaacattcctaactctctctagcttaaccatgatgcctcaaatgctgtcatgctcataggtggtaagatagctgaccttcctgcagctg

SEQ ID NO: 914800 - DNA, 4001 bp, Homo sapiens
gcactattcctgcagatgagggactattggcatagtgagcttagcactgcccaaggtcatgaagcttgcaagtgaagggagtgatatttacacacagctggtctggattcgaagtccaagctcttaatcatgacgctacatgattaagtgtaacctggctccctgagaatatcaggaacaacagcaagtaacctttcaaaaagaagactgacatgttgtatggagtatattattggacagaaatagccagtggtattttctgcatgtgttttcaggttaataatatcttacatttgcatttcaccttacaatttaacaatgctgtcttatctgattgtcatgaatatccaaaataaagttagcttacaggaaaactgagtctctaagagattaattgacttcccagggttacgtggctggtgagtggtgaagcaggaattagctggctctccttgttcaggcctccttctataccagcacactgccccctgggattggttccgtgctcttacacttaacaaatcatcttgatttgtaaatatagtaaaatacgtaaagtaaacatagtaaaacccagtacaattccacagggcaggtctttctgcaacaagtatccacggaatgatttatggtaaagcactggttatcagacactattaaaacacttctttctgctacatttagaacaaaaatcatgcataatacaaaacattagagagatattgttaagaacttagtctgttttcttaccttcatttttctattttatcttagtttaatgttcacgattattttctactaagaaacccatttggcatttaatgacacttcctctgtttttattttttacaattaagatatgcttttatcctttatgttcaacatccaggatttttatactttaatgataagtggctatttttcttctctacccaataaaaaaatcatttccagcttcctggctaccaaatttctaactcatctctataattgactcattccacttccagttacatcctaaaacttgagaattcagatatgagctctaggagaaacctcaagaaagtggggtgttgagaacaccagcataatcataaattcttgatttgtgcgcatgtactaagaatcaattgtatcctaactaaaatgattcaattcagtagagttaatactggtgccatggaaatatagttctagaaatttagaaaaaaaagtattaacttctaaattacttttaagaggaattgtagactcaaaacttaccagtttatagtacctgtctttagagatatactcatcacctatatagattttgtaaggcgagatgttaaggcctctaataccaaaatgatatacatatatctgtagccatgacaaatctagtggactttttctctgggctgctaacagctgataatgaagccaagactattttggataataaaaacatattatccacacataaaagcaaatttgaaaaagaatgccccaaactctcaatcaacctgcagagagcttgatttctagagaagcagagatttatcaagcaattataacatttcagagcatattttcagctatgtgtaaaaagccccacagtctgatgctatatgtatacgtatttgcaatcataggagccaagtcacaaacaaatcattgttttccatatagcttcacaggactggcattttacagacgatgaataaaaacaaacatgcctgagaagtcctacagtacggtgtatacaaatattgtctctatcttctaagagttaatccttaatgcctagtaaaattattaaaaggactcacctgcagccaccaggatgcaggcccacaggggagccattacacttgacaacattcctgggcagatcccaaaaaggagaaatgcaaacttgcctaccagatggaatgccgctcaatttctcctaacagggttcctctccactctgttctcctccttctccgtttgccagttgatgctatccttactggtgctattttgtaaacactcagtgggaccaaaggcaataccagcaccatgcaaatgttttggaattgatgccgtcatgaaatcccttaacttctccctttggttctgccccaagatcagaccgtggccaacatttccattttcctgacaggagatagctaagtgaataatgtaatctaagaggagcccctaaggagaggaaattccacactaatatgatttcctttacagcctttacctaaggcagtactcttgctgacattcaggacactaatttcattaataattgaaatccaaatagctgttctaaatcagacttatgcagtaacatcttcagcatttgacagtggttcttgggctcttgaattacacaaggctaatggaaacctggtattgtctaatgaagaacaactgcaaacaatgcaatggaaaagtgctttttgtttttcctaagcccttttaattaaaagaaacattgacttttgataaataggagggcttctcaaattttcactgctcacaattcagaaagtaaccttctagaaaggatgcttctaggcttattgaagatgaaaacaaagttcaacatcatttaataaaagtttttttttcactttttgattgaatacgcattcatttttcattactaaggaacatgatgcataattctatacaataacactattttccatttctagacacccccagatgctctagaaagaaaaaacaaataccatttccaacatctgcctgcttttttattaaaaatgagattatagaggcaaattttgatataaattttcacagagccaaccgaaggggggaaagtatatatttgattcctattctcctaatcactcagtccctttgtttagaatccatgaagttctacacctaattttcatctaccaataaaatgtagcctaattgctttcttactgttggtgaagggagtggtatacacagaaagagagaaaactaagataaccatttggtgttgacttggttttggaggtatcagtgtgaacccatggttttcagtacatttgctaaatatataaataattgcaaataagctgggcgtggtggctcaagcctgtaatcccagcactttgggaggccgaggccagtggatcacttgaggttaggagtttgagaccagcctgaccaacatggtgagccccatctctactgaaactacaaaaattagtcaggcgtggtggcacatgcctgtaatcccagctactcgggaggctgaggcaggggaattgtttgaatcaggaggtggaggttgccatgaaccaagatcgcgccactgcactccagcctgggagacagagggagactccgcctcaaaaaaaaaaaaaaaaaaagaaaagaaaagaaataaatacaaatgtaatgtgtgtttgcacatgttcatacatgcatatattccctagctctgtccacttagcagcctaggagaatgacaccccaatagtaacaagcacacctagcttccatagctcttccggtatagtcttgccaaaaattcataacttgaatctattcaggaggaaacaccagatgagacagtggcatactgtgggacaaacaaaacagcaggcatcttcaaaagtgccaaggtgggccaggtgcaatggctcatacctgtaatcccagtactttgggaggttgaagtaagaggactgcttgagcccaggaatttgagaccagcctaagctacataaggataccctgtctccacacaaaaaaataaaagattagtttaatgtggtggtgcactcctgtagtcccagctacttgggaggctgaggcaggaggatcacttgagctcaggagatagagtctgcagtgagctgtgattgtgccactgcactccagcctgggcaatagaggtagaccctgtctcaaaaacaaaaacacacacacacaaaagtgccaaggttataaaagttaaggaaagactgaggaacctatcagactaaagagacacaagcaca

SEQ ID NO: 914801 - DNA, 4001 bp, Homo sapiens
aaggaaatcacataaatataaggtatatattatgaatatatctgaagtaaacctaaatgtgaacagtgtttgatggttatctgtgactgatgaaatttcgagtattttctttcttctttacacgtactaaatgttgctcggattgctaaaaacatgtacatactatgtttgcattcttgtccgatttatgtccttggaataaactcctggaattggattatgacttagaagttatggtactacttgaattctgatttatgtttttcttttctcttttttttttttttttttgagacaagagtcttgctcggtcgcccaggctggagtgcagtggcgcgatctcggctcactgcaacctctccctcccgggttcaagagattctcctgtctcggcctcccgaggagctgggactacaggcgcccgccaccaagcccggccaatttttgtatttttagtagagacggggtttcaccgtattggtcgggctggtctcgaactcctgacctcacgtgatccgcccacctcggcctcccaaagtgctggggtaacaggcgtgagccaccgcgcccggcctgaattctgatttataatgccaaactgccctctagaaaaacagattatccccagcacacaggccataaaggtgcttgctttcatttcttcactctctcagcagcatggggtactgaaaaatcttaccaatctaaaaagatatcttaatgtttttctttgcctgcttagtgagattgtatactgtttagaataaaaaagatttatttccatttcggggtggacaaacaccttggacggttccatgctgcagtccacaaaaggtgcagctagaaggcgacaagacacgctccgcctttcaacggcaaagctcgcagtcgccccgcctggccgtgggcgtggcttggacccaggtcgctagcggccttcgggactcccctccagccctggggccgtccccggcctccgcctggtcccaggggcgcggcccaggagctcagaaaggccaccggggcaaagaccgcggcggcggccagcgcacaccgtgacctccaggggctgcggcccgccgcgcacatcgcctgtagctcacgctgccccggccgcctccctcaggaacgcagacgttggggacggctcgccaggcaggacctggaatccacggagggaagctgccactctgcaccgtcccgacggtgggaaaaggagcgagggctcccgccgcagtgggccggcagccaccaggtccccgcgtccctccgcttccggccttcgcccggcttacccgcgtcgcggaagtccgctctctgcaccgcgtcctgccagtcgccagcagagcaccgcagattctgttagctttcgcgtaacttgcgcaggcgcactgccggcccacgcgccgagcctgcggttaaccgccgaccgctgaggtttaaatccggagagcgaaccggcacccttggcccggtccgccctccctcttattggtcctgagggtaaacgtcctccaagtctgtatcctgattggcgcacattttgtctgggccttctccgccggcgggagcatgcccgggatttccaatgtggccttaaaaatatccgagcccgcctagctgaggcgcgcaggcagcagccgttgctgcgacgcctctggtgtactaaatctggaggggaggttgggccctcgaagagaaggagaagaccctcaaaccttggctaacggcgacatagctggctttttggagaggccgcctaacggtctgccacttcattggaatcagcctccgcccttctcaactggctgctgcggggccagtggtgccgggagacgagggcgggcgctcagggacggttcgaacagtctggggtgagtccgcctgtgcgctctagacgtttccttggggcctgagagagcggctgtatgaaaccctggcgcactgagctcttcctttcctctgcatggtgtgcagggccctggcgtgacccgtggctgcgtctccacagctcctcccacgttactctaactgtgctccagccaccgactgccttgctccgacatgcacttgttttcttttggaatgtgcctgtctccttcacatggtgttactctcaacttttttttttttttttttttgagacggagtttccctcttgttgcccagttgcccaggctggagagtagtggcgcgatctcagctctctgtaacctctgcctcccaggttcaagcgattctcctgcctcagcctcccgagcagctgggattacgggcgagcaccaccatgcccggctaattttgtatttttagtagagatggggtttcaccatgttagtcaggtgattctaccccctcggcctcccaaagctctgggattacagttgtgagcctctgtgcccagccactaattttttttttaaacccgatgttttaactctttttgcatctgtacctgtaaaaaaaaaaaaaaaaaaaaaaaaaaaaatctagtgcttggggattgctgaggatgagatctgtaaaagcaagaggagaggccctcagggttcaatatcctagtcaataccaagcaaacctatctcaactggtcttgagtcctgagcattgcattttccaccttaaacaaataggtgctagttgtcaagttcatcttacaccatttcttaaatccaggattcagtgggaggggagaaatgtttaatccttttcctccaaacacttcgtattatctcttactctccctctttgcctcagggcctttgtgctacctctaaggcactttgaatttgtgggaggaagaaaatggaaagaacaaaggagggaagatgacagaagtaggttgtggagatttgagtgactgcccctacatctgcaatatcataacactcctttagtgcagcggtcccaacctttttggcactagagacaggtttcatggaagacaatttttccatggctcagagagggggtatggttttgggatgattcaagcgcattacatttattgtgcactttatttctattattatattgtaacatataatgaaataattatgcaactcactgtaatgtagaatcagtgggagccctgagcttgtttttctgcaactagatggtcccatctgggggtgatgggagacagtgacagatcatcaggcattagattctcataaggagcatgcaacctagatccctggcttgcgcagttcacaatagggttcacgctcttgtgagactctaacacccctgttcatgcgacggaaggcagagctcaggcagtaatgccagatggggagtggctgtagaaacagatgaagctcctacggcttaccccctgccttgcggcctggttcctaggtgcctgtccgtggcctgggggttggggacctttgttttagtgcatatattcttttctttccataggagcaaatttaatatgctcaggttttatcttatgccagcatgactttttctttggctttgaatctccaatctgtcttagaaaccaaagagtagatggaatcatttttcttccagctttgaacatcagcattctccttatggatcccccagttcgtttctttttcttttttttttaattttttttgagacagagtctctctctgtagcccaggctggggtgcagtggcacgatcttggctcactgcaacctccacctcccaggttcaaatgattttcatgcctcagtctcctgagtagctgggactacaggcgtgtgccaccacacccagctaatttttgtatttttagtagagacagggtttcatcatattggccaggctagtcttgaactctgacctcaagcgatccgccagcctccacctcccaaagtgctgggatttccagcgtgagccactgtgtgcagccccaattagtttctgttatcctttttattaaattttgatctttgaaaacgtttaatacatagcagcttgaaggatctactcctgaatatttcatattgcaagtggtatctt

SEQ ID NO: 914802 - DNA, 4001 bp, Homo sapiens
ggttttatcttatgccagcatgactttttctttggctttgaatctccaatctgtcttagaaaccaaagagtagatggaatcatttttcttccagctttgaacatcagcattctccttatggatcccccagttcgtttctttttcttttttttttaattttttttgagacagagtctctctctgtagcccaggctggggtgcagtggcacgatcttggctcactgcaacctccacctcccaggttcaaatgattttcatgcctcagtctcctgagtagctgggactacaggcgtgtgccaccacacccagctaatttttgtatttttagtagagacagggtttcatcatattggccaggctagtcttgaactctgacctcaagcgatccgccagcctccacctcccaaagtgctgggatttccagcgtgagccactgtgtgcagccccaattagtttctgttatcctttttattaaattttgatctttgaaaacgtttaatacatagcagcttgaaggatctactcctgaatatttcatattgcaagtggtatcttgtgttctacccaaccctggtttttttgtggattgcttagtcctccaatttttcttagatctgatttaataatgcttgtggttcccagaaatctactgaaccccggtcaaaccttaaacaagaaactttaaccatgaccacttaaaatacagtatatagagaaaaatcctactctgcaaaccaaatctcatcttaaaaatttgttatggaaaatttcaaacaaatgttaaaaaaccatacataatgaagcccagtgaactcaataccagattcagcaatgattaacttatgaccagtcttgttgcttctatatcaccacataccttgtcttgtattattttgaagcaaatactgagtatctgaaatctaaatatttcagtatgatctctgaaaaattaaaggaccttttaaaagcataacataatactatttttgtttgtttgtttgtttttgagacggagtctcactctttcacccaggccggactgcagtggcgctatctcagctcactgcaagctccacctcccgggttcatgctattctcctgcctcagcctccggagtagctgggactacaggcacccgccaccgcacccggctaattttttgtatttttagtagagacagggtttcaccatgttagccaggatggtctcgatctcctgaccttgtgacccgcccacctcggcctcccaaagtgctgggactacaggcacccgccaccgcgcccggccaacataatactattatcacacctaaagtagttaatatattttcttactatcatcagatatccagagttcaattttctacttgtctttctttttttaaagtttgcttaactgggtcaggatccagtcaaatccacatgatatgtcaaatccatatgttctttaagtttcttttattctttaaatttctccctcatttttttccttgcaatttatttgttgaaggaaccaggttattggccctgtacaatctcccacaatctggattttgctgattacatctaagcagtgtagttgaatatggcttccttaccttttgattgcaacacagctctcttccttatgctttccccaattaggtgttgttggtttatcaactcatcaacttctttatgaactcaaatattgctttcaactggttgtatcatcatgcttgttaaccactcttttttttttgagacagagtctcgctcttgtcgcccaggctggagtgcagtggcacgatctcgactcactgcagcctccgcctcccgggttcaagtgactctcctgcctcagcctcctgagtagctggtattacaggcgcgtgccaccatgcccagctaattttggtatttttaatagagacagggtttcgccatgttggccaggctgatcttgaactcctaacctcaggtgatctgcccgccttggcctccctcccaaaatgtgaggattacaggcgtgagccaccacgcccggccaagttaaccactcctttatgatatctttgcttacctcacctctttgttgacattttcagacaaacttttcaactatagtcctcccttgtctgactaattacatcctgtcgctaatattttcaattcttctctgtttaagtcttctcagtattggaggcagaacaataatggcataaagaataacaaaatgaaaataaccagctttcccttgagactgctgctcccttctgtcagcctttttgtccattctctcttccctattttgtttgctcagttgctccttaagtccctgcattctggattctaccctcatcagtatattcaaactgtactttcaaaggtcaccagtgatcttggtagtcagctccaatcgtcttgctcagccctcattcttttttacttcttaaaagtatttgataaaaaggcggggcgcattggctcacgcctgtaatcccagcactttggaaggctgaggtgggcggatcatgaggtcaggagatcgagaccatcctggctaacacggtgaaaccccgtctctactaaaactacaaaaaattagccaggcatggtggccagcacctgtagtcccacctactcgggaggctgaggcagtagaatggcgtgaacctgggaggtggagcttgcagtgagccgaggagatggcgccactgcggtccagcctgggcgacagagcaagactctgtctccaaaaaaaaataaataaataaaataataaataaaaaatttaaaaaagtatttgataatcaattctgcaaatatttaatgaacacctgttgtaagtgctgtgctatgtcttcgtgatttgatagtgaataaaaagacacaatttctgcccttatggagcttttggtctgataggagaaattgacattgatgaaacaatcacaaattacagttgtccctcagtataatctgggtattggtttcagggcccctgcatataccaaaaatccatgcatacttaagtcctaaagttagacctacagaacccacttatatgaaaaggttggccctctgtatacccaggtttcatatctctcaaatactgcattttccattgccttttgttgaaaaaaattcacgtataagtgaacctgtgaagttcaaacttgtgttgttcaagaggcaactgtattataaaattacagttgtgttcaatgctaaggaaaggcaaatggttcaatgagaacatttaataatagggagatttggcatagtgtcactgaaccaagaattgaaggataagtaggtgaaaggacgtggagggaagtgaagagggtgaaaggagtttgctaggtagtgggaaaagcatactcaaaggtctataagaatggaagagtcaagaaacagaaagaccagcaaagaaaataatggtagagatgagactgagagataggcaggggtcaaatcatgcaggtcctgtaggccaaggcaagagatttgataagagctatagaaactgaagtgttttaagcagggttggggcatggctaattagtcagataagggctacatattcagttttgcatttgaaattatctgttggcagcactgaggagaatggatttgaagaggagaagattgtatgtgaagtccaagtgggagatagttggattattccaggtggaagactgtggtggtttaggctaggaggataatagccagagatttcaagaaggggatagagatagttagttgctagaactcatgatgacttgaaatggattgactggggttgggatgtgaaagagaggcaggtcatggattattcataggattcctgtttgtgcagctggattctgttttctgagatagggaatacaggaagaaaactgttttgagaggcagagttagattttgggcatgtagaatttgagataccctggggacttccaggtggagataaaagtaggtagaatataagctcatattatggtatcatattatctaggc

SEQ ID NO: 914803 - DNA, 4001 bp, Homo sapiens
gcgggcctggtaaagagctacatgggggttatctgcctgcttccccaggaggtgctggaagtaacgtagcgtagcctttggattcttaatcgcctgaggggtgaagaaggagcagactagtattaggctcccaagtccaccattacctacctcttacatcacagagactgataaggaaacagactctgggggctgccatctcctctcctctgcccaccactctgggaagagggactgctagctcaccatgcttgctgcactgtctccaaagaatctttcattttctttcagggtcacgatcaccggtgttttcctccgagattccctgaggaaaagagattttgggcccaggtgcctgcagcagaaggactcagaagcctcgacactcacacacatttaaccactcagatgccgaagtctgctgtgggcactatgactaacacattcacacttggagcccagactccctcgttccccacccttaacacgggggccaccctcacttattcaagacaatttccatgggcactccaggtttgacaatggccaccttcatggactcactgcccaggtccacagacatcactgccagtgtatctgaagggaaaagaggtttgtcagttagctctcccttcgcccaccttcctgggactccctctaatcaaagcataccactttccatgggtaaacgaagatggcaaaagacaaaaaggcctggacctaacaactcaagagacttctggccaacagccccaagctcaattcccatcatgcatccttcagtcatcatttatccatttgctccctctactggggtacataccactcagtgccaacaggtctgccaagagcacagccaccaaggcccaacagactcgcctcctcggcctctgcctcctaactttgtctgccatagtgcccctgggggaggcgaagaaagaaaacacttaaaactggatacccggagtgaaggagacagaatcacatcccagaacggagaggctgtaagattcatatctacttcattcttacccagggcagatcagcctacttctccccttctccctcctgatgggtacaaaccattctctaatcatcccagcagcgcccacacaaaggcccaagtgaaagagcatgggtcctcggctttgccacatccctaaacagagaagctaacaggacaagagaaaggagacccgagccttttgtccaccacacaggcagtgagtggcgcaccgcagcactgtgcctgttgtcagacacctggggtgcggccagggatccccgcccagggctcaaccacctccccacacctggagctcccccgctgacggggaaagccagctgggcctggacgggaagagaaaggtaatgacgttgggggtagctaggatgaaggaaaggcctatctcctcctcggcatccctgcgggttgtcccgccccctcccctttcccagctcactccccggccccgctgtgcccacagacgcagtgccaggggcggtaaggttccccgcccggcgggtagccgttacccggtgttcacctaaaccccacctgacgaaggcggcggctcccactcccggaaacggatcccggcccgccccagcaagtggggacagaccgggggccgagctgcgtgccccccggtgcgaggccgagcgcccggcgtccgcgcggccctcccttgcgctcccgacccgcccccggagctcgcacgctgtctcccctaggaggggtggccggcccgcacctccatccacccccgctacctcttgcctccgctcctgcggccccagctctgggacagacgcggcacgaacgtacccacgaggccggcagcgccccccacccgcgcccttcacaactcctctcggtttgcaaactgttacattagccaccaacctctcggcggcgtctcgcgcaccagccggccccggacgcggcgcgcgctcattggagcctcggccgcccggccctgcgctgcgcgcccggccccgcccccgccgccccggcgcgcgtactcattggaccacgtcccaggccccgccccctccctttgccagccttgtaatggggcggcggaggggaccagccaccggttgggcagaagcagccggcgtcggcctgggattggaccacgtcacggggccagcgcgctccactccttcctccccagcgccggccccggggcgaccgcgggaccttttccggcgctggatgctttgctgccggggttcgggagtgacctgcgcctagagcaggtcgggcgcactgcagtcccgcactcggggctcttcttccggtcacctgtagagcccggccgaggaatggaataacaggcgtcctgtccgcagccccgcggagggggcgctggcctgccggttagtattgaggtgccctaggctttggatagacgttggagaatggctgtccctcggactgagtccgtcgcaaccccctctgttttactgaggaaactgaagccacagaaaaagatgtttgctgatgggtcagagataaccgatgcattcgtcgcagaatctggccaggatttcttaggttaagccccactcatttgtataagaaagaatattccaaacttaagtactacacacaaaagacacttttatttgtgaggctatagttggttgagcttgtgtgcaccttctcctatttctgttctattaaatcttgtgaacatttctctactctttagctgtttctgtcatagaatgacagaagcacctcactgccttctcttttaacttacagctccatagaaatgtgcgcagtcgcccgggcgcggtggctcacgcctgtaatcccagcattttgggaggccaaggcgggcgaatcactggaggtcaggagttcgagaccagcctggccaacatggtgaaaccccgtctctaccaaaactacaaaaattagccaggcgtggtggcgggtgcctgtaatcccagctactcacgaggctgaggcaggagaattgcttgaatccgggaggcagaggttgctgtgagcccagactgcgccactgcactccagcctgggcgacaacagcgagactccttctcgaaaaagaaatgtacgcagtccttggagactgcattttccttaagtgtggatggaaataagtcatctgttttctctcctactaagttgatgcctggccacccttcacagaaaggcccgcttgaagaccctggctgtcagggccagggttgtgtcaagcctgaacttgtttaaggagctcttagctcttcctttctctacatttttcgtgatgcttaggtggagagtggtccggtgtctatgcttagaaggaaaaattattggcagtcccagagagagtctattcttccttttttttttttttttttttttattgatcattcttgggtgtttctggcagagggggatttggcagggtcataggacaatagtggagggaaggtcagcagataaacaagtgaacaaaggtctctggctttcctaggcagaggaccctgcggccttccgcagtgtttgtgtccctgggtacttgagattagggagtggtgatgactcctaacgagcatgctgccttcaagcatctgtttaacaaagcacatcttgcaccgcccttaatccatttaaccctgagtggacacagcacatgtttcagagagcacagggttgggggtaaggtcatagatcaacagcatcccaaggcagaagaatttttcttagtacagaacaaaatgaagtctcccatgtctacttctttccacacagacacagcaacaatccgatctctatcttttccccacctttcccccttttctattccacaaaaccaccattgtcatcatggcccgttctcaatgagctgttgggtacacctcctagacggggtggtggccgggcagaggggctcctcacctcccagaaggggcggccgggcagaggcgccccccacctcccggacggggcggcggccgggcggaggcgcccc

SEQ ID NO: 914804 - DNA, 4001 bp, Homo sapiens
tggggaccgggatctggccgcgctgctgggccgtggcgagctggcgttcggcgcccgggacccacgacgcgccctgcgtctccgacttcgtgatgcctcggacttcccgtcacatttcaagactgcgggatcccggggccctcgctggctgcaccagaggggtctccacctggcgggaccctcttcccgagctcccgcggggctcccggtcggaagctgccctcccaggccctcgcgagcgccccaccctcgggccattggctgcccccaccccaggggagcagggaagatgccggctggactggaggaggcagctgctaggatccagcacacctggatcacccaggagaggctgcagccctgaggttccttcagctgctaccctaggaacaaagcccctgcccctcccacagggcctaaggtgcacacatctgcaagaccagctgcccagccagctcagaggcaggttgtcctggcccaaaggtattctggacagtgtgtccttaccttggtgtcagagaaatgcccaccccacgttcctggtccagatgctgcccacagcaggaggcggaaaccagcagattctgagcatatccctgctcccctgagagcttcacagaggagggatacggctgtgcaggggctgagcactgggctgtctcaggactaggccgggacccctcagcagggcccccactccagatgaagtcacagcatcatcacaagcacgtgcactttattgaatgacactgtagacaggtgtgtgggtataaactgctgtatctaggggcaggaccaagggggcaggggcaacagccccagcgtgcagggccagcattgcacagtggagtgcaaaggttgcaggctatgggcggctactagtaaccccgtttttcctgtattatctgtaacataatatggtagactgtcacagagccgaataccagtaacaggatgaatccaatggtcatgaggatgcccagaatcagggcccagatgttcaggcacttggcggtggaggcataggcctgggccccggtcacgtcgccaaccatcttcctgtccctagactgggggagaggagatggtgaggggaccaggatcccccagctgagagccgcgtgctatggctccgtctcctccccgccctgagatcagggaccacctcctccccttcctcacccgggctcagactctccaggagcctcggggctcatcctccttctgccttggccccagcacaggctgttctccccaccatggggtgaagtcacctgtgagttcccttctcactttctgggagagcctgggtgccagtctggaaggtgagggtgtaatttcttactgggctatagggagaattgctctgggctaatggatagccagggacagactctgagccagccagccagcctcctggagcctcctcctagacctgcactgggcagattccccaaagccacacacacacacagatcacacagacaaagctactgacgtgagcacacacggggcagaggtgcacacaaactcacagtcacagggacacacaagtccccaccccaggcagcatgtgggcaggtggagccccaggctcaccggcaccccctggatttccgccagggccatacgcaccttcacggagtaggcgaatgctatgaagcccagacagcaccagttcaagaagagggtgttgaacagggaccagacgacatggtcgggcacggaggtctcgctgtggatgttgatcacggtggaccttggaaggatggtgctggggggtggccccagcacagccacctcatgttcctccttgtgcatcttctggctttggggaaggaagtgttgagtgaaggtttgagaagtgtggttttctgcgtggagcgaagggccgctgtggtgtccggatgctgggacggtgctcagtgagacctcctttcccctgtcgtttcagtttctcagaagtgtgtatttctcttaagtttctatttcctgctgtttgtaaattggtgaattagccagggaccaatgaggtgtggtttaacttcttgaggatcaaattactttatggcagggtgggaggaaaggctgaaggctaaggagagaggcttcctcatcagaaactcaagtcaggactagtgacttcctaagtgttgggtttagggggccctggggattttacccaggcttgggttctgtccaccccaggccagcaagtacaggacctcactgtcccggttcagggcccctgccaggcccccacactccaggcgccaggacaatcccccaaaagccctcacctcacttgtcgcaggcctctctcctgaaatccttgctctttcctcaggctgcagtcctgctctgtgcgggtttggggactaaacctcccagtgtctcctggtgcaggtcagaggcctggtggccaaagtttcctgccccaaagcagccctccaggcccaggaacggggactctggggagaactgactccccagagggtagtgtgttgagacacggggaggattccagggcctgtaggggcagcttcagagcacagggcacacatgtgccaccccctaccttccgggtcccagcaattcccatggctttggttggggtgagtgctggatgacctaggcgttgggtcctagccatgcaggagagacctggagggttggcaaagccaagtctggggctgtcaggcctgggtgccccttcacagggacggggaattgtagactgagtagcagaagggagccctcaggcacaaggatcatgaattacaaattgcaaattacataaaggaaaaatcagagcccaaaggtgggcctgcaattattaatgtaatgttcttaagttctctttctgctttcgtttctgcctgctttaagtctgctgttacttttctacagagataaaatccactgtttgcatccaaccatttctttttattgtttgtgtaaaccaatgaatttgtattactatctcatggctggagttctgaagtaaaaccatacttttgcttgagtgtgtatgtgtgtatatgtgcacatacacatatttcgttatgtgtttttggccacaagttaccaaatttagcttaaacttaaagagtactcataaattaaataataagcctaaatgcttttcacgttcatgtgacttaagtagaatctttaataagctagctttaaaattactggtaacgttagaaattgtagcaggacgagccacagacaaaaccctcagacatcgagttgaggaaagaaagggctttatttggcctttattcggccaggagcatcagcagacttaacatctcaaacaccgagctccaaaaccatcagcccctccctacccattgcagctaaaaaaaaaaaaaaagaactagcccttgcccttgcttggagtccctgctgggcctccccaaatcgcacaccaacccccccaccctccacccacccctcaacaggccgcctccagccccagccacatcccaggccacttagaccaaactatgtctgggtcccggcaagccaggggtggatgtggatggagcgtgctctgagacatcgaggactgcctacacaaactcctcacaaggctctgtgacctcctatcaaaggccacacatcactgcggagtggggtggggcttgaatttcccgtggaaggtattttggaagcttctttaaatcacgggcagtttaggaaggaagaaactgcagggcacaagagggagacaggattctgaggggcaggcatggaactgaaaccacctttgcaaaagtcataactgagaatatgatgacagtgaaggaggtctgaccctaacccactccgcctggcttctaacctccaagctgcccttgctcatccctgggcttagcctaaactaatctggagagaaacagtttatagatcaaggctgaacaagcccccttcctacctgaggaccagactgcctttgcaggactaacaaattagccacaagattagaaatt

SEQ ID NO: 914805 - DNA, 4001 bp, Homo sapiens
cgggctccaccgcgggctgcaccgcgggctctccagaccccggggcgcacccgcgggcgcgctcagagccattgacgagtaaacaactccccacacaaggcgatgcaggctcagccacgagcaccaagaaccggcacaggtgcggggtctccaactcgtgcgcaccgccccccacctccaacctggggaccccaagcgcgcacacttgcccggagccacgcacccccgggccatacatagacgcacaataacaggctgtgaaatgaacacttctccaacgaggcaccaagtcgctcgcgctctgcgccaccccgcgttcccagctcccgtgcggcgctcgccggggggtctgcggccgaggctctgcagcccccagccccatccgggtctgccgcagccccccggacggcgcctcctcacctacaagcgactcctcggcgcgcggccggaccccctgagcctcggtgcgcgcgtccttccgccgtcccgcgggccgctgtctgtccactgatccgcctcccagcggcccaaccttgagggggtggggagcgcgcggggctcggcggcggcgccgctgcctcccccgccgcctgcgctccctccgcagcgccagaccggccgcgcggctgcagcccagagcctgactcacggcggcagcgggcacagccacctccccgcctccgcctcctcctgccaggagggtgggggcctcggaagccgcgaccctggggagttgcaaggtcccgcagggatgggacccctacagcccccgaccagggtgtccgcgccacctccatctccccggacccactgcgtcttcctccccaccccacccggccccatccctctcgcggagcccccagccccgtggaagactggacgctcccggaaccctccccatctgcctccccaagagagaccctcttcctcttcccactctccccatggcgctccaccccagcgcctgggccctgctgcctccagggacccccgcccctgggtcctgcccttctggcctgttgactctcagttccagcagctcagtcccctcctgacgaagctccagtcccctgagccccagcaggccccctacctgactgcccgtctctgccccatcctgtccctaaccaagtccacaaggcccccaagaccaccctccagtcccttccctccttagcccaccaagtccaggccttccggtaagtttcagcaccccctactctgttccttcctggctgagcccactcctgcccatcggagctcctgccccctttcctggagtctgacttcacccagccggggccccactccagttcactcccagagtctgggagaatgtggcctctcctgcgcagaccccaggtcatgctccatctgctcgcagggcaaagtgtcccgttccgagctctggtcctgtgctgaggtcctggctgctaaggacacttgtctccctggaggctggtttactcacctgcccacagcctctctgtgatccctaccagcccttctgagcctggtcccctgaggatactttgttccctgtgaatcatttttcctgaccaatgcctgtcctcccagcctcagccgcctccgctaccccaccacatcctcactctcacggtatgcttgacgccagctgatcttccatccccataacagtccccatgagttcctccccatggagaaaactccagccttccctccctccctccaagtcccccacttcaccacgcaggttccctgagctgggtcctcttcaccaacctccagctcccactgagcctcgaccctctccaaagtcccccggaagctgaggatgcatggcggcccccgttttccctccctcatctctctccaagccccatcctcccatgaaactcctttctcctctgccactctcaactggcctcctgtgtctccgcaaccctctttcctgtctggaaggccagtcctgcttggggtcctgtctgcctgcctgtgcctgactctgaaccctttctctccccaaacctctgttctgaaccctaatcccctggaaaagcccagccctctgcaagcccctcctctttccagcctagtccccgcccctcatgcctgggctgacccgggcacagtgttatccacagcacgccaggaacccacagcacaaggctgatcttaaatgatgttgataaaccctaacgagcaggaggggtcatgaagcatgaggagcctcctcctcgtctccttgggcaccctggccatgctctccctggagcccacaggccgtgggtggatggggcctgtcggagaaccagggttccgttctccctccccaactccctcctcctttccaagggcctggcccagggaaaactggacccggtgtcctcagacggggcctgatcccaggctgagtgtggcctgtgtgccatgcccccatgtctccccagcatctgagctgggcttacccggccagccaccaccttctgggagaccctggcctgccacacagcctctgcccagtgctgccccaccccagtttgccctgaaggcctcaggcagtgaggaggcctccatagcaggagagggttgcctgggcccgagggtccagggcctgcccagggtcactgggtaggtgacaggggagccagggcctgctcccggcctcaggccaccttggggctgcctctgaggccaggaaacaccactgagagggagccaggggtcgcagggcagagccagggccgagccaaacttggcacagccagcattcatgtgactgttggtgggctccccaagggcctgggctccagcttcccctttgctaggggtttctggttacaacccacagtctagacagggggggactccaggctcagggtccagtcaccagctagaaaaccacggaggaacccggggtcagactccagggccccgagaatcctgccgggctggagggagccctcggagcaaccccagggcagcagccatgaagatgggagctggacggagctgacaagctgcagaaggagggagatggggagagtgggacagggcagggacaacagggtatggctgcctccttgtacctctctgccctcccaggcctcagtgcacaaagcatctgatgacaggacatttgtctccccagaagccctgccaggccctgcagagttctgcccagctctgctcagatttcaggcatgccaaacgccaggcatgtgtttccaagcctccgtgccaccctgggtaaatgttcttgctccaggtgtctgccgtagcatggctctggggtgaaagccctgcagccccttgggaggaaggccaaggcagccaccaccctcaggcagaggcatcaagataatggcaaatgtcacatctgcctcatcttctaacctgttggggtggggctcgagggggctctaagtgactccagagctactgatcccaaaaggaactctgctcccaccaccacatgcccacaaactcctacttacctattagaaccccaggggctgctaccactgcatccgggcacacgctcccaacccctcccctcccagcggaacaagcgcaccgcgttatcagcccggggatccgtgactgtggcagctgtggctggaggggacttctgagtccaatccctgcaaccagggaccctgggcaggcttgcttggtgccagctcagctcactgcacacaaaaccgcttctagggcctgggaggcaagaaggcccagctaggccagcccccccacgccacctggggccatttatttcccgggacaagagggctgaggagggtgactggtaggcctgctctgagggtccccgagagcagaaatagcctctgttcgagtgccgtggctgcctggctgggccacctccctgaaatcactcctcaaggctggcactcacactagacaccctgaaaccccagccaaggccacatcctgccggctactgctccagacctgggaacaagtcagtccccgctggccgaccaggctggagcccatgg

SEQ ID NO: 914806 - DNA, 4001 bp, Homo sapiens
acactcatttcctgcatcaggacttacttcggtcctggatgaagagtactgaagatacatgcctaaaatattcctaacaccaggatttgtgcatgtgtttccttccccaagaaagctataaacagcaaaaattctgctgtaagcttccctgtgtcctctctccctctcttccttccccctcccctaaaactaaaaggaatgttaaaagaccctttttctgtgaccagcggaccttatctatgctcccaattccaattccttgtgaacatactttgtaaagtcctgtaaaatcctgtctcttttgccatgctgctgcaaggtcataaagtagataaaattagataaaacctaagttgcaattctgtttttcctcaaaatctaagacatgtcacaaaataatttactgcctttgtttctctctctggtaacatcttcccaccacatgtatttcccgccttaaagagattaaaaggcaatcacccaaaaccaacagtggctaccctctccggaccccttccatgctgtgtaagctttgtactgtcactctgctcaataaaacctacagtttttttcttctcttggtctgtgtctccatcactcgccgcgggcagccgccacacccaattctttggtgtggctaaggcaagaacgtttggcattacatttaatctcagaaccagcaggaccgctccccaggtgaagtcacagcagcaccagaaacatatacactttattgaatgccattgtagaaaagcgtgtgaggataaagggctgatgcaggactcggctgtggggacagggcgaggaatggaaggtggagtaagtggaatacaggtcaagggcagagctcctggcctctgggggcagggcgaggaatggaagatagagtacgtgggatacaggtcacgggcagagctcctggcctcaatgatgcctcctgatctatcgctgggcctggacgaccaacactgggatgatgatgagcagaatggtcatgaagatgcccaaaatcagggcccagatgttcaggcacttggcggtggaggcataggcctgggccccggtcacgtcgccaaccatcttcctgtccctagactgggggagaggagatggtgaggggaccaggatcccccagctgagagccgcgtgctatggctccagctcctcactgtctcctccctgccctgagatcagggaccacctcctccccttcctcacccggctcagactctccaggagcctcggggctcatcctccttctgccttggccccagcacaggctgttctccccaccatggggtgaagtcacctgtgagttcccttctcactttctgggagagcctgggtgccagtctggaaggtgaaggtgtaatttcttactgggctatagggagaactgctctgggctagtggatagccggggacagactctgagccagccagccagcctcctggagcctcctcctagacctgcactgggcagattccccaagccacacacacacacagatcacacagacaaagccactgacgtgggcacacacaggacagacgtgcacacaaactcacagtcacagggacacacaagtccccaccccaggcagcatgtgggcaggtggagccccaggctcaccggcaccccctggatttccgccagggccatacgcaccttcacggagtacgcgaatgctatgaagcccaggcagcaggtgttcatgaagagggtgttgaacagggaccagaccacatggtcaggcacggaggtctcgctgcggatgtggatcacggtggacatcgggggagcagggttgtggggcacccccagcatagccacttcctgctcctccttgagcatctcgtagttgggaggctggccgctgttgacaggagagaaggtttgcacaatgtggttcatggtgaccagcggtgatcgggttaccgggatggttctcagtgagccctccctttccccagtagttccgttttctcaacagtttcctcttcctggcatttgtcaaatgcagagctggccagggccagataagggcagaacaaattcctgaggatcaaattactttaggagagggaggaaagaggggctgagggctaagaggggcttcctctctagagcccaaaggagcacaagtctcatcttgttagtggtgtggggtcctggagacttcccctgtgttgggagtctccacaccccaggccagcagctgcaggacctcactgtcccggttcagggctcctgccaggcctgcgctgacgcctccacactccaggccccacaaccgtttccccaaagccctcacctctgccgggcgccgtggctcacgcctgtaatcccagcactttgggaggctgaggtgggaggatcatgaggtcaggagatcgagaccatcctggctaacacggtgaaaccccgtctctactaaatatacaaaaaaaaattagccgggtgtgatggcgggcacctgtagtcccagctacttgggaggctgaggtaggagaatggcgtgaaccggggaggcggagcttgcagtgagccaaggttgtgccactgcactccagcctgggcaacagagccagactccgtctcaaaaaaaaaaaaaagccctcatctcacttgtcacaggcctcatctgctgacatcccttgtcctttgctggggttgcagtcctgctccatgcgggtttgggggttaaaggtccccgtgtctcctggtgcaggtcagagggttggcggccaatgttgcctgccccaaaggagccctccaggcccaggaaaggggactctgggagcactgacagaagagggggctgtgggatgccaatagcagagacctggacggtggagttagaagccatggccctttcccctggaggcccacctgggtgacggctcccagacccgctccacacagcccagcagcacccacgctgcccagagctctggctggctggtccctggggcaccctccagatttccaggttctgatcatctctgcctcttccctgggtcctcacacgggtgccagctgcttcctgtagttgccgcctgtttttcccatgaaccggtgctgcctctgagcagctcctgaggttacagcctccctgtggaaacaccttgtgtggcctctgggcttcttcctggaccttccttggcagaggctattgcagcaaacagagctgatgctgtgcacttgagcttgtcagaggggacagtgcgggtcacaggggcaggaacgtggcctgcaggcctatgtgcaccgcgacctgcgccctgtttaattcctgatgtgctacatgggcccattttcctgggcttattctcccaccaggccagactccgcagaggacatcgctgagggtggaatttacagagatgggcagctgctcaccctgctgtagcctttcacctcagcgggtggtcaggtccacgtcagtattccagagtttacatgacggtagcgtgcagccgtgtaactgcagagtgatgtgtttgagtaacgatgactttggctctataagataaattttattgataatttctaagattcctaagatttaactttaacaatggctgtgtctaccatcgactcacagtgcttctcgacgtcgaacaccctaagtcctcctccttctgctggctggggtgagctctaagggcttagccatgtccaggcctctacaggccttctattctgggccatgtctcccccacacacagaatgtcctgggatctgtgtctagctctgccgtggggacacctcccctcttcgtggtctgaagccctcctgactggactggagtgctgactgaaaaccaaaaataaaaatctaagcctcccctgcccccatgactgaatggagctcccttggccaagggggtcccaaacaaacctgaaaaactgaattcacagcctcgaagggacagggaggttggacaggcctacttatatcccctccctgtggagtttaggcacaaccgaccagcatt

SEQ ID NO: 914807 - DNA, 4001 bp, Homo sapiens
gaagggcgctgtaaccaggtcggggcgggggtgtctgtccgggggctcagacccgggtagaggtaacttcgatgagggtcgctccactctcctgcgccgcccccaccacgggggagcagggcccatacccgctggacgggagggggcagctgccacgaagcagcacctggtcacccaggaggggctgcgaggcccggggctccttcagctgctgccctgggcacaaagccccctccctcccacgggccctgagctgcccacatctgcaggactggctgctccagacagctcggaggcaggcagcgcggtgccccctccaccccgaggaactaaagccaggtccccagcaccacagagcagggcctgggagcagctggggagccggtgccaccttgcccctccctggccctgctgggggcttaacccttccctctgtcctgagccgacagcctggattgccgacaggccgcgagcgtggccttgggcccagggtgtcccggactcagcactgacgttcccggaaagagcccacgttgagtaggagctgagacctgcaggacacaggaactcctcccagggtcctggatccagctgctgctcacggcaggaggcccgaaaccagaaggcctgagcacttgcccggtccccaagagatgcacagaggccggaaggggcagtgcaggggctgaccaacctgctcagtctcagaaccacgctccgaaccctcagccagacccctccccaggtgaagtcgcagcagcaccagaaacacgtgcactttattgaatgccattgtagaaaagcgtgtgaggataaagggctgatacaggactcggctccgggggcagggcgaggaatggaagttggagtacgtgggatacaggtcatgggcagagctcctggcctcagtgatgcctcctgatctatccataggcctggaagatcagcactgggatgacgatgagcagaatggtcatgaggatgcccagaatcagggcccagatgttcaggcacttggcggtggaggcataggcctgggccccggtcacgtcgccaaccatcttcctgtccctagactgggggagaggagatggtgaggggaccaggatcccccagctgagagccgcgtgctatggctccgtctcctcattggctctccccgccctgagatcagggaccacctcctccccttcctcacccgggctcagactctccaggagcctcggggctcatcctccttctgccttgacctcagcacaggctgttctccccaccatggggtgaagtcacctgtgagttcccttctcactttctgggagagcctgggtgccagtctggaaggtgaaggtgtaatttcttactgggctatagggagaactgctctgggctagtggatagccggggacagactctgagccagccagccagcctcctggagcctcctcctaaacctgcactgggcagattccccaagccacacacacacacagatcacacagacaaagccactgacgtgggcacacacgggacagaggtgcacacaaactcacagtcacagggacacacaagtccccaccccaggcagcatgtgggcaggtggagctccaggctcagcggcaccctctgagcattccctggggccatacgcaccttcacggagtaggcgaatgctatgaagcccaggcagcaggggttcatgaagagggtgttgaacagggaccagacgacatggtcgggcacggaggtctcgctgcggatgtggatcacggtggacgtcgggggagcagggttgtggggcgcccccagcacagccacctcgtgctcctccttgagcatctcatagttggggggctggccactgttgacaggagagaagaaggtttggacagtgtgattcatggtgtccagcgaagaccagcggcggtcgggttactgggatggttctcagtgagccctccctttccccagtagtttcggtttctcaacagtttccttttcctggcatttgtcaaatcgggatttggccggggccagatgagggcggaacaaattcctgaggatcaaattactttaggagagggaggaaagaggggctgagggctaagaggggcttcctctctagagcccaagggagcacaaggctcatcttgttagtggtgtggggtcctggagacttcccctgtgttgggggtctccacaccccaggccagcagctgcaggaccccactgtcccggttcagggctcctgccaggcctgcgctgacgcctccacactccaggccccacaaccgttcccccaaagccctcacctctgccgggcgccgcggctcacgcctgtaatcccagcactttgggaggctgaggtgggaggatcatgaggtcaggagatcgagaccatcctggctgacacggtgaaaccccgtctcccataaccctcactgtggtgcccaggcagctggattatcccattaccttcactatggtgcccaggcagctggattatcccattaccttcactatggtgcccaggcagctggattatcccattaccttcactatggtgcccaggcagctggattatcccattaccttcactatggtgcccaggcagctggattatcccattaccttcactatggtgcccaggcagctggattatcccattaccttcactatggtgcccaggcagctggattatcccataaccctcactgtggtgcccaggcagccggattatcccattaccttcactatggtgcccaggcagctggattatcccataaccctcactgtggtgcccaggcagccggattatcccattaccttcagtgtggtgcccaggcagccggattatcccattaccttcagtgtggtgcccaggcagctggattatcccataaccctcactgtggtgcccaggcagctggattatcccattaccttcactatggtgcccaggcagctggattatcccataaccctcactgtggtgcccaggcagccggattatcccattaccttcagtgtggtgcccaggcagccggattatcccattaccttcagtgtggtgcccaggcagctggattatcccattaccttcactatggtgcccaggcagctggattatcccataaccctcactgtggtgcccaggcagccggattatcccattaccttcagtgtggtgcccaggcagccggattatcccattaccttcagtgtggtgcccaggcagctggattatcccataaccctcactgtggtgcccaggcagctggattatcccattaccttcactatggtgcccaggcagctggattatcccataaccctcactgtggtgcccaggcagccggattatcccattaccttcagtgtggtgcccaggcagccggattatcccattaccttcagtgtggtgcccaggcagctggattatcccataaccctcactgtggtgcccaggcagctggattatcccattaccttcactatggtgcccaggcagctggattatcccataaccctcactgtggtgcccaggcagccggattatcccattaccttcagtgtggtgcccaggcagctggattatcccataaccctcactgtggtgcccaggcagctggattatcccattaccttcactatggtgcccaggcagctggattatcccattaccttcactatggtgcccaggcagctggcgttcaggcctgctcaggcgtctcatgaccttcactgtacttcttagataaaacagaatacttgaagtcactagttacagagaacaggaatctataaactcattccaaaaacaaaggaaaatttgttttttcttctccctgtgttaagggagtgctgggagagtctcagagcacattagataatattatcaggacttttcctgggtctcagctgtgtctgctgctgcctccgggacgagtcagcctgatacaggaaaacctatttctctttctttttaattttaattttattta

SEQ ID NO: 914808 - DNA, 4001 bp, Homo sapiens
aatgttgcacacatgcccattttctgcctttctggatatagtttggttggggtgtgtgtgtgtgtgtgtgtgtgagagagaaagggaagctgctatccttcccacatgtgtttgtgtgtgtgtccagccccacccatgggatcgtccccgccctgcctttctagccaccctcactggcccaggagggagggaaaccaccgtggggactgggatttctcagaattaagggggcacgcagggtcatggggacagacagaatgacccagaaaggaaggaggtgtacaccagaccgcagatggagcccacccacaggcacggactctcacgcagacttcgagcacgcacacacatgcgcacagagagatggggtggacacacgtggggttgggacgcacccatgatgttctggagcacaggccgctaaaccacagagcagcagagatcaaaggcctgggctctcaaacttagtctaaaatactctgggcctccgccccgtaagccacaggccgcccagtggctgagagaaggggacagttggggccaagcagggctgctgagctgcggggggcgctcccgccactgactctgggggctggccctgtggcatttggctttggtggtccctagggcagctccttcccccacgctaggcaggaaagaggccaggaggcactttctggaaccaggcacttttaatcgtggaaccgaggggcctggagtgtgaggagggaggggcaggatcgggggcagagttagggcccgggaactctcgggttagggtgaagaccccggggtctgactggttcagccttaggtgcccatgttggggctggagggccccaggatcaggatggggcagggatggaggccccacagaaggagggccaggctccggggagtcagtattgggccccaggggcagcagcctggggtcagtgtcctggggctagtgccccagatcaggacccagcctgtcagtcatagtccgcgtcatcaaacttggtgctgaagaaggcggcagagtccttggccagccgggccaggtgcagggcaccagtcaccaccagccccaggagcagcagtggcggcaccagcgtccacatcgcggccaggatgttgtagcacttggctttggagccaaaacgccgggccgcttccaggtcaccaaccaccttctgatctcgggcctgcagagagaccagaccacagggccagatctctatgtgtcctcggggcctgggggcccttccccacccacaccctgggcacctggaaggcccctactgcacccaaaatctggatggaggggtgtggcctgaggagatactccttggggccccagctatggacccgggggccatcccaggccagtgtcagcctatcagagctctctatgggtgagggtcccccagggtgctgagacaccccccaccctgccagccaggagctgaagtcaaagggacctctgttccagaagcccacagcatgtgaaccccctcttgattgcagagacctctgtgggtgcctcccaatggcctctgtgctcttggatgggccagaccccgttaagaagaggccccccggccttgccttcgtgaggagctctttcccggccatactgatagctgtgcccacagagcccctcacggacaagcagagccccccgcggcccccagcacggcaaggaccccccacggagctccccatccctcccccttccccccaccttgatggagtagtggagcctcccccgcaacctcggtagggcccctgcccaccttgatggagtaggccagcgccaggaagccgaggcaacacagattcaggtagagggtgctgaacaccgaccagatcaagtggtctcgaggcggggggtgcggggcccccagtgtgagggctgtgtgggcaccggccttgctgggcgtgggggcccgggtgtcctcgcggggatacgccgtgtccatgggttccagcgccgtctcttccacactcagactggtgctgggagggtgggcacccgctcacttatagccctgtcgccctcccggcccagcccctcaacgctatatataacacaaattacagcctgcgggccgagggtgcggcccgccccttagcccccaccccagggagcccctgtccgaggctgccttggaccacccagcagggtccctcctgacagacatcccatctgggagccccccgcttggaaggctacggccgggcagtggcagagacccccacccatccccccacccccatcaaaggctgctggccaagtgggcagtgggcagaccactggccagagccccctccgtccaggccaagaagagttggaggtgtcgcctcagggccatgggcctcataattcagggatgtacaggagccccctcctcagaaccagagctgctgaaactgcagccccttcattcccagaactcaactctgcccctaacactctcagagcaccagcgccaggccctaggagcgcaggcatccctgcaagggggacagggagggcggctgtcggaggagggcgcgagagagaaggagagaaccacatggggggaaagccagggggtgcagcctgttaggagccggcaggggaacccccagggaccagcaacagctgttaacactggtgtcgggatgcagggagcctgtgggctcctgtggtggacactcccctcagcctcctcggctgccctccctgatcccagaatgtctgtggtgagtggtcctgtttagggctcaaggtccgccccagtcttgtctctggctgtagatgcctgtgtgtgctgacgactcacatttatgtcttcagcccagacttccccccaaagacattggcttggtccccagctctggacacacacacgcaactcctgctctgtggacctccacccacgtgccaacaatagaccctggatcctccctcccaacctcctctgccaagccttccccggagcagtggtggcaactgcaccgggccagaaggctcagcttccccgtctcccagtcggccacactcctgagtgcccaggaccaagctgccctccctcctccaggacgcacactcgccacctgcaggggatggttgggtggggggttccttgctgctgtgcttgagcctgtgaaccccaaatatctgagacaggtctcggttaatttagattattttgccaagattgaggatgtgcctgtgacagcctctggagctcctgaggatctgtacccaaggtggtcggagcacagtttggttttatacattctagggacacaggagacatcagtcaacatatgtaagatgaacattggttcagtctggaaaggcaggacaatgcaaagcaaggcagggaagactcgaagtggggaggcgcttcccggtcgcaggtagataagagacaaaggttgcattcttttgagtttctgacttgcttctccaaaggaggcaaccagatatatgcattcacctcagtgagcagaggggtgactttttttcttttgtttttgtttttttttttttttttgtgagacagagtctcactctgtcgcccaggctggagtgcagtggcgtgattttggctcacggcaacctccgcctcccgggttcaagcgattctcctgcctcagcctcccgagccgctggcactacgggctcccgccaccacgcccggctagtttttgtatttgcagtcgagacggggtttcaccatgttggtcaggatgaaaaaagctaactctgtaaagtatttaaagaggtttgtcctacgccgaatatgactgaccacggctcatgatacagcctccagagttccagcaaacgtgccaaaggtggctgggctacagcttggttttatacattgtagggagacagaagttgcaggcaaagacatagatcaatacaagtgtcaacgaaaagagtccaactctgcgaaatatttgaagagatttattctgagccaaatatgagtgaccatggcctgtggtgcggccctcag

SEQ ID NO: 914809 - DNA, 4001 bp, Homo sapiens
tactcgggaggctgaggaaggagaatcacttgaacccaggaggcggagattgcagtgagccaagatcgcaccactgcactccagcctgtgtgatagagtgagactctgtctcaaaaaaaaaaaaaaaaaaaaaaaaaaagtgggtctccttcctcactgttattctccttaacagcaaacaatctgcctccatcagtgtgcacttaccacatttggcatgtgtttactcatttgtcatctgcctcccatgattaccagcatcgggatggcagggacattgtgtcatttaacactatttacccaagtgccaggcataaggctggcacacagtaggcattttaaaatgcttgttggccagacacgatggctcacacctataatcccagcactttgggaggccaaagcggaaggactgcttgaggctaggagttcaagatcagccttggtaacatagcgaggcctcgtctctataaaattaagaaaaaaaagtttgttgaataaataaatagtgttcagtcctttaaaaacattccactgtgattttggttggggttgcaggctaaggggaggttatgaagcatcttcaaagctaggaaaaacataagttaaaaaaaaagaaaagaaaaagaaaaagaacagtgaattcctggcagacagtgagcaaagcagtaacatgaagtaaatggtgacagggttggattgggggaagatcctgtaatttggaaggctatgatttctcccccttaactagtcagaaaacaaacaatggcaagtgaagtaaattgacgctgaaagtcaacatttgctattataaaataagaacttcttgaagacaaccgtgaatccatcctgctctttcagtagcatttctcttctttcctctcttaccttggtgtcttggggttggagtataaatacttgcaacctcttcggagtcgttaatctctagacgctcatcatatgtctggttttcaacaaccttggtctaagcaaagggagacataattcatagctcctatcatgagacataaagcactctgccaggaggtatattccaaaccagcattggctcctcttccttactcaagaaaccagtttttcacaaaaccatcaccccatccaaactttccttcaggcttcctggccctcggtcaagcagttaagtcattctgttgcagcccttatttaggaactgctggcaggctggctgaggaaccagggaatcgtggagggaaagagagccaacttctgcagcttcccaaagctgtacgaccacgcgcaagggcagaacactatttgtatgtagatggccaaggctgttgaggtttctcagggaaggctgtagaggttctagaaagagttctgtctctggagtcacctctggggtggggtggggtggggtggggtggggtggggtggggtgggctgaggcggggtagggtgggagggtccccgaagagaggggaaactccagtctctcagtcccatccgataatcccaaaatcatcacctccactttcacccttatcttgcagataggatcccacctaagtttcttgggggaataaaggaagcaggacggttggtggtgaggtgacgaaggaacagttaccacggagattggaagaggtaaccgggaatggggtaaaggggagtcctcttaagcctctctagaaagacagttccctttttgctgggatgagtactaattacctgtagcccttctgaatccgtctcctctataatggaaagaaccccagcctagggctggggtctcactccagtctcaaagccaggccactttaggattccacgccaagcaaccagcctgttgtcagtcgctaggcaaaaagataaattttaaaattcgcgagagttgcttccactctcgtgagacctcctgcgcgttaagcctcacccgcgaaggctctccacgcaggaagaagatcaaggagtcacggataaagcctctctgggcggccaagtcgcctgtttgtctatggtttcagtaaatacgtctgttgcggcatctagcggctatgggtggcaacgcggctgataaatttcgggctggtgtagagttagcccttcaatctggaaacaaggtgtgcgtttgttcccctaggacaacaatctctggggatgcagttgctcccagatcagtcttaccaggatgtagacacattccaggggaaatttcgcagcactctgtaagtccttttctagcactatattacactatagtctttcccctccacagggtgccatggaatggaacatacttatagcaataaattattccttgggtatctgaggttcaaatttaactctgtgggccgggcgcggtggctcacgcctgtaatcccagcactttgggaggccaaggcgggcggatcacgaggtcaggagatcgagaccatcctggctaacacggtgaaaccccgtctctactaaaaaattcaaaaaattagccgggcgtggtggcggacgcctgtagtcccagctactcgagaggctgaggcaggagaatggcatgaacccaggaggcggagcttgcagggagccgagatcgcaccactgcactccagcctgggcaacaaagcgagactccgtctcaaaaaaaattttttttcactctgtgtcctgtctttcttatttgctaaagtagacttttaacttatttaaagcaagacctgtgtctaattaatttttaagctttgtaacaccagtgtattgcagaaattagacactaacaatgctcattgggtggatgaatcgaggaatgagtgaatggagatgtaaggaacaaatattttcaaactgtggacataattaatttgggaagtcagggagagagaaacataaaatattggaggccaggtgcggtggctcacacctgtaatcccagcacttcaggaggtagaggtgggacgattgcttgagttcaggagtttgagaccagctagagcaacatagcaagaaccgcccccctccactctattaaaaataaaaaaaaaattttttttaattagccaggtgtggtggcacgcacctatagtgctagccactcgggaggctgaggcggggggattgcttgagccagggaggcagaggttgcagtgaaccgagattgggccactgcattcactccagcctgggcaacagatcaagaccccatctcaaatataaataatgaataataacaataataattttttggtcgggcacggtggctcacgcctgtaatcccagcactttgggaggccaaggtgggtggatcacaaggtcaggagttcaagaccagcctgaccaacatggtgaaacccccgtctctactaaaaatacaaaaattagctaggcatggtggcgcgcgcctgtaatcccagccactcaggaggctgcggcaggagaattgcttgaacccgggaggtggaggttgtggtgagccgagatcgcaccactgcactccagcctgggcgacagggcgagactccgtctcaaaataataataatagcaatacattttaaaaagaaaataatattggaaatttgaccctgaaaacctaccagaggtaaacaaggaaagtgcctttaaaaaatgagagacagcttttctggcatactgatagttaaaaatagaactgcatttaaaaaaaaatttgtgatctgttttgctcgtaatagtggatatgtaatgtgcagtacttactatgtaggagcacttagtttttttgtggggagcacttagattatatcatctaatttacttcacaaccttatgagatagatgttactgccaatctacagattaagtaattgaggcttagacagttaaagtaacttgcctaaagtcactcataataagcgctgaaaatagcagccaaacacaggtcagtctgattcctaagtctctgcttttaaccattataagatactgccactatgggactcctcaagaagcatgcttacagggttgctttttcttctgtggtttaattcag

SEQ ID NO: 914810 - DNA, 4001 bp, Homo sapiens
aagggaaggaacagaaagggaaggagcaggtgagggagcagagaccaggtgggggcaggggcagaggaaaagaggggaggggggtgctgtccgagaggcagcgggctggcggctgcagggcccgaggcccaggcgtgggccgtgccccctgctgccctgcctcaggctggagtgggatggcagcgggggtcctcactccacagccctggttacctacagctcagcagaaggctcgctggggcaggaggaggaggaggaagaggaggaggaggaagctggaagtctctttcacaggagaagctaatgtccagtttgcaggctggtcagtgcctcagcttttatgtgtgagccgactcctcccagcccgggctccaccctaccccccacccctctccctgctgaccactcccccgcgcctttgctcccgccctctccctcctcccagccagtctcttctctcctgcacccccaaccgggagccctggaccatcccgtagcgaagtgccatgggctcccatcctgcacccccggctcatctctgcacagggcagtgaagggggggggggtctccttcccacctccttgtatggaaacttccacgctgcccactgggcaggggccgcggcctctctccgggtcgaaggctctgcccttcttagcctcagaccagcagcccctctccccctctcccgggactcctgtttggaaatgttgcggacagagccagagggggtgtgggggagatgtcgcgaatgtggcgtctgccatgactcctgccaactcggcccctctccatcctggccccgcccacccccgtcttcctctcgcggtctcgctggcaccgcgtcaacataccagggtgggcttctgcggctccgcgcccctcctcgttacccagcaccccggaggccagggcccgcaaggcacgaatcacacatgtgaggcggcaccccctgcacccacagaccgaccgggaagtcgcccctgcagacacctcacacctccctcggcccttcccgacgcccccaccccacccccagctccgccgccagggtgagcgcggggctccgcgcagggaacgggacccgcagccgtccgtcctcctcctcctcctcctcctcccccccgggctcagccgccccgccgagccccgcaggccccgggccgggagcgggcggaggaagggccgggcgtccggcgcaagcccgcgccgccccagccccggccccggcccggcccgcacacgccgcttacctggaagccggcgacgctgccgcccacctccctgctgcgtgtcgcaaaccgaacagcgggcgttggccctcctgccggacactcctctgccagcgccgctctggccgagtcgcgggggccgaatgtgcgacggggcagagcggggggatggcttttttttggggggggggggagaattcgtctgattgtccagggaggacgggctgtcttcgggctggggcgggccagatgttgtacttttcgggggggaaaaggtatcgggaaatgaggtcagctgttgtatcaaggatagaggggggcagagatagtgggagagacagagtgaacgtgaaaggggggggccgaagagagggcgagggggagagaggacagcgagaggcgggcaggcgcacagcgggagagaacagcacggagagaaacagaaagcgtgtaattaatccactttggttcggcgaaggcgagagggcgggcgtgagggggggagggagtcggaggctaggagctgggggggacgggagggagcgaagggaaggttgcgggagaaagagcgggggccggggccagacgccaagaggggcgcggggagcacagagaagcggagggaagggcgccacgtcgaggggccgggggaggcggtgactggggggcggagtggaggctgcacccggaccgcgggcgcccagctcggtttgggccgacggagccctctgccgtcgcgagcccgggcctcgggagggggacaggcggtggcggcaccggggccgctccgggacgcagcgcggaaaggggagcggcccgaggctgcgcgccggggggagggctggagggggagcgcgggggggggtgacaacgccggcggcctgcgagccggactgcctgcggggggaaccgcctcctcgggcgaagcggggatggggggagttgaggtagatgaagaggaggcggcggggaatccgcaggcccggcggagcgcgaccccgcggacggcgcccgggacgggagtcagcagcgaggcagcgggcggcgtcgacgcggggccgccttgcccgatggaggcgctggtgggcagagcgcgggcaggcgtgggccaggaggcgggggcggccggaaggggggggccggggccggccgggcctcacgcagctccgccggagagcaggcgaactgcgggcgcccacgcccggctcttatagtcgcgccagcccgcggcccagggcccgcgcgggcctcgctggcctcgcgcccgcgccaatgggcgcccgcggagccctcgccccgcccccggcccgcccccgcaacccgagccaagagcggggcggggggtgcgggctgggggccctggggccccggggggggggcggcggtcgcaggggctggggggtgcgcgggggcgaggctgggtggggggcagggagccgcagagcgccaaggccatgctgaatgcccgttctagagaattcaggggccccatcccgggtttctggggtgcccgggcggcctgtgctcgtgagctggggtctccgggcaggcaggggcaggcgggctcccagcgccccaccaggaggctgcactgcgggtgcgccccgtctgagtgcagatgcaggtggcttggggctgagtcggggggtccttgctggttgttgcggctgagggggcccctgggctcgggcggggcgcgcagccgccacctgccccagcaggaggagccggccacgcggcgcttggagcctcagccagatcccgagcgccccccggtgccgcgccggagccccggagcccccgccaggtgcgggacgcgcggaaggccggctgcgccgggccgaatctgggccaggcttggagcctacggaggctccggccgccagaggagagaggatcagggcgggaaacacagctcaaatcctacctgcatggccgagctcaccggggtgcgtctaagtagctcgcctttgcggcccacccaaaatatctggataatggttaccccgtcctcagtgcgttggacttgcatagacgcgagttcggtctcgggggccaccacgataatttgggggtctggggaaaccatctcctggagagtttgaacgatgtaagaaagcactgtgatttttaccaagtcaaaaaccacgcacaaaatcccgcaccccgccagccccccgccgcctaagcctagccaaggggaaggggccgccggcggaatctcgcgcccccctggcccccctcgcccccctcgctccgccatcaatcacttcgcccgcgctccgcgcgcgcctcccggcggagtcctaggcccgcgggctagaggcactttaccgcccggcgggagcgcctctcctccgcgtccctcgccccagccccctgcccgccccactttgggaccctccagccgctttccccacaaatgagatctttgcaatgagcaaacgaaagtggcgcggatttcggggcgcccagcaggagcgagcgcagccgccagccgcaagtccgcagccgtgtcccgcgccccacgccggcctccccggcggcagccggagacgagcgccagcaccggcgggacagcagcagatgcgggccgagagccggtcaggggcgcagaggcggaggggatcggcgcggcggggagctcaccgcgaagctggaggctgcgtccgcgggcgcaccaggagctcaggcagcgagcgatcgaacgctctgtggcaggcggtggacgctgctgaaggtgagcgagaccccggggccagtcctca

SEQ ID NO: 914811 - DNA, 4001 bp, Homo sapiens
tgccagcctcagttctgggagcgctggggtcgcctgggccacaggccacagcagctcacctcaggactgggctctctggcctgctggggctcaggctgtggggcaggctgggcagggggctgagctggcagcgattcagagccctggggctgggggctggaatccacctcctcccacacaagctcggtggtgactcttcggcccctggggaaaaacaaaaagatattgctgagatgacctcttttaaaagcaaagcccccctccccatacaccccaagcctgagccctgtcccatccccctccccgggttccttcaggtcaccttgtcaggatctgggcagcggcttccccctctagcccctcccctgcctagagctccctctttcaaagtataagggagggaagaagtggtgagaagtttgcctagaaagggcttcccggtgctgatggagaggccgagacccttctgttggacaggctgccctgttcctgggtgaggatgggcttctgcctggcactgggggtggagggtgcacacgaatggcccgccttgaggggtcatggcacggaatatgaaagcctcctccacctccaaacacccccaccttggaaggagataaggagggggccccagcaaaagccactggacacacagctctgcttgacgaggccagtgagggacggcgtggctgtgcttcctggggaaatgaaccccctccccacagacaccaccctgggtggatcgaggagtctgggtccagggtgcaacagagaaaaacttcatgcatgaatgagcattcccagggaaactgccttggccccagggcgcctctctgtgccagggaggctgggagagcagcaagggggaccaggtgcgccatcaggaggagagaagctaaacctaggggggacatggagggcggttgttgcctctcccggcatttctcctcagtctcctgtccaatttcttgctggtggtcaggaggcatagggaggcaggagggaaggaagctttacctgtaaaatggtgtatatatgtataaataaaatctctgcgccagaatctcgggcccctggctcctctgcaaagtctcctgtttgtctctgggaatgggatgggggatgcaacgggaggaaacttttcacacagaaagactcttcctttcacacttgtgaagacagctgtgtgttcccgctgggaagagcggcctagccctcctcccctacccctcccattttgcttggtgaattagtcaaggaaaacctattttccttgcaaaagcctcagtggctttgtgcagccctaaaggagaaccctctccacaatggcctttcctgcacaccccatccctgaagttgaggctgctctcaggaggcttccctgcaccctccagcagcagaagttcttcccctccttcagaaaccaggatcctggcagctgccccaagctcccggcccacccacgcctgaacacttaaagtgcagcttttctctcacactcaagggatgggagcccagttacctgtactctagtccctgcgcagtccccgcagctcctggacagtggataaagaggaccggggagtcactggtgcccaaggctctctgccgaaactgcctggacgatgatccgccggcctggccaatattagcagtcaccaccaaagcagggggtgccctggctgtggcgtccagaccctctggccaggttgacgtggaggaggagagggacaaagctgaggctggagaaacgaagggcacttttagagtgtgcatgttaatacggcccctacagatgggagagcctcatctccgctgagcatggcacctgctcaaatgccaactgaaatgatgggtttacccctcacctcctcatcccctccactcgtttccctgagcccctccgaatttggggagctttgtgccaacttggtagtgctgaggccgctggggcagctggctcaggcactttccagcaccagggcatggtacattagcgggtggaggtttggcccacccctgacctggcagaaaggcgcctgtgggcgtgggcataagccagaagctccctgccagctaggaggtgggggctatgtggaggtggtggggagtgggtgtagctttacttagagtgacacttggcagttacttgacaccctggaatgttggtggacgtggcactggtaaaatggcggggggggggggaataagggggacaaagcagggttcaagaatcagcagaaaaattggattttaggtgctcccggtacagttatgtactgtgcagttatgtccttccatcttccatgagcaaggtactcagctggggggtttttcacttcactggtcacgtctgatctgacctcagacactccctgtgtggtactaagctctaatgacactgctgcagggggcacttgcaggcatttctggattgggcgattggacaggttcgcagcctttctaattaaagcacagactcaaagctgacagcagctgggtgagggttcatatagaagcatccaccagattggactaaatcacactggaaatttctaacctcttccccaagctagcaaagactcaggaagaggcaaagacgtgtactttccagagagccaccagtccccccctccaacacccacgcaccccaaccaccttcagtgtgattagttttactagcctgtgttgggatttaattgtcccctctccctttttctttcaagccctcgtcttaaatcccttcattagctggaggaataggacatctagtggggacaacaaggatttcagcagggaagagagttagacttgaaggggattcaaatctggcatgtgttgggggatgtctcaaataagacgtagatgccccagagccatgccctcccatgggaggagggaaaatgggatttttcactcggcttttgggtggggagggatgttaatggccctgtcaggtccagagcactgaatgggttcacagtctttccagctaaagcacagactcagagctggcagcagctcagggagggctcagatagaatcacccattggattagatcaagtcttactgggaatttgacacctcttcctcaagcctgcaggaagagaaggcacaaaacaaagactcagggaaagaaacaaaacaaagatacaaggaggtcagcatgaagcagcccttgctccggggctctatggcttagagaccccgtagcatgtgctggtcccagtgtctgctgcaagatgcccaaatgttgcaaacagcgactgccagagccctctggagacacttggctgggactttccaagctgcagatggacctagagagagtgacgggctgacacccagccagatgaagtgattccatgggatgcccccccaaatgaacagtccccaggttgaggaggtgggcagctatggggctgaaagggaagcagcccacaggtcaaactcctggaaacctggagcctcccaggcccacaatggtgtcttgaatccaaactctgccctggactggaattccatctctggatgggcccaggaggagctcactctagtctccaaggctattttatcccatcaggatcttggaacccagggtgtgtaaacaggagaaggagagcagggagaagcggtcaggatagaaagggcccccggggagcagctaagccatggtgccaccgaggcaggactagaggcattggggatcagtgagttggggtgtgagggctgtggccccacagcactacattccacagattttccacgcaagggtctgggggacacatgctttatggagacaggtgagagggaccgcaaaatggacaaaaactggggtgcaggattgagggacacgacatagaaaaacctccttgctccactgcctcttaggcctgggagaggctcagcccacccctgttcatgcatgagagtcttgggaacccccagaaatctgctacaccaagctttcgccatttagcctcttaagtggccttatgct

SEQ ID NO: 914812 - DNA, 4001 bp, Homo sapiens
tcgggcgaagcggggatggggggagttgaggtagatgaagaggaggcggcggggaatccgcaggcccggcggagcgcgaccccgcggacggcgcccgggacgggagtcagcagcgaggcagcgggcggcgtcgacgcggggccgccttgcccgatggaggcgctggtgggcagagcgcgggcaggcgtgggccaggaggcgggggcggccggaaggggggggccggggccggccgggcctcacgcagctccgccggagagcaggcgaactgcgggcgcccacgcccggctcttatagtcgcgccagcccgcggcccagggcccgcgcgggcctcgctggcctcgcgcccgcgccaatgggcgcccgcggagccctcgccccgcccccggcccgcccccgcaacccgagccaagagcggggcggggggtgcgggctgggggccctggggccccggggggggggcggcggtcgcaggggctggggggtgcgcgggggcgaggctgggtggggggcagggagccgcagagcgccaaggccatgctgaatgcccgttctagagaattcaggggccccatcccgggtttctggggtgcccgggcggcctgtgctcgtgagctggggtctccgggcaggcaggggcaggcgggctcccagcgccccaccaggaggctgcactgcgggtgcgccccgtctgagtgcagatgcaggtggcttggggctgagtcggggggtccttgctggttgttgcggctgagggggcccctgggctcgggcggggcgcgcagccgccacctgccccagcaggaggagccggccacgcggcgcttggagcctcagccagatcccgagcgccccccggtgccgcgccggagccccggagcccccgccaggtgcgggacgcgcggaaggccggctgcgccgggccgaatctgggccaggcttggagcctacggaggctccggccgccagaggagagaggatcagggcgggaaacacagctcaaatcctacctgcatggccgagctcaccggggtgcgtctaagtagctcgcctttgcggcccacccaaaatatctggataatggttaccccgtcctcagtgcgttggacttgcatagacgcgagttcggtctcgggggccaccacgataatttgggggtctggggaaaccatctcctggagagtttgaacgatgtaagaaagcactgtgatttttaccaagtcaaaaaccacgcacaaaatcccgcaccccgccagccccccgccgcctaagcctagccaaggggaaggggccgccggcggaatctcgcgcccccctggcccccctcgcccccctcgctccgccatcaatcacttcgcccgcgctccgcgcgcgcctcccggcggagtcctaggcccgcgggctagaggcactttaccgcccggcgggagcgcctctcctccgcgtccctcgccccagccccctgcccgccccactttgggaccctccagccgctttccccacaaatgagatctttgcaatgagcaaacgaaagtggcgcggatttcggggcgcccagcaggagcgagcgcagccgccagccgcaagtccgcagccgtgtcccgcgccccacgccggcctccccggcggcagccggagacgagcgccagcaccggcgggacagcagcagatgcgggccgagagccggtcaggggcgcagaggcggaggggatcggcgcggcggggagctcaccgcgaagctggaggctgcgtccgcgggcgcaccaggagctcaggcagcgagcgatcgaacgctctgtggcaggcggtggacgctgctgaaggtgagcgagaccccggggccagtcctcagtgtccgggagcaacgcccagtccgttggaagacccggggacaatgcccaaatttgggggagactgggggcaatgcccggtcgctttcctggacacggggaagccctccctgtccacgtcctgagggcgcgcggccgacccaagtgtgtttgggcaacgctagagagaaatttcccaaatccgagttgctctggggacttcgtaggagacagagaggcccgaaaccagtgcccgctgtgcgcggggttggggaagctgcagtgggtggccggcgagccgggaacaatgcccaaattttggggaacgcaaggcagagttctttctgccttgcgggcttagcgaatgggtgtcctggaggaggggaccccggggactccgttaatgtgggaaccgtgattaatgactaaactcgagactccagaaaaatagattacaggtttgggggatgagagaagttgctccatgcaattgggaacatagagaaagaggtctcaaataggggccagctagcttgggggaccaatttgtgaggaggggtagttaaagaaaattctccatatgaaattgggaattttgccgtagagccatattacgtaaaattggcagatgaaagcaaggaacacattttggggatccaaacacattcttggtgtgttagggggaagctgagattaattttcacatcttaagaatataagttagtggcctggacgctggcagcagccggggaaaaaataaccttcataattactgtggcttcagggaaaggttttaacacccttcagagatggaagaaagcactgtctagattttgggggagcctggagtgtgatcagtacatttggggaaagcaaaataaaaaataaaaaaataaaaaatcagtattatttttctatgctaatttttaaatgatttccattagcttatttttggtaaataagaaaaagactatatattttcctggatgtcgtctgcatttgggggagccccagtgaaacacatttcaagtttttgggacacatggaaattacccaatggagatttgatatctaaatttctggaaacctagttagtagctaggaaacttataggtcgcaggtttttccatgcctgggatttcttgggacccagggacattttttagtgtgctttgggggtccatggaacattttctaaatgtagggggacccagggcagggaccataaagtcaggagactcataaatcagtattaaaaaaaaaaaaacctcaattgttttgtgaagggaaaaaaatctcaatttgctttggaaggctgggagacaataccgcaatttgggggctccaggaaaatcgtttttgaatctaaagatctagggaagttgctcagagtccttggaggacttgggggtccatatgtacattttaaagaaaggggattcagaattcctaggtcttaggacttaggaattttcagattttgtgatagggagtgtgcagtgtgcttgaaggaaatattgcttaactttgagatgactcagtgggttgtttggagcccaagaaatcagtgctgtcctgtgatccgagggcaatgctgaatgttcctagagggcctggagggcagcgtccagaacatccaagtatgggggaccaggaaaagggtccagtgtgatcctggccgttggggtttcagaccaatgcctgaattttagaaaagcaagattcttgttatgaagctcctgggacccagagaattgtttaatagtcaatatgttgtgatgcagagaaagtgctcggaatgtttgggaactggggccgttagcaacacctggcataacagaaataaaagtaggctctgcccaaggggtccttttgtgcttggtgtagcccagagggacccgggagaccctgtgtgatttggggggacctggagaatcctgggtcacacttgagcacctcctggtaactgctcagtgtgctccagggacctgggtggcactgtctacatcttaagggacctgattcgtggccaggcagcatatagagccatagacgttaatgccccaaagctttgtgactcacacacccacaacattctcaatagctttggggaatcactggggaaatccctccattttatgaaactcaggcaatcagagggcaggtcgttta

SEQ ID NO: 914813 - DNA, 4001 bp, Homo sapiens
ctggcttgaggttgggcgtcctcaccggtcactctaggggcctgaccaggtctgaggaagcccctcccagctacttactgaagtagaagccgcggtccccacagacgaactggagggtgtccaccagctccccgccgcacagggtctcactggggcggtaagcagcaatgcagcacgaggcgaaggccaagaaggtgagaagcaccagcatcgacttccccattgggattcccattggtgtctgggggcgggagagaagtggcgtgagcggggcagccaggccaagccccaggccagaggtgcccctcccaaaccaaatttgccaacctacaaattcagttgaaaattgaaagcacggctttcctataaacattatttttattacaaaagtaacacacaggtcataatgccgaggtgagggcgcagggccatgtgcagaatgaagcgtccagaagcacacagaaaaggcccagttccttccatttgcaagaagcactagtaattttacacgaggggtgaccatctccacggtcattattgcaggagctcagcggcatccacagctgcaggggcccaggctggacacccgacctggcctccgtcctatgacaccatgggggcagggccagcccagcgtcacatcgccacttctcaggcctccagcgccagccaagatggcagacagccccacccctacagagcatgtgcatccaggaggaccagtcccttcctccccacaacccccagctgagcagggggggtccaggaggaccatcgccctcaaagcagcaggccagtcctgctgggccagccccgcccctccccctggcttttccacctttccagtctgcagctgagccaggcctgggtcaaggactccaatggttaacacaaccacgccacccatgctctagaaaccttgttttcccagtcacccagttctccaactccagtctgccttgggtacccccaaacacacacacacacgcccagagcctcctttccaggcctcaaatcgaaccagtaaggccaggggcctccagaacatctccctatttgcgctaccaaactctccccgtgggagctggagagaccagctcaggccacctgggaagtccgacaccaggttccccagactacaatctggaaggggaggccagtcttaggacacaccccctccacaggctgcagggccacagggccgggttaacccactcgggggtgggaggccgggagccaccacagcaagttggccctgcccctgcagaaggtggaaccctccaggcgggcagccccagccttcgctccgcagacccaggggagtttttgatgcaataaattatgtgagcgactgagcaggcagtgggacagaagcacaactttgcatgccctctctaaagactagtgggcagctgcgccgaggatctgaaagcctccttggtcatctccttgactggaccctggccagtcctctcaccgccccctctgccacccccttccaaattctaagagcacactccgccagctggccactctagccctcgccgcgcttccgcaacaagccccaccactctgaacttggaggtccgggtcaggggaccggcagaaagcaggacaggaagcatgcagcggtgcggagcaggtgagggcccaggaaaagtcctgagctgggcaaggagggggccgaagggaaggaacagaaagggaaggagcaggtgagggagcagagaccaggtgggggcaggggcagaggaaaagaggggaggggggtgctgtccgagaggcagcgggctggcggctgcagggcccgaggcccaggcgtgggccgtgccccctgctgccctgcctcaggctggagtgggatggcagcgggggtcctcactccacagccctggttacctacagctcagcagaaggctcgctggggcaggaggaggaggaggaagaggaggaggaggaagctggaagtctctttcacaggagaagctaatgtccagtttgcaggctggtcagtgcctcagcttttatgtgtgagccgactcctcccagcccgggctccaccctaccccccacccctctccctgctgaccactcccccgcgcctttgctcccgccctctccctcctcccagccagtctcttctctcctgcacccccaaccgggagccctggaccatcccgtagcgaagtgccatgggctcccatcctgcacccccggctcatctctgcacagggcagtgaagggggggggggtctccttcccacctccttgtatggaaacttccacgctgcccactgggcaggggccgcggcctctctccgggtcgaaggctctgcccttcttagcctcagaccagcagcccctctccccctctcccgggactcctgtttggaaatgttgcggacagagccagagggggtgtgggggagatgtcgcgaatgtggcgtctgccatgactcctgccaactcggcccctctccatcctggccccgcccacccccgtcttcctctcgcggtctcgctggcaccgcgtcaacataccagggtgggcttctgcggctccgcgcccctcctcgttacccagcaccccggaggccagggcccgcaaggcacgaatcacacatgtgaggcggcaccccctgcacccacagaccgaccgggaagtcgcccctgcagacacctcacacctccctcggcccttcccgacgcccccaccccacccccagctccgccgccagggtgagcgcggggctccgcgcagggaacgggacccgcagccgtccgtcctcctcctcctcctcctcctcccccccgggctcagccgccccgccgagccccgcaggccccgggccgggagcgggcggaggaagggccgggcgtccggcgcaagcccgcgccgccccagccccggccccggcccggcccgcacacgccgcttacctggaagccggcgacgctgccgcccacctccctgctgcgtgtcgcaaaccgaacagcgggcgttggccctcctgccggacactcctctgccagcgccgctctggccgagtcgcgggggccgaatgtgcgacggggcagagcggggggatggcttttttttggggggggggggagaattcgtctgattgtccagggaggacgggctgtcttcgggctggggcgggccagatgttgtacttttcgggggggaaaaggtatcgggaaatgaggtcagctgttgtatcaaggatagaggggggcagagatagtgggagagacagagtgaacgtgaaaggggggggccgaagagagggcgagggggagagaggacagcgagaggcgggcaggcgcacagcgggagagaacagcacggagagaaacagaaagcgtgtaattaatccactttggttcggcgaaggcgagagggcgggcgtgagggggggagggagtcggaggctaggagctgggggggacgggagggagcgaagggaaggttgcgggagaaagagcgggggccggggccagacgccaagaggggcgcggggagcacagagaagcggagggaagggcgccacgtcgaggggccgggggaggcggtgactggggggcggagtggaggctgcacccggaccgcgggcgcccagctcggtttgggccgacggagccctctgccgtcgcgagcccgggcctcgggagggggacaggcggtggcggcaccggggccgctccgggacgcagcgcggaaaggggagcggcccgaggctgcgcgccggggggagggctggagggggagcgcgggggggggtgacaacgccggcggcctgcgagccggactgcctgcggggggaaccgcctcctcgggcgaagcggggatggggggagttgaggtagatgaagaggaggcggcggggaatccgcaggcccggcggagcgcgaccccgcggacggcgcccgggacgggagtcagcagcgaggcagcgggcggcgtcgacgcggggccgccttgcccgatggaggcgctg

SEQ ID NO: 914814 - DNA, 4001 bp, Homo sapiens
agatctttcaatcagcattcccctctctcctcccatctgtcactaagtcctatcaggcccctcccatttctacctggacttctctgcctctcatcctggctgccacagccccggttcaaatccacatcactgctcacctggactaaacagagcctctcaactaccttacctctggcctctccacgtccaatcaaaagcaggagacccaagaaatcctcctaaaatgcaaagctattcgcctccctcacctgcttaaccccgctgatggcccatccttcatacacagaacagaagactagctccttagccaggcccttcccaggctcgccctgccagtctgctcagcatcctcagaaagagccactgccatgggggctgactctgtccttggcaccacgctgagcacctgactgacaggggatcgtttcattctcagagcaagcctgtgaggtgggaatcatcccagttttacagatgaagtaagtaaggctcagagacagaacctgcaaagtcacacagccataaatgaaacagctgggattctaagaaactcaacataactgcaaaagctctccattgccatgatcaaaagcatctcagacaaatcctacccacatatggctgactgcaaactctggaagcagactgcctgacagcaaatcgggctacactgtgtcaccccggggcaagttacttaacccctctctgtctccatctccttagacggaaaatgacagtaacagaaacctacactgcggccgggcacggtggctcacgcctgtaatcccaacactttgggaggccaaggcgggcagaccacgaggtcaggagatcgagaccatcctggccaacatggtgaaaccctgtctctactaaaaatacaaaaaattagcaggacgtggtggcgcgcctgtagtcccagccactcaggaggctgaggcaggagaatcgcttgaacccgggagatggaagctgcagtaagccgagatcgtgccactgcactccagcctgggcgacagagagagactctgtctaaaaaaaaaaaaaagaaaaagaaaaaaaagaaacttacactgtagggttggcatgggatgaggtgtaaaagaattaacgcatggaaagtacgtaagtgttagctctgattgttttggacaagtaaatagtcccattcggaaacaagcccggctctcacatggctccccacacctctcaggacggctccccaccctactccgcacccaccagcttaactccaattttccttcaggcaccactccctccttgaagccaccatgaccctccccagggaagggccttcctcctccaggctctttccccgcgacacgcacgcagccggccctggacgcactggaggggaagggactctctgcttatgcccagcccgccgctggccggatcgggggcagccagtgcacctgactcatgctgccggggcctgactgagaatgggcgcaaaccatgtttactgaatgaataagggaaagggctgctaactcgctgcgggtggaactggggtcggggccagggcccaggagtgtaagcttagtggggggtctcgggtcgggaaatcaaagtgcttcttaagggtccccaaacggaacgcgctgcccaggaagtgatgagactgacaactcgggaggtggccaagcaggggacggacgatccctgcccctgactcgaagggtcggagacgaaattcccgccccagactatgaggccgagcccctcggagactctgcccgggacacggcgggaccgaccgcgagggagcggcgccggcggcctcccgtacctgcgctcctccacctccgcgtctctctcaagctccagcaggtccagttgcttggtcacgaagctctccacagctgccgaggccatcgccgccgccggcctgggcccctagaagccgacgtcccgcttctgcgccgggccggtgttacagcggaccggtgttccccgccgggcccgtgcgttacgcacgcggttcgcgtcgtttccgtttccggccgaggctgcggccatggcagcatcttccctgacggtcaccttagggcggctggcgtccgcgtgcagccacagcatcctgagaccttcggggcccggagcaggtgagacctgggatatgggaggaagggaggacgcagagcgagcgctgctccctgcggtctcgccacgtatgtgcctgggtccgacctggtgccttgtgtgttgatcgcatttgtggtgaatatagcacgggttttggagtcgggggaacccaggttcagattttgattccttcagttagtagcctgaatactgacaatagcccttgaactttggtataggccctatgttatgggggagaagagtgaggctcagaggagctaggtaacgtgcccagggtcacacagcggggaagtggaagaagagtacttcaggcgcagtcatttcggctccaaagcctgtgcttgaaccactgcccccaggctgcgagctggtctgaaaaatggtgatggatatcctcgcctaatctgaactcattctgcaaaagaaacagccgtatttaaggcgctgggctgatacgaggctccaaaaaggttatgtccgttaaaaactctataaatctctgcttgaaaatggttggagtgtgtatttgtgtgcatgagtgtttatgtatgttttaaacctgggtttcatgtctcaccatgacccccaaaaatggaaaactggatctaactctatattggacgatattaaaagaatagtaccataattcccaaaacttggaagcaacccagatgtccttcaggagatgaatggttacataaactgtaggacatccatacagtagaatattatgcagcaataaaaagaaatgagtcatgaagagacatggaggaaacttacatacatgttactaagtaaaagaagccaacctgaaaaggggacatcttgtatgtttcccactatgacattctggaaaaggcaaatctaaggagacagtaaaaagttacatggggggtaagaggattgggggagaaaaggataaataggtggagctcagaggatttttagggcagtgaaactattctgtatgatataatggtagatacatgtcattataagtttgtccaaatccatagaatgtacactaccaagggtgaacccctaatgtagactatggactttggataacaatgatgtgtcaatgtaggttcatcaattgtaaagattgtaccactctggtgagggatgttgataggaagctgtgggcacatggacaggggacatatgggaactctctgtaccttccactcaattttggtgtgaaactaaaactgtgctaaaaaataaagtctattaagaaattaataataatcacagagttgggccagaggcaatgtagatgccaaaattggccatgagttggtaactgttgaacctggaaagggataattgagagagttcactattctgttctctttacttttgtatgcttgacattttccataataaaacttaggtttaagtaggcaggaaagtttttacaaaagcagtgggacttactccattctacctacctacatgaaaccacccctccaatgctatgttcaagtacagactcacgcattaggagagaaagacacacagtgaagcgagtagagacaaggtgaccaaaacagtgagcagctggggccttgaagagtgagcaaaggagacgtgatggaagtacacagtcacagtctctaggactacctaaaggaaatcctgtgggagaggaaggagactgtttgttccctggggacccaaaaacaaagctagaagcaaattaggtacagaagcctgctaagtttttaatagtgggatggatttgccaatgggttgactgagtagtgtgcgagagaagagtcaaaactgatggaggtttggggcctgagcaactgggaggatgaagttgccctcatgtgagagggaggagtgtgggagaagcaggcatg

SEQ ID NO: 914815 - DNA, 4001 bp, Homo sapiens
tgtcatggtgacagcaggcgtgggcactcacctgtgagactggggaagaggatgaggccatgaaggacaagacagggagtaggagggagattcagagatgttatgtgtgtgttcagacataagaggagatggaagcacacaggagagggccaggagagcagtcgagctctcttttcttcatttcctagcttccttttcctggttagttaccagacccaataggcctgtcctctcactgagtaactccaaactattccagggtctcagagggagaggttatagggcttagacttacccagccaaccaagtaaggcctggagggagttgaggatacctattgatagctacatggcactaaggaggcagtgctggatgtttcatcaggagggaatgcagtcagacctaagaaagaacttcctgactaagccatactggagtgggctttagaaggaagctgtgtctcttattcctgggccctggggaccccggcactggtggaatgctaaaacagatgacaaaacatcactacaattctgcttgtgtttgcgacatggtaaaggcaaaggtttagtttttcttacatttttctttgaactggtaattcaatcacatagttaaagaataaaacaatataaaaatccatatggacaggctccctcccactcctgcgtctatcttacaaccttccccattgcaacaggtagccagtctctaggctccttctagacctccatcatgcaaataggaaaactcatgtgttcttatcatcttccttttttttttttaattaaaaaagcacataaggtagcccattatacacactattctgaccctttcttttttcatttaatgtgtcttggagattttttccataccagatgatagcgtttcctcattcctgttcagagcaccatgttttctcaatgttttatttaaccagcattgcggttttttttgggtgatctcggctcattgcaacctcctcctctcgaattcaagccattctcctgcctcagcctccccagcagctgggtttacaggcacgtgccaccatgcccagctaatttttgtgttttcagtagagacagggtttcatcttgttggccaggctggtctcaaactcctagcctcgattgatccgcctgccttggcctcccaaagtgctgggattataggtgtgagccactgcatgtggccagcattgcagtttttttgtttttgtttttttgagacagagtcttgctctgttgcccaggctggagtgcagtggcacgatcttggcccacgacaacctctgcctcccaggttcaagcaattctcctgcctcaggctcccgagtagctgggactacaggcacccgccatcacacccggctaattttttgtatttttagtacagatggcgtttcactatgttggccaggctagtctcgaatacctgacctcgtgatccgcccacctcagcctcccaaagtgctaggattacaggcgtgagccaccgcgcctggcccagcattgcagtttttaaagtcctatttcgtatatgaggaaactgatgtctgaaagaaatgacctgtccaaggtcactcagactagactcctagcttttgactccagtccagtggcgtcccagagggctccaaagccttctttaacccaggtagttaggggttaaactctattccctctctccaccccctaatatatctctgcctgggctgcttctacctttgggttctgagactactcccctgttcctattcctgccctctaccctatagtcccctctgggctcagaaggtggtcagctttgtccccttcctgagggaggaggggagccttaccttcagcactgaccagtccctcccaacactcgaatgctgtgtccacggctttggaggctcagctagtgcctggactgtagggtggcccgtctccttcttcctttgccccaacagtgaggctaccagtgtcatctgttccttaaatgtctggccccctgggggcgattccttagtcaggctctgcagctgtctcagctagatggcacactgcttggttgtggggggagggggagggcggtggagaagggaggcgggaagcaaagctggatccaggctgggggaaacactgaaggccaggcgggaaggaggctgagggtggcagtccaggggtactttttttgttcccttgtggtacaggttttggctctcactgctgctgggtaggacctctctgagctgaggggctcagggtagtgtgtgtgcacaggcacacactcaggtacaggtgcatgcatagtccagcagggctcagggagcaaagcaacaggtctgtattttccagggactgggacacggtgaactggggagggcctctgggatctgctgcgttgctacacaaatccaggggttcccattcatgttgcactcctatgtgtggttcatacacagcctgagtatctttacaaggccaccctggggaagaacagggaaatgttaggtctccttcctcttcccacttcaacagcccaatctccctaatctgggtagaagagtaggagggcccatcctccgggggttgtggggaggtctctgcttgagggtgactggagagtatggccacctcttctcaaggacttccatctgggctgcttcagccacctgttgttttcttttcttttcttttttttgagatggagtctctgtcacccagactggatgcagtggcacgatcttggctcactgcaacctctgcctcccaggttcaagcgattctcctgcctcagcctcctgagtatctgggattacaggcgtgcaccgctacgcccggctaatttttgtatttttagtagagatggggtttcaccatgttggtcaggctggtctcgaactcctgacctcatgatctgccacccctcggcctcccaatgtgctgggattacaggcgtgagccaccgtgtccagcccaccctgttgttttctcatcatctgtagcacaccccgcatgcctggaccctggatcccacccaaggttctggcaccttgtaaggacttgttggtcagcacccttgccctggacccctccttctgccctggggtgacccccacctgccagcagtggcatcatggctacttttgctccatcccaggggggcaggggacaagaatagagcaggagtgtccaggatggctcaggatctcagcccacatgcagattccctgggccccttgggaggagctactctgagcccaggccttacaagggaaattactgggctgcagctgctgttgggatctgtggagctaacatgggataagagtttggccaacagggaggggcctgggtgtgacctgaatgtctccttaccctagccttggcttctctggcacatctgttggaaatggtgacctgccagccactgtgccttccctggaagccttccacacctgtccttgaggctccccatggcccagagcatgtgtcagggccagggctgaggctgtgtgagaatcctgcagaatgttcccagtttggctttacaaatttggactcgctccatactcccagtctccacaaggggctccagtgagcagaagggccaagctcactgtgctcatgctggggaggggcacaaagacccaagtacaggaaggaaggcagtggaggggagaggcaaatcacacagacccaggaggttagttttgctcaaaatgctccgtttattgctctattcaatgaccacgagcgaattataaaaagacaccaaatgtctctgtctgccgtgggataaatatttaaagtcagcaataaaaacacgtggctccaagataatacatgttgccaaagagtcatgcatgccctcctgatgggctctcaacacacgcatggacatgggaacacacgcagagcaacacgcagtgagacttctgggaaggctttcccacagtgacacagaaaaatgtctcacgtagatctgggctgagtccccacccaaacctt

SEQ ID NO: 914816 - DNA, 4001 bp, Homo sapiens
accacacacagagcaattgaggctaagaaagaccccaagaccagcaaggtcaccctctgcttccagacaggggtacatgtccagccattccagacagaaggacccctctgcaccctgaaagagggcataaccttcatgccaggcagccttcaattttgggaagcccttccttctatcttgcgattctgcgtgttgctgcagtataaactcacattcctttattctgggctgaaacttgcaaagaagtccattgcccaccctgacttaggttcggaggctatttcagagccttccttcagcgtctcttttctattcaaagatcccagctcatccttttgtgctttcagggacagtcccatagcaggaacataccaaaaacgggaggggaggaggatgcgggcattggaagacggcaaggaaatgggggagaggatgaggctacaggcagactgtcaagcgcagcccgatgcacctcacatccaccccccgttccgtaagcttccgccatcacccttgcctcagtgttcccacctgacaaatgaagagttttaaaaccgtccggaccaacatgtcagttaacaaaatcacccttcgcttcgccctctgctcgttctgttttcagacaccaccacccccctcagaagcagaggcgacatattcattccattccggaaagtttcctgaagcacgcccccctgcacagacgagtgacgaggggaccccgtgagaggcgcctccagcccacccggcgccccatgccgctgggagagggttctctgtcggcgagtcctgcctgctgactcccacccacagcgggttctctcccgccgccatctcctccggcttggtgaacttgcccgcagccgggtcgtgtctgcgcgctgacagccctgagctcacagtcctggcaccctccaggctccgctcccacttccatacaagggccgagagccgggggtgccacccagaggcttgtaggtcgctctgcccatctccaaagcaaaagcccgcgcgctcacgcacgcatcacccaactcggtggctccccccttgcgtctcccccagctcagacccaggaaagcggaaagagaaaatcccccctccgctcggattcacagcgtggggacccccccttccccgcccctcccctcccccgccgccgcccccagccagctctgcctcgcagcctggggagggcggcgtggggcccgcgcggctgcggcgcgctcccggggaacttttgcctggccggggcccaggtgcggctgagaggcgcgggggccggcggggtccagccaaaagcggacacacctcgaagctggcctcatcaatcctcctctcaccgggcgcccctgctagggggatccgacctccagctgccaagatgtgtgggcaggaggggcgcgagcggagcgatggacgcccgcagggccgcgcgaacccggggccttagacgcgggtgccgccagtcccagggatcctccgggtcgcgcctccctgcaggcgctcctcgcggcgcggggctctagcgtgctgcagcctgcccggagaccgcaaactcccgcagccagagtttcccgcagctctgggaggcggccgccgggcaggaggcgacgggctaggcgcgccggtgtgcaccgtggggcccgtggtgggcgaagtcgacccaggttccactgcgtcctttccccgagtgcccggcagcccgtgggctctggccccttcccgcccgcccctccagcccacggcccccaggccctccccggcaatgctcccgggccgcctggcccgcgtcggagcccaagcctcacccgcgggaaggcgcgccggggagctggggaaccggggggccaaggagccgggaaaccgaggggccgggcgcgaggggccgagggcgccgggaggggcaggggagggacgccgcacttcaactcaccttcagccgcaagccctcgggtgccgatcacacttgctatgaaagtggccacataccaaatcatagtactaccgcgccagcccggagcctcatcctatcgcaaagtgctcccgcgcccgcacgcgcctcgcgcccgagcgcccgcctcgcgcccgcctcgcgccgcctacgccccgcgccggtgctcctgcagcccgggtggccagctctccatccctcctaggctccgctcggctcggcgcgcgcctccccggccccggcgcagcggcacctgcactactcgcccgggcggagcgcagccaggtccacggtgaagcctagccgggccgggcctccggaaccgcccccgccgcccgcctattgggcgccgcccgcaagccgggggtccgattggctcagccttccgcccgtcgcggcgcgaaggaggcgagcccatttcaaggtgcgttgaagtgtggcgagcacagagccgcagaatcatgcgcattgccggggagaaggtggtatagcgtctctgcccgcttctctctcggctcacactgcgtggcaagtttctggtgagggaaatggtagcttctaacgggaccctggcgggtctcaattaccccggacaggtctgagggaagtggagcccccgcccactcatggaacccaacatccggtttccatccggcaaaaagcagttcccgagaggaccatgctgattctatgatggggaaacccaggagccggcggcccgggagagccggggaacgtccttcgccggagatcttttcaaagaggtcacgcgccgcctccccaccccgtctccctccgcacccagacacgtccccagagcagcgcaccaccccctccaaacgtgatgcagaccgggggatgactaaaatgacctctcaaagtcgctaagatttagagtgagtcattggctcagctgcgaagtgccacagacccctcaggaacactcgtgcacacacactccacccccagtgctggtcactgctgctcatcattactgaatcccgactccaagcagtcaaagttgggtctttttcccacttctcctgataaaggctgcttcctcacgcacatggttcctcccctctccaccttactcggagcccagccccgactcggccgcatgaaaccaagatgggtttgggggaagctttaggagtctgggatggaggagacccagggaaagggaaggagcttctcatcctacagaggaatgtaaataggaaactggaaggtcttcgtatgttccagtctccctaccctagcctgtctgcttcccctcccccaatacagttgtatttgcagaagaaataaatgagtgtcatggaaacatctactacaaacaatcacctcacaccagcgctcagaggctgcagtgaagatgtttgttctttcaaggagtgaaggcagtggtaagaatcacaccgctccctgggatgggctgttggccaaggaaggaaggcagagggtcagcgagcgagagctcaggaatttcatcctctcaaagcactcgttagccacaaagccctggctccaggacatgaagctcccaaaacaacaagaaggagacttgcttctgggaaagcgtgcacacaggtacacacacatgcacaaaaagtggccttgaacaccggaggtggagcattccctgacaccggaagcctcttagctcaccgccagctgggaggcagaaagaggcccccaacagagcagtcagtgagcacatggataaaggtcgagggcctggatagatccagagaaccaggactgttgaataaccttctaccctacccacccctccacctgtgcaaacacactcaagatgcataacttggggccatctctccctgagccatgattttggttctcttcttgggcaaagatgcctttctggggacaatgaagtgagctgctccaggtctcattgatgcagtgatctccaggtctcattgatgcagtgatttccaggtggcatgacccagaataactccacccccaacacacacacacacatatacatacacacacacttacacactttcccagggcc

SEQ ID NO: 914817 - DNA, 4001 bp, Homo sapiens
agctctgtccctggggagaagagtgtcagtaccacagctgggagggggggcaggcattgatgaccccaattttaccaaagaagaaagggaggttcagagaggctatgactcgcccgaggccagcggagcccgtaaggggcagagtgggcacatgaatccacatgtgtctgattctagagctagtgtgtctccctaaatcactgccctgtgctctctgtgatcagaagctgcagtgggggctgagaagagccaagctgagtctgatgcctaccagggaagaaggcaggggccgagggctaagcaagttggcaatgagctctcagatgtgttagtccctggctctgcccaatccctgtccctgctctagcactattcctaggcttggccccatccacacacctgatccccaccctggcttggcccaggctccagctcaaagccacctcactaagtacacagacagcctgcttgctgacatctgcctccttctcttcataggtctcctgggctccccaagctaagtgcttgcctcattccctagtttctgggagggctttgcctatagccagatgtccaacctctggctgggcaaggacagatggaataaatcagctctggctctacacatggctgaggacatccccacaagagctggcacctgtagctccgaggagagatactcaataccaattcctagctctactctccctttacccccagtacacaccattcaccatgggaaacactgctgaaggcattgtcttctttgtaagaatgcaacaaacatttctactttaagagtcttgttgatcaagcagactgaagtatgtgcaaggccaacggctggttggttccctttctctcctccttgatcctctaagttctctccatttgacagcgactctgctcccgctccctagtgttctaacttctctacatctctctaatcatgcacctgttttttatttattttttgggggggaggactctgtcatctgtctcttgctttctttcttataccgtctttgatcttcacgtcagtgccttgatttcgaaacattagacggaaagtgaaaaatgcagcgagtcgttgtggtatttgggctgcacatctccgactcagctctcgatcacgtgaatggctgactgcatgttttactttgtattttggtgtcatgaagaagcagtttcggtccttgctctctgtctctgctcttggtccttccaactcccggctctttcattctgtctctggggtttacttttcttagttgcagaaaccttgccggagaactgtctgggttaggagcctgaactgggttagaagcctgaactggctgggttaggaggagagaggcagggggcagtgggagtgagttgggggctacaggtggagcaagggggatcagatcggggtgatcagtgagggatgaaggtgagatgggagaaggacagacagaggttagttgaagagtcgactaagagaagggagagtcaggagatcaaaattattccccaaggggacaagaagtcccatcatttgaacctaaacagcaaaaaacctagagctaaacttacggctcatctagaagtgggtggatgatgaggtttgcgggttgggggtttggccttgcgcatacttctctatccttcccaatccgtcagttcctgtcaatttcagcctcttccacttccacaacaggtgagcctgagatccaggtttgccagagtaagggagcacccgggcaccgctctgccagagggccagccagccagggctctccactggatggagaactttaatggagcgggcgcggagagggcagggcagggaagggccgcgtcccggagccttaccatgagcgtctgagccaagacggaggctgaggagcgccgccagcagcactacgaggcacggcagcatcctgggcgcgccgcatcgtccggggccggagcggagccggcctgcgcgcctccagctacccttgggctgggactgacagctccgccgcccgctccgccagcgccccgcagggctgacgtcagcggggcgaggcctacagacgccccgcccccgaggccgcggacggggaaccactgtcccacagggctaccgcctggggcaacccgaggctgtcctggggcgctagcgggctccggccacccctccctttccttccctctgggcctccagtgccttcggatcaaagtggtccgggtagcccggccggccgtgggtacgtgtgtgtgggtgtgtgcgcgcgcgcgtgtgtgcatgtgctgggaagcaggtggccaggcacagcctcggccctgagtgcggaaggtggggtgagggcgtccgagccgcttttgcctggcgtgccggcttggcgttaaggatgtggccgcggccgctccgaatggggaggaggtagttgcaggcccttgagggcaaaggcgccaggacgccggtgtgagtcttggcgttgccccagggcctccccgtctgggggtctgaggacaccgatggatgaatactgagtagtcccctacctaattgttggaggggggtccacaactaagcagtttatgcagacctgcccccaaagtcccaggaagctgagagacccaagaaagaggcttttaaccagcagctcagcagctgagcctcaaaccgcgatttttaaaatttttttatctattttttttttttacagtctcgctctgtcgcccaagctggaatgcagtggcgtgatctcggatcactgcaaccttcgtctcccaggttcaagcgattctcctgcctcagccttccgagtagctggcattacaggcatgtgccaccacgcctgggctaatttttgtatttttagtagagacggggtttcaccatgttggccaggctggtctcgaactcctgacctcaggtgatccacccgcctcagcctcccaaagtgctgggattacaggggtgagccaccgcgcccagccttaaaccgtgttttaaacttagtttctcttctttccttttttctcttcctcctctgggcctcaagatataattttgagacaaactgcatgtatgttacctctcatcttaaaacacagcctcaggacgtgctgtgacctccactccctttcctgtcccatactgtactcccatgccttacgcacgtttatttacctacgtgcttgttaagcacacgctatgctcttacctggtcatatatttccttagatgcctcaggagctgcgtcctgatagggaccaggcacctccggaattctctctccaacaaaagcttacttcaggagttgaacatataccctgctgaagagtaactaatttataacctggcaggatccacgattgcaccagcccctccaccaaataagacgataattaaagaggaccactggagcaagtcacaccacctggtacctcctaacctcccccttgccttttctgcatttcagatcctttcttaaaaaacccctgcgttccccccatgaattgaagagtggaattgtttgctgctcttcccctgctagcatggcagctagcagattttcctttattatccattctttctacaagcagagagcagccagatccttttgcaggttacaggctgacacatccagtttcttcgaaaaaaacatttaataaggacttataaacagaagctacgtttgtgtctccatgattcacccccaggaccagggcttatagaccacaggggaagggtgattcagaaaagatgtgtaggacagttgaagtatgataacatcaaggttgtttgacctaagggccggatttacagtaagtgtttgcacttacacaaggagcaattgataaattgggaatctcagaggtcttctgggaggctccaaagccaacacggccaaaactgtggattagcatccaacatggagttgctttagcctccataaggacttctcccagtctcttctgggtttcccttgcttgcttgaaatctgatattcagaccaattttt

SEQ ID NO: 914818 - DNA, 4001 bp, Homo sapiens
ttaagtttttgtttttgagtctgtagactcaaagcaaaaaaatcaaaatggaactgatgtagtttaaatggcctagtttgaaaaggagaattgagttgaatctcaaagaatgcttaaagatttgaatagatagagaaggcaatggaccagcatttatgtgataatcaaaacaatgttgtggtgggggtgaactgaatagagcgatgtttttttcttttcttttctttttttttttttttttgagacatggtcttgctctatcacccaggctggagtgcagtgacacagcaaacatggctcactgtagccttgacctcctgggctcaagtgatcctcttgccttagccttttgagtagttgggactacaggcacatactaccacatctggctaatttttgtatgttttggagagacagggtttttgccatgttgcccaggctggtcttgaactcctgagctgaagcaatccacctgccttggccttccaaagtgttgggattacaggagtgagccactgcacccaacctgtgatttttggattgtagtggaacagtcctgctattttgcagtgaacacaaggtaaagtcggattagattatggagggctttggaaatcaggtaaaagagtaaatttaatctcacaggcaataggaaaacattgcagataaaaagttattttgaaggaagtttgtttgtttttttgtttgtttttttgagaaagtctcgctctgtttagtggctgaactcaccacagatttggctatcctgggctcaagcagtcctcagcatcctgagtagttctacaggcatgcaccaacacacccaggtaattttttatttttttgtagagactgtgttgccctggctggtctcaaattcctgggctcaggcctgcctgagattctaggcatgagctagtgcacctggcctgaaagaagatttaatagaacgtaaagtagctgaatataggcaaaaagacgaatttcaggagtcctaaaatttagggggtcctaatttttgttattcaacttcaaacagagatatttattcagccctttccttaattgtgaaagaaaattatctcggggaatgctatattatccaattgtagcccagtccaaaggtgtggcagatttcacaagatgactaaccatgggcaaattttttgtttgcttttaatgtaactgattctgtcttgagattccgtttaaagagaagcttatttattttaccactctaaagcagcaattctcagggagttcctaaagtgaaagctatttctaataattctaagacgtaatttgtctttttcactcattctctcatgagtgtacaacagagtttaccagaggctacattctgtgcaatattgcaatagtctgaatgcaaagcagatgagaatccagcagatctatatggcttctattaaaccagttaaaacacttgtaaaaataaaaaagtgtcactctttatgctttttttttgttgttaaaaaagtacatagttatttttaattaaaaatgttacttatgctaacatgtgatgtgcttagtgtaaagggaacatgagagcaaaaagtttgagaacctctcctctaaagtgatactctcccatatctgataaaagaaaaaaattctactctgactttgcttatatttcttatgttgatactgactgctcatcgtagtgatgctagatggtttatattcctctcaattgctttctagcttatttacctctaattgccatggctgactttccaaataaagaggaatgatatttcttacctgcgacaaatagtttgttgcgagaggaagcgatctggaaggtctgaggttcctttcctcttcccgaagctgtgtagactgcagcaggtggcagccgctttagcagccagagttggcagccaggagggcaaaatgcactgggagacaattccttgctgactgtccaggcagtcgccaggggagcaaagggctcagcaagctggggagagaatgaggaagaaggtggagggaggagactgctgtcggcactccttgggcccgccttcaaacaggctctttcctagggcaatggaagtcgaaataaagtggcagaggatacgagtacttcttttaatgtaatatcactattttcatgaaatcttttcttccgtaaaagttggggctctgtgccttccaaaacctgtacctctttctgagtatctctttctgactttaagaaagcacctccttagtccattagaagcatcttcttttgtcatctgtctctcttcattttcagacttcctggtcacacttcagcacaaaactttttcttattttacaatgcggaataatcagtcctattggggtaattcctacaatgttacaacacttaaaatatttctaaaatgtaacattttaaaaaaaggaacattttgcaaatattttcttttactttataacctcattcaggacttccccttcctcccaagctcaatatggtgtcaaaggatagttgatacaggccattaagatttacttttcagtggaacaggagtccattttcataaaacttctttatctgctgtatcagatgcaagccacacggataccatcattagaattttatttaataatttttacactttctgcaacagaaagtaagcttggggagagggataccaaaattcaggtaagagggcaaatatttacttgcagtttccagtgttaaaactttctattcctggaatgatagcaaagactgacctaaaatatttgaaatacaatttaaggatacatatatttagggcttatgttcaacatgttaaaaaatagtcttataaaatgtaacgtttgaagagcagagtgtaaatatcacagtcttgaaaataattagtggaaacaaaatttcttagccatttttttcttgaacatgtgctaaactgtattactttgctaggaagggaattagcaaggtggcattttgtttttgtgttttgccagtacagagttgatataaaaacagaggggttcctagagtcagggaacaaaatgcttacataaacactactttttgttggtttgtttgttttaaaaacaagatagggttttcatttcgggaagtcataaaaacatcatgtccttcaacagtgattacaaaggaagtctgtggcagggtggctggaagtgcttggtgtggtgactatcagaagaaaaaaaatagtacctttaagaagtatatgataagaatacatacgtgactcaagttgaaatagtaagttttcaccttccaactgtagagtccaattgggccaattaacatgaaagcacgaagtgggatcaagtagtgatcagaagcagcacactaagcaagctctaattttaaatattccattgccagtgaattttctccagctgtaaagatgcagaatgtgtaatttacacattttgaagttttgggacaaacacttttttctttgatatagagcaacaaatgtctcagtgtcctttgtacttcatagagttgttttcaaagattaaatgagataatgatgacagccctttgaatattttaaagctctagataacaatatcatctcacttattcctacccatttagcttatgcaatggaagttaatatttaaaaaataaaagaaaataaaatgtccatggtgttctcttaatctgatgaaagcatttatgcattaggtggaatcatttttcttggaaatattttaagaatcagatggacaaccacctgtttaaatatcatacagtgtgaaggctgtgagatgaattccatgagtatttcccagacccttgggtttaatgaaccattaaaaataataacagcaaccatgataataaggaggaggagataaacacagtggacaactctacattttaccaaggaaggacactaaaaatgtaagaatttttaatctttttatttcataaaacttatctcacctgtgccccccaaattaggaaggacatggtatcagaataaagc

SEQ ID NO: 914819 - DNA, 4001 bp, Homo sapiens
tgggagcccaggtgacaaaggcagtgctggatggctgctgctcctctgagatggccagaggccagcaggctctgggtggaggggctggccttggggtccactgcaaccaaggctctgggaggtcctgtgaccattacttatgtcttgagttctctgtcctatttgatagggagcatcttgggagctgcgccaagcctgcacccatgacactgggttggggagggagaatggtgcgtgctcagcccagctggctcagctggtggtacatgggcagaaggggactggcgctcaggagtcaacccgaccctgggaacctctgtgcccatagcccaccctccaccactgtgcttcttactcagtggcacttccacctctggccaggtcacttccaatgctggacactgcttagctgctgggaacactgggggctgggaggggcaggggtcctttgtgcttctaactgaggcagtggcagctgtggtggtctgcgagacaggtgtggctctgaccaggagagtgacgacgtgggcacacaggagcaggacccacaaagggctgaggtctgaggaaaggacagttacaggtcagcggctctggagacagagtgggctgcccgggtaaggatgtaactccagcccagagatgtctgggttctagccagggaatcagagcgggaagagggacccctcagcacccaccccttagccctttattgaacagagtacagagaagctttagactggagccagagctacaatatctgcccaggttcttaaagcaacagcaccaggtgcgctgggtggtttgccttggagtgaaggctccgggttagcccattgctccattctgttcatagacctcaccctaccccgcctgcccatgcgtagccccaaggcctacctggtgtccagttgtgtctcatggtcatgatgcatgcgtcaggagctggtgagcctggctctttatctgtgacaacgtcctcttctctggtgaaaggtgggggaggagaatggtaaaccactcccgctttttctcagtagctggcttttcctcagtagctggcttctcctcccgtagcatagcctggagctctttcagcacttagaaacagagctgggggggtcaagtgacaatccttccccaccccagctctcatgaccacaaatggttgtaagatgcttacctagtccaatcttaccccttcattagggaaggcaaaattgagacccaaagagagaatatggactcacccagtcacacagggaggcagtgctctcttcagcaccagagctgcttctgggaagggcaggatgccgagcaatccttctgggaaagcactgccccgaccctctatttcactttcactttttaaccagggaatcttgagcagctgtgacacctctgctttagccaaagttcagtggccagaaaccttcagctcctgggactcctactctccagaggataccagactgggatctctaatctacccccatgccacccccagggtcacctagggtatgaactagatgagtctctcacagatcaattctgtcccgcccaagtgtcaggactttggtgtccgcctcccctcttcacagccaggtctttgtttccatatgaacaggcatctgcttcctccttcaccttcacactgacattcaaggggacaactttcctaggcactggggaaccccaagttggaccacttcaggctcaatgccataccagtccgtccacatcctggcctttcccaggctacccactcccccagccaccagccccaaggtcggctacatctcccagcacccaccatcacaccctctgtctctcatcctagcccctctggccagagccacaggtctaggttcactagtagtcccagactcctacctggctcctaagaggtcctgaagagccttcctttccagaagcttccctctaggagctccaagactcaagttagctgtgtctagctgcgtgtgaacccaccacaggaaatacaccgagagcacttcctccttgtctgtagaactctcacggccaacccaggaactggcacacaagctcgagagccaaccctaacaggagggaagggcaggcacttcccggggaagaggcggactggctcaacactggctctggcaacagagtctacatcagaatatgaatcttgtcactgatgggacaaatggcgctggggctgcgggagggccaggattcagggtgaggcgtgtgaggaacctaggatgctaaatctaaggaggttttctctcagggtcatgcagttatccatggaggcagaaagaccagggctgggtgatccaatgcatgcatatattaagtgtggacaggagctgcatgtctgaggtttgtgactcctgtgattgggagggtgcaacggctggtgacagagccagggaggcccacagatggaactgggtttggtggatgcatcaggaacacagtcagctgtgatctcaaacttcttgtagaaaaaccagattcatattcctaatttagacataggatactacaagtcacatccttcttctctaggtgtctagttcatgtttttcctcctctcaattcctccccctacctcctgccccaggggcttctagcatgtaagatgcaggagaaattcctcccaagaacaccagcatctccaggagttaggtcaggaggcaaggctgcctggggtttctgagagagacagtccagtgggggatggtagggaaagatgacaggactctgtcttagtggaaccgagaccagagtcaggccaaggggggaggtcaagggactcagaactgttacacatgaaaagagctttggacagcctggcctcggcttctcacctgagcctgacaggggggtggggggaaaaagtaaaaggaagggtgatccctaggtcctctgaccagccccattcccctctctgaggaggggaacagccccacaggtggcataagcagcagggtaccatgggaagccacagctggggaagagaagccgagcctgagtgtggtcctcaggaaggcaggtggtggcgggacactgtcctcaggcagtgagaacatagagcaacctcagtctgaaggcaggcccaatgatgccccaggcccccaggccacaggacaggagcctggcattccaccactcctagggatgtcagcaggggaacagctgggaacagcagaaaggcaggcccaaccacccccagaccctcaggtctccgatgggggttaacaaaggcaagacacccctggggaccccagggaaagaggtgggaagaagaaagcaagataaatgttcagctttccaacccagctcatggagctttattcagacgggagtgacaacatcctgcttcgttcttgctgcccttgaaggggcaggccctactgagccatattccctagaaacccaatgccgaaggcccatgtttgacctcccactttattcaagtcgcctaggactagggctggggccttcctagaagccccctctcagaacctgttctcacccacccaccactcccgttgtcaggcccagggaggacccatgaatgacaaaaatcatgtagggatattccctggactgggaatcccctgccagcttcaaggacatatcatctgacacagggagaagctgacatctgtcatattcttctgcctcacgtacacacacacacacacacacacacgcatacgcactcttaggctttcaagaaggaagtgatgtggcagagtgaccgctggcacgtgtcaccactccactgaaggatccactgaagaatgagcttgcacaaggggccgtcagtcatggctgccaacaattgccccatggcccaactatatgacctctattcttggctgaccacagccctgcccacgggcgagtatccatggtgctgattcttccagttgtcccaaaacaaatcttcaatgaattctgaggccccaaggcttcccttgttggccaagtcactgataagg

SEQ ID NO: 914820 - DNA, 4001 bp, Homo sapiens
tccaggtagacaggtaggacccaagctctggtcaaggttgtgctgctgctggccctgtgctgagtcttaaccctgctgctgtggactgctgtggctggagggcagggcttcttgggtggggggcaaggttgccctcagcccagcctagggaagtgaaggcagacaaggatcaggccaaggaaaggagggacatctcatcactttgccccaggctacacctcctctgcccaagacctaagttcctttttgtctggctgaccttgaggaatgctgggcattagttcacaggctgctctggcagagcccaccctttcctccccacatatggaagcagagctcctcctgttcctggaggcctctccttgggctcctcacccagagctgggccaggacgacgtgacgctggacaacctgttcagggtccacgagcacacaggagaagttggtgctgtgcagggcaggggtcagctgctccagcaccaaggccttgcacagctgcgtacctgtgctcccacgttcccggctggagcggaagggaaggaaaggtcatgagaaggccgcagaaggcctccttcccacccacctggctgctgcgaccctcacctggtgctcccctcccacagtcggcctgggaggtgctcaatgaaggaaccattgcccagccagtagaggatgctgaagttggggaagcggctgcaggccacacaggataagctcagcgttccatctagggacacaggcagcagttagctcttcagaagagcaggcccttcccctaccctgctctgctgtgccctccctgccagctccccccagtccccatgcatctggaacctagagaactgctctgcacaccacctaggtgggaacgtccgttacagaagtgcagttgtctccgagaggccctagccctaaacacggggaatgtgaggaatggtccttggttcacgtgatgaatcctcttctgaacctgtctcctcaggatgaccttttctagtgcccagcctcggtgacttgggagcccaggtgacaaaggcagtgctggatggctgctgctcctctgagatggccagaggccagcaggctctgggtggaggggctggccttggggtccactgcaaccaaggctctgggaggtcctgtgaccattacttatgtcttgagttctctgtcctatttgatagggagcatcttgggagctgcgccaagcctgcacccatgacactgggttggggagggagaatggtgcgtgctcagcccagctggctcagctggtggtacatgggcagaaggggactggcgctcaggagtcaacccgaccctgggaacctctgtgcccatagcccaccctccaccactgtgcttcttactcagtggcacttccacctctggccaggtcacttccaatgctggacactgcttagctgctgggaacactgggggctgggaggggcaggggtcctttgtgcttctaactgaggcagtggcagctgtggtggtctgcgagacaggtgtggctctgaccaggagagtgacgacgtgggcacacaggagcaggacccacaaagggctgaggtctgaggaaaggacagttacaggtcagcggctctggagacagagtgggctgcccgggtaaggatgtaactccagcccagagatgtctgggttctagccagggaatcagagcgggaagagggacccctcagcacccaccccttagccctttattgaacagagtacagagaagctttagactggagccagagctacaatatctgcccaggttcttaaagcaacagcaccaggtgcgctgggtggtttgccttggagtgaaggctccgggttagcccattgctccattctgttcatagacctcaccctaccccgcctgcccatgcgtagccccaaggcctacctggtgtccagttgtgtctcatggtcatgatgcatgcgtcaggagctggtgagcctggctctttatctgtgacaacgtcctcttctctggtgaaaggtgggggaggagaatggtaaaccactcccgctttttctcagtagctggcttttcctcagtagctggcttctcctcccgtagcatagcctggagctctttcagcacttagaaacagagctgggggggtcaagtgacaatccttccccaccccagctctcatgaccacaaatggttgtaagatgcttacctagtccaatcttaccccttcattagggaaggcaaaattgagacccaaagagagaatatggactcacccagtcacacagggaggcagtgctctcttcagcaccagagctgcttctgggaagggcaggatgccgagcaatccttctgggaaagcactgccccgaccctctatttcactttcactttttaaccagggaatcttgagcagctgtgacacctctgctttagccaaagttcagtggccagaaaccttcagctcctgggactcctactctccagaggataccagactgggatctctaatctacccccatgccacccccagggtcacctagggtatgaactagatgagtctctcacagatcaattctgtcccgcccaagtgtcaggactttggtgtccgcctcccctcttcacagccaggtctttgtttccatatgaacaggcatctgcttcctccttcaccttcacactgacattcaaggggacaactttcctaggcactggggaaccccaagttggaccacttcaggctcaatgccataccagtccgtccacatcctggcctttcccaggctacccactcccccagccaccagccccaaggtcggctacatctcccagcacccaccatcacaccctctgtctctcatcctagcccctctggccagagccacaggtctaggttcactagtagtcccagactcctacctggctcctaagaggtcctgaagagccttcctttccagaagcttccctctaggagctccaagactcaagttagctgtgtctagctgcgtgtgaacccaccacaggaaatacaccgagagcacttcctccttgtctgtagaactctcacggccaacccaggaactggcacacaagctcgagagccaaccctaacaggagggaagggcaggcacttcccggggaagaggcggactggctcaacactggctctggcaacagagtctacatcagaatatgaatcttgtcactgatgggacaaatggcgctggggctgcgggagggccaggattcagggtgaggcgtgtgaggaacctaggatgctaaatctaaggaggttttctctcagggtcatgcagttatccatggaggcagaaagaccagggctgggtgatccaatgcatgcatatattaagtgtggacaggagctgcatgtctgaggtttgtgactcctgtgattgggagggtgcaacggctggtgacagagccagggaggcccacagatggaactgggtttggtggatgcatcaggaacacagtcagctgtgatctcaaacttcttgtagaaaaaccagattcatattcctaatttagacataggatactacaagtcacatccttcttctctaggtgtctagttcatgtttttcctcctctcaattcctccccctacctcctgccccaggggcttctagcatgtaagatgcaggagaaattcctcccaagaacaccagcatctccaggagttaggtcaggaggcaaggctgcctggggtttctgagagagacagtccagtgggggatggtagggaaagatgacaggactctgtcttagtggaaccgagaccagagtcaggccaaggggggaggtcaagggactcagaactgttacacatgaaaagagctttggacagcctggcctcggcttctcacctgagcctgacaggggggtggggggaaaaagtaaaaggaagggtgatccctaggtcctctgaccagccccattcccctctctgaggaggggaacagccccacaggtggcataagcagcagggtac

SEQ ID NO: 914821 - DNA, 4001 bp, Homo sapiens
tttcctccccacatatggaagcagagctcctcctgttcctggaggcctctccttgggctcctcacccagagctgggccaggacgacgtgacgctggacaacctgttcagggtccacgagcacacaggagaagttggtgctgtgcagggcaggggtcagctgctccagcaccaaggccttgcacagctgcgtacctgtgctcccacgttcccggctggagcggaagggaaggaaaggtcatgagaaggccgcagaaggcctccttcccacccacctggctgctgcgaccctcacctggtgctcccctcccacagtcggcctgggaggtgctcaatgaaggaaccattgcccagccagtagaggatgctgaagttggggaagcggctgcaggccacacaggataagctcagcgttccatctagggacacaggcagcagttagctcttcagaagagcaggcccttcccctaccctgctctgctgtgccctccctgccagctccccccagtccccatgcatctggaacctagagaactgctctgcacaccacctaggtgggaacgtccgttacagaagtgcagttgtctccgagaggccctagccctaaacacggggaatgtgaggaatggtccttggttcacgtgatgaatcctcttctgaacctgtctcctcaggatgaccttttctagtgcccagcctcggtgacttgggagcccaggtgacaaaggcagtgctggatggctgctgctcctctgagatggccagaggccagcaggctctgggtggaggggctggccttggggtccactgcaaccaaggctctgggaggtcctgtgaccattacttatgtcttgagttctctgtcctatttgatagggagcatcttgggagctgcgccaagcctgcacccatgacactgggttggggagggagaatggtgcgtgctcagcccagctggctcagctggtggtacatgggcagaaggggactggcgctcaggagtcaacccgaccctgggaacctctgtgcccatagcccaccctccaccactgtgcttcttactcagtggcacttccacctctggccaggtcacttccaatgctggacactgcttagctgctgggaacactgggggctgggaggggcaggggtcctttgtgcttctaactgaggcagtggcagctgtggtggtctgcgagacaggtgtggctctgaccaggagagtgacgacgtgggcacacaggagcaggacccacaaagggctgaggtctgaggaaaggacagttacaggtcagcggctctggagacagagtgggctgcccgggtaaggatgtaactccagcccagagatgtctgggttctagccagggaatcagagcgggaagagggacccctcagcacccaccccttagccctttattgaacagagtacagagaagctttagactggagccagagctacaatatctgcccaggttcttaaagcaacagcaccaggtgcgctgggtggtttgccttggagtgaaggctccgggttagcccattgctccattctgttcatagacctcaccctaccccgcctgcccatgcgtagccccaaggcctacctggtgtccagttgtgtctcatggtcatgatgcatgcgtcaggagctggtgagcctggctctttatctgtgacaacgtcctcttctctggtgaaaggtgggggaggagaatggtaaaccactcccgctttttctcagtagctggcttttcctcagtagctggcttctcctcccgtagcatagcctggagctctttcagcacttagaaacagagctgggggggtcaagtgacaatccttccccaccccagctctcatgaccacaaatggttgtaagatgcttacctagtccaatcttaccccttcattagggaaggcaaaattgagacccaaagagagaatatggactcacccagtcacacagggaggcagtgctctcttcagcaccagagctgcttctgggaagggcaggatgccgagcaatccttctgggaaagcactgccccgaccctctatttcactttcactttttaaccagggaatcttgagcagctgtgacacctctgctttagccaaagttcagtggccagaaaccttcagctcctgggactcctactctccagaggataccagactgggatctctaatctacccccatgccacccccagggtcacctagggtatgaactagatgagtctctcacagatcaattctgtcccgcccaagtgtcaggactttggtgtccgcctcccctcttcacagccaggtctttgtttccatatgaacaggcatctgcttcctccttcaccttcacactgacattcaaggggacaactttcctaggcactggggaaccccaagttggaccacttcaggctcaatgccataccagtccgtccacatcctggcctttcccaggctacccactcccccagccaccagccccaaggtcggctacatctcccagcacccaccatcacaccctctgtctctcatcctagcccctctggccagagccacaggtctaggttcactagtagtcccagactcctacctggctcctaagaggtcctgaagagccttcctttccagaagcttccctctaggagctccaagactcaagttagctgtgtctagctgcgtgtgaacccaccacaggaaatacaccgagagcacttcctccttgtctgtagaactctcacggccaacccaggaactggcacacaagctcgagagccaaccctaacaggagggaagggcaggcacttcccggggaagaggcggactggctcaacactggctctggcaacagagtctacatcagaatatgaatcttgtcactgatgggacaaatggcgctggggctgcgggagggccaggattcagggtgaggcgtgtgaggaacctaggatgctaaatctaaggaggttttctctcagggtcatgcagttatccatggaggcagaaagaccagggctgggtgatccaatgcatgcatatattaagtgtggacaggagctgcatgtctgaggtttgtgactcctgtgattgggagggtgcaacggctggtgacagagccagggaggcccacagatggaactgggtttggtggatgcatcaggaacacagtcagctgtgatctcaaacttcttgtagaaaaaccagattcatattcctaatttagacataggatactacaagtcacatccttcttctctaggtgtctagttcatgtttttcctcctctcaattcctccccctacctcctgccccaggggcttctagcatgtaagatgcaggagaaattcctcccaagaacaccagcatctccaggagttaggtcaggaggcaaggctgcctggggtttctgagagagacagtccagtgggggatggtagggaaagatgacaggactctgtcttagtggaaccgagaccagagtcaggccaaggggggaggtcaagggactcagaactgttacacatgaaaagagctttggacagcctggcctcggcttctcacctgagcctgacaggggggtggggggaaaaagtaaaaggaagggtgatccctaggtcctctgaccagccccattcccctctctgaggaggggaacagccccacaggtggcataagcagcagggtaccatgggaagccacagctggggaagagaagccgagcctgagtgtggtcctcaggaaggcaggtggtggcgggacactgtcctcaggcagtgagaacatagagcaacctcagtctgaaggcaggcccaatgatgccccaggcccccaggccacaggacaggagcctggcattccaccactcctagggatgtcagcaggggaacagctgggaacagcagaaaggcaggcccaaccacccccagaccctcaggtctccgatgggggttaacaaaggcaagacacccctggggaccccagggaaagaggtgggaa

SEQ ID NO: 914822 - DNA, 4001 bp, Homo sapiens
gggaacgtccgttacagaagtgcagttgtctccgagaggccctagccctaaacacggggaatgtgaggaatggtccttggttcacgtgatgaatcctcttctgaacctgtctcctcaggatgaccttttctagtgcccagcctcggtgacttgggagcccaggtgacaaaggcagtgctggatggctgctgctcctctgagatggccagaggccagcaggctctgggtggaggggctggccttggggtccactgcaaccaaggctctgggaggtcctgtgaccattacttatgtcttgagttctctgtcctatttgatagggagcatcttgggagctgcgccaagcctgcacccatgacactgggttggggagggagaatggtgcgtgctcagcccagctggctcagctggtggtacatgggcagaaggggactggcgctcaggagtcaacccgaccctgggaacctctgtgcccatagcccaccctccaccactgtgcttcttactcagtggcacttccacctctggccaggtcacttccaatgctggacactgcttagctgctgggaacactgggggctgggaggggcaggggtcctttgtgcttctaactgaggcagtggcagctgtggtggtctgcgagacaggtgtggctctgaccaggagagtgacgacgtgggcacacaggagcaggacccacaaagggctgaggtctgaggaaaggacagttacaggtcagcggctctggagacagagtgggctgcccgggtaaggatgtaactccagcccagagatgtctgggttctagccagggaatcagagcgggaagagggacccctcagcacccaccccttagccctttattgaacagagtacagagaagctttagactggagccagagctacaatatctgcccaggttcttaaagcaacagcaccaggtgcgctgggtggtttgccttggagtgaaggctccgggttagcccattgctccattctgttcatagacctcaccctaccccgcctgcccatgcgtagccccaaggcctacctggtgtccagttgtgtctcatggtcatgatgcatgcgtcaggagctggtgagcctggctctttatctgtgacaacgtcctcttctctggtgaaaggtgggggaggagaatggtaaaccactcccgctttttctcagtagctggcttttcctcagtagctggcttctcctcccgtagcatagcctggagctctttcagcacttagaaacagagctgggggggtcaagtgacaatccttccccaccccagctctcatgaccacaaatggttgtaagatgcttacctagtccaatcttaccccttcattagggaaggcaaaattgagacccaaagagagaatatggactcacccagtcacacagggaggcagtgctctcttcagcaccagagctgcttctgggaagggcaggatgccgagcaatccttctgggaaagcactgccccgaccctctatttcactttcactttttaaccagggaatcttgagcagctgtgacacctctgctttagccaaagttcagtggccagaaaccttcagctcctgggactcctactctccagaggataccagactgggatctctaatctacccccatgccacccccagggtcacctagggtatgaactagatgagtctctcacagatcaattctgtcccgcccaagtgtcaggactttggtgtccgcctcccctcttcacagccaggtctttgtttccatatgaacaggcatctgcttcctccttcaccttcacactgacattcaaggggacaactttcctaggcactggggaaccccaagttggaccacttcaggctcaatgccataccagtccgtccacatcctggcctttcccaggctacccactcccccagccaccagccccaaggtcggctacatctcccagcacccaccatcacaccctctgtctctcatcctagcccctctggccagagccacaggtctaggttcactagtagtcccagactcctacctggctcctaagaggtcctgaagagccttcctttccagaagcttccctctaggagctccaagactcaagttagctgtgtctagctgcgtgtgaacccaccacaggaaatacaccgagagcacttcctccttgtctgtagaactctcacggccaacccaggaactggcacacaagctcgagagccaaccctaacaggagggaagggcaggcacttcccggggaagaggcggactggctcaacactggctctggcaacagagtctacatcagaatatgaatcttgtcactgatgggacaaatggcgctggggctgcgggagggccaggattcagggtgaggcgtgtgaggaacctaggatgctaaatctaaggaggttttctctcagggtcatgcagttatccatggaggcagaaagaccagggctgggtgatccaatgcatgcatatattaagtgtggacaggagctgcatgtctgaggtttgtgactcctgtgattgggagggtgcaacggctggtgacagagccagggaggcccacagatggaactgggtttggtggatgcatcaggaacacagtcagctgtgatctcaaacttcttgtagaaaaaccagattcatattcctaatttagacataggatactacaagtcacatccttcttctctaggtgtctagttcatgtttttcctcctctcaattcctccccctacctcctgccccaggggcttctagcatgtaagatgcaggagaaattcctcccaagaacaccagcatctccaggagttaggtcaggaggcaaggctgcctggggtttctgagagagacagtccagtgggggatggtagggaaagatgacaggactctgtcttagtggaaccgagaccagagtcaggccaaggggggaggtcaagggactcagaactgttacacatgaaaagagctttggacagcctggcctcggcttctcacctgagcctgacaggggggtggggggaaaaagtaaaaggaagggtgatccctaggtcctctgaccagccccattcccctctctgaggaggggaacagccccacaggtggcataagcagcagggtaccatgggaagccacagctggggaagagaagccgagcctgagtgtggtcctcaggaaggcaggtggtggcgggacactgtcctcaggcagtgagaacatagagcaacctcagtctgaaggcaggcccaatgatgccccaggcccccaggccacaggacaggagcctggcattccaccactcctagggatgtcagcaggggaacagctgggaacagcagaaaggcaggcccaaccacccccagaccctcaggtctccgatgggggttaacaaaggcaagacacccctggggaccccagggaaagaggtgggaagaagaaagcaagataaatgttcagctttccaacccagctcatggagctttattcagacgggagtgacaacatcctgcttcgttcttgctgcccttgaaggggcaggccctactgagccatattccctagaaacccaatgccgaaggcccatgtttgacctcccactttattcaagtcgcctaggactagggctggggccttcctagaagccccctctcagaacctgttctcacccacccaccactcccgttgtcaggcccagggaggacccatgaatgacaaaaatcatgtagggatattccctggactgggaatcccctgccagcttcaaggacatatcatctgacacagggagaagctgacatctgtcatattcttctgcctcacgtacacacacacacacacacacacacgcatacgcactcttaggctttcaagaaggaagtgatgtggcagagtgaccgctggcacgtgtcaccactccactgaaggatccactgaagaatgagcttgcacaaggggccgtcagtcatggctgccaacaattgccccat

SEQ ID NO: 914823 - DNA, 4001 bp, Homo sapiens
cactgaggggagcaacagacactggggcctaccagagtggggcgggtaggaagagggagggatcaggaaaaataactaatgggtgccacggcttaatacctgggtgatgaaatgatctgcacaacaaacctccatgacctgagtttacccatccaacaaacctgcacatgtaccccttaacttaaaaaaaaaaaacccaactgtaaattcaatggctactttaaaatattaatgttctttgatctctcagtagcctgtactgccgttgactacctccccttcattaaaacattctcttctgtaagctttactcacacattttcctatttctttttcaacttgcggttgctccttttctgtcgtgcaggcttcctgtcccctgacctcttgccttccactctcctgagacgttctccttcacaaccacgtcttcaagtatcatctatatatatgatatatatatgctatctatatgctgatagctctcaaatctgtgtctccaagtcagattcctcccctgaattgcaaatctgcataaccaacaacacactcaacatttccaccttgctgtattgtcaccttaactttaacatgtccaaaataaaatgcctcatcctccagttttctccatctcagtaaaaacaaccaagttcccaagccagaaccctggtcctcatctttgcccttactcactccccacaccaagttccacaattcttcgtcctaaagacttctggaatttgatcacttctctttttcactcaccctaattctagtccaagacatcattacttctacgatgaactaggcaattgcctcctttccacctgctcttcacaaagcatccaagacgatactgaaaaatggacaatctcattatgtcactatacagctttaaaaccttgcttttaaaataaagaccttcttatagcctaaatatgcttgcatgatctggctgatccttggagacctctacagtcttatgtcctgttcttttcctcttgtacccaatgctccgacccacagagatcatctatcctccagccatatggaactccagacaatttcctgttctctctgctctgtgccttgccccctagcctttggccatgcagtctactgaggctggaaagctctctgtagcctctgcctgtgaaactcttattctgcagtcaagattcagctcaaactgcgtcctctgtgaaaaccctctgccccccacaggctatgcttagcactcattacactggctagcaaaggcagccgccaccaccagacatgagcactccactccacgtagccaggagatctctagccttcctctcatccaccaaccgtttcagctcacccctggttgaggtcgttctccgtgttgtccagccacaggcgaacggcgactgcgttgccctcccggcactgagtgaaaatgtcgtccatagcagcgtcccggcgccgagtcccctggattggggaagcctgaggactgtggagtgatccagggaaggaggatgaaccccaagctttatcctctacaggagagaagtgtttgtgttgggggtagggggcctgagctgcgtccccggctagtgggggtctgtgaaggagttcggggctgcgggatgatccctggctgtgtcctctagacgcgaggtaaaggcgggtcagggtgggcagggggtgacgaagaggtagtgtctgctgaacggatgtccgagagcaggcaactagaccctatccgcgaacagagttgggggaagtggggaggttcaggctccgtatactctgggagaggggaccgggggtcctccccagggttggctccgttccttacttgggactcaggagaagtgaggggtgacagggggcgcgggtcctctcgcactcaccgggactcgggctgcaggatccttctccggggaactcccgtccggccgcgcccgcagcccgccgccggccccgccccgcccgtggcgctcttgggcagcgcgggcctccgtccctcccctcccaccgcctccctgcccttctagccgcgcctggctaaactcgatggttcgctgcgccgcgccggccgctctagcaacccctggctgtcacgctttggtttccgggtcggttctggcaggtctgagcgctccgacttccagaggagcgctgtgcacgtggagaagagcggggactcggcgaccctgccctcccgaccctcatgttcgaagagcctgagtgggccgaggcggccccagtagccgcgggccttgggcccgtaatctcacgacctccgcctgcggcctcctcgcaaaacaaggtgagtgactcgcgggagcaatgggagctgtttcaggccgcgaagcggacattggtggatcccagcgctgtgtgtattgcggggagggacacctgtggcaccgttaagggcgagtcctgatctgaagatccgagaacttccaaaagaaactgacgttgggtcagagagagttgttgagtagaagttggtgaagcgaagagggttcttcagacaggaaaaagtacgtacaagggccctgggacaagagagcatgttctgtcagagtcacaaacacaagtggtccttgtggttgaaatacatagtaaatgaaaggggcatatatgctgttcaagttcaagaggtagaagttttgcgtatattgagaatagaagccaatgaaaggttttaagcaatggaattatttcttcagatttgtattttgaaagggtcgtcggttacagtgtggaggatggattggagacagtaagagttgtcagtatcattgttcaaaggagggtgtgggaaacttagaatcagggtaagtgcctggcctaggattacctggtaggactgcaacacagaatcagccttcccgacaatacatcttctcctttgagcctctgcagatgtgagggccctgcttcctcaggcttttcttacccttcagtctgcctccaacatggaatcggcctgctttgtttcctcctttttcatcccctagccccattaccattgtccaagccgctggcctctctgtctgcaatttctccccttcagtttgttttctacactgcagctagagacatgttaaatatttaatatacgtgtgtgatcatgtgtctcctgtgttcagaagcctccttacctcttacagaaatgtatcagctctaggcaaaagctcaaggtgaagggttggaattcctggtctctggccttggtcttgttgcttgtggcctttgcattttcctttggggaaacctccattagctcatttacacattgaagaaagtgggataggtggtttctctgctctccagcttcccagaagttggggtggtgacataaaagttcttctgggttctggcaggcttgactgggaagaattcagatgcttctgccagtctgaatcaggtccacatctctcccttcttgttctccaggcctcatccattctctttaggcccactgtcatcccctgttttcctccagggctccaagcgccgccagctcttggccacattacgggccctagaggcagcatctctttcccagcatccccccagcctatgtataagtgactctgaggaggaggaggaggaaaggaagaagaaatgccccaaaaaggcatcatttgccagtgcctctgctgaagtagggaagaaagggaagaagaaatgtcaaaaacagggcccaccttgcagtgactctgaggaagaagtagaaaggaagaagaaatgccacaaacaggctcttgttggcagtgactctgctgaagatgagaaaagaaagaggaaatgccagaaacatgcccctataaattcagcccagcacctggacaatgttgaccaaacaggtaccattggatgtgtatatgtgtgtgtgttggtgtgtgtgtgtcggggggtcagctggttctacatacaagagtgattatccactgccattaggattggggctaatggtgtactcaggcaataagaagtacttctctgcaggc

SEQ ID NO: 914824 - DNA, 4001 bp, Homo sapiens
gttcatcatagtgccttaaattaaggaacccaatgtagtctgatttcttcacccattattctgaaacaacactcacagatggtcaaatacatcctaactgcacactgaggggagcaacagacactggggcctaccagagtggggcgggtaggaagagggagggatcaggaaaaataactaatgggtgccacggcttaatacctgggtgatgaaatgatctgcacaacaaacctccatgacctgagtttacccatccaacaaacctgcacatgtaccccttaacttaaaaaaaaaaaacccaactgtaaattcaatggctactttaaaatattaatgttctttgatctctcagtagcctgtactgccgttgactacctccccttcattaaaacattctcttctgtaagctttactcacacattttcctatttctttttcaacttgcggttgctccttttctgtcgtgcaggcttcctgtcccctgacctcttgccttccactctcctgagacgttctccttcacaaccacgtcttcaagtatcatctatatatatgatatatatatgctatctatatgctgatagctctcaaatctgtgtctccaagtcagattcctcccctgaattgcaaatctgcataaccaacaacacactcaacatttccaccttgctgtattgtcaccttaactttaacatgtccaaaataaaatgcctcatcctccagttttctccatctcagtaaaaacaaccaagttcccaagccagaaccctggtcctcatctttgcccttactcactccccacaccaagttccacaattcttcgtcctaaagacttctggaatttgatcacttctctttttcactcaccctaattctagtccaagacatcattacttctacgatgaactaggcaattgcctcctttccacctgctcttcacaaagcatccaagacgatactgaaaaatggacaatctcattatgtcactatacagctttaaaaccttgcttttaaaataaagaccttcttatagcctaaatatgcttgcatgatctggctgatccttggagacctctacagtcttatgtcctgttcttttcctcttgtacccaatgctccgacccacagagatcatctatcctccagccatatggaactccagacaatttcctgttctctctgctctgtgccttgccccctagcctttggccatgcagtctactgaggctggaaagctctctgtagcctctgcctgtgaaactcttattctgcagtcaagattcagctcaaactgcgtcctctgtgaaaaccctctgccccccacaggctatgcttagcactcattacactggctagcaaaggcagccgccaccaccagacatgagcactccactccacgtagccaggagatctctagccttcctctcatccaccaaccgtttcagctcacccctggttgaggtcgttctccgtgttgtccagccacaggcgaacggcgactgcgttgccctcccggcactgagtgaaaatgtcgtccatagcagcgtcccggcgccgagtcccctggattggggaagcctgaggactgtggagtgatccagggaaggaggatgaaccccaagctttatcctctacaggagagaagtgtttgtgttgggggtagggggcctgagctgcgtccccggctagtgggggtctgtgaaggagttcggggctgcgggatgatccctggctgtgtcctctagacgcgaggtaaaggcgggtcagggtgggcagggggtgacgaagaggtagtgtctgctgaacggatgtccgagagcaggcaactagaccctatccgcgaacagagttgggggaagtggggaggttcaggctccgtatactctgggagaggggaccgggggtcctccccagggttggctccgttccttacttgggactcaggagaagtgaggggtgacagggggcgcgggtcctctcgcactcaccgggactcgggctgcaggatccttctccggggaactcccgtccggccgcgcccgcagcccgccgccggccccgccccgcccgtggcgctcttgggcagcgcgggcctccgtccctcccctcccaccgcctccctgcccttctagccgcgcctggctaaactcgatggttcgctgcgccgcgccggccgctctagcaacccctggctgtcacgctttggtttccgggtcggttctggcaggtctgagcgctccgacttccagaggagcgctgtgcacgtggagaagagcggggactcggcgaccctgccctcccgaccctcatgttcgaagagcctgagtgggccgaggcggccccagtagccgcgggccttgggcccgtaatctcacgacctccgcctgcggcctcctcgcaaaacaaggtgagtgactcgcgggagcaatgggagctgtttcaggccgcgaagcggacattggtggatcccagcgctgtgtgtattgcggggagggacacctgtggcaccgttaagggcgagtcctgatctgaagatccgagaacttccaaaagaaactgacgttgggtcagagagagttgttgagtagaagttggtgaagcgaagagggttcttcagacaggaaaaagtacgtacaagggccctgggacaagagagcatgttctgtcagagtcacaaacacaagtggtccttgtggttgaaatacatagtaaatgaaaggggcatatatgctgttcaagttcaagaggtagaagttttgcgtatattgagaatagaagccaatgaaaggttttaagcaatggaattatttcttcagatttgtattttgaaagggtcgtcggttacagtgtggaggatggattggagacagtaagagttgtcagtatcattgttcaaaggagggtgtgggaaacttagaatcagggtaagtgcctggcctaggattacctggtaggactgcaacacagaatcagccttcccgacaatacatcttctcctttgagcctctgcagatgtgagggccctgcttcctcaggcttttcttacccttcagtctgcctccaacatggaatcggcctgctttgtttcctcctttttcatcccctagccccattaccattgtccaagccgctggcctctctgtctgcaatttctccccttcagtttgttttctacactgcagctagagacatgttaaatatttaatatacgtgtgtgatcatgtgtctcctgtgttcagaagcctccttacctcttacagaaatgtatcagctctaggcaaaagctcaaggtgaagggttggaattcctggtctctggccttggtcttgttgcttgtggcctttgcattttcctttggggaaacctccattagctcatttacacattgaagaaagtgggataggtggtttctctgctctccagcttcccagaagttggggtggtgacataaaagttcttctgggttctggcaggcttgactgggaagaattcagatgcttctgccagtctgaatcaggtccacatctctcccttcttgttctccaggcctcatccattctctttaggcccactgtcatcccctgttttcctccagggctccaagcgccgccagctcttggccacattacgggccctagaggcagcatctctttcccagcatccccccagcctatgtataagtgactctgaggaggaggaggaggaaaggaagaagaaatgccccaaaaaggcatcatttgccagtgcctctgctgaagtagggaagaaagggaagaagaaatgtcaaaaacagggcccaccttgcagtgactctgaggaagaagtagaaaggaagaagaaatgccacaaacaggctcttgttggcagtgactctgctgaagatgagaaaagaaagaggaaatgccagaaacatgcccctataaattcagcccagcacctggacaatgttgaccaaacaggtaccattggatgtgtatatgtgtgtgtgttggtgtgtgtgt

SEQ ID NO: 914825 - DNA, 4001 bp, Homo sapiens
gcacagagagtacaatggtgtttaccagaggccaggatggttggcaggggggatggggagaatttggtcaaagatacataatatcagttagataggaggaataaatttcaagaaatctattatataacatgaatttatagcaagctgactatagttaataatcatatattgtattctttaaaaaaatgtaaacagtgtagatgttatgtactcttaccacaaaaatgataactatgtgaggtaatgcattgctaattagctagatttaacgattccggaatgtacatacacttcatagcatcatgaggtacacaaaacaatgccatctgtcaaaaaataataattatatgtagcatttcaaaaagttcacagcatcaaaaatatttgtaggggtggggggacagagagcatcaggaagaatagctaatggatgctgggcttaataccgaggtggtgggttgatctgtgcagcaaaccaccacagcacacgtttacctatgtaacaaacctgcacatgaagcccagaacctaaaacaaaagttgaagaaaaaaaaaattcaagacgtttctatctgatattggactgctttgtcactttttcttttggtcttcctagtgcttatttactacaggataaaattagcacatgctatttaatgtgttcattttaagtactatgttgttttctatgtgttaattttatctcctccaggtgagaccatttttattaccataggtctaaaatgacaagattaagtccaaacagacagtaatcactcaacagctatttattgagtaacttaaagattcaatatgaaagcaaccttgatcaaagctttccagttgatatattgtgaaacagggttttttcctaaacatgattctaaaaaacaagcaaacaaacaaaaatcctccccaaatgaaaaactccagtcactatttagcaatactaatttcaatttatcaaacagaatcagcccaaaaatttcaacaggtcagtgagatttaaaacaattcgatggcaagaatttcaatgaggtttggctctaattaaaaggtatcacagatcactgtcaaagtcaataactcagtagtgcggtaatgatttgggagtccttttcaatttagacatttgtcaatcatgattgcctttaaacatcagttacccactgtccctgctcagttttgaaaaaaaaattaaatacaaaaatacaactcaaaatacatgttttttccacacataaaattggtattttagtaataaactctcgattcagggttcataaaataaagtaggtatacttctaattcttcctagcagttttttgggggaaagaaaccctaagtattttctgttatttgcagctgctttaacagcaaacgacaattaaatgtgtgaacaaggttgtcagagtaacacttgtcatttacaccgcttaggaaagacatccaagacttccagaaacactaattaaaattaacaaaagcttcttatcggaacttgtcagagagctatagtttgtcagacacaggaaaaccagatagcctcaaagttcaagagttttcgctctaaggtttaattccaaaccacctaccactaggcactaacgaactaagcccagacgctcagcaaccaactcattaaggtaagagatcccatcctttccatataacacaaaattaagaaaaagacatcgtggggaaggcggagtgaattttctatcagaaatcagaagataaatgagcaggaaaaaagtctatcctcacacacagcggagaaaggtgctagcaattgcttgataagccctaagggtttattgtttcaccaaccttttctttaactcaatgtgaatgaaggcactcaaaaggagaagaacgttacgtgatattacctacctcgggccccaaagaaccctggagaccctcaaccaggacacaggtgggcctttctcacctgggccccgccgaagtcgaccgtcctttcgtagggcgcacttttcagcaatacgccttccgattggttggctcgggactgacgtctcagtcctattggttacgagagccgcggttggggcgaggaggcgggagtttggcactggttctgataggacgggtgtttgcgttcccagagttcctattgggttaacactggaggctctaagatggcggcagtggcaacctgcggtagtgttgccgcgagtactgggtctgcagtggcgacagccagcaagagcaacgtcaccagtttccagaggaggggtcctagagccagcgtgaccaacgacagcggccctcgactggtgtccattgcgggcacgcgaccgtcggtgcggaatggacagctgctggtatcaaccgggctcccagccctagaccagctcttaggtcggttcagagcggagatctgggctcagccgaggggaaacttagggaggggacctgtcggggaagccactttgaccccacatctctttctgacccctaaaccttcggaggaggagagaatagcctggtctgattgagatggaggggaatacgggttgtgtggagacttctgagcgctgttaactaaacatgttttagtgccctcgctctctatttcattccctgccctccaaccccttttcatattacggaggaattcgtacatgctttttaccctgaaatgctttctagtcaagggaagacattaatttatggagatggtttggctttcattcaggatacctcccttctgctttctccaggcagctcacggtttagaccagcctgcaaaagtttttataattgtgagagacagacttcattagaagatgctggaaaaaaatgatttcccctctttgaccgtcagactgcctgttctctggttctaaatcttaaaacattttggctttaagagagcgaatgttaaaggcttatgttgacacataatccttataaagtattttgagcctgtcgttgatatttagatagtgtctgcgttaaatctgtgtatatattttttattttttctatatacattttgcttcccagtattgattgctgctacattccatacgacatctttaaatttaactcacattttaacgagaaaagtctagttcttaggctttcctttaaaatctctggaattttttatgagaagcctgctgaagaatatgcttgtttcataactgttatattcaaaggaatgaccagattaagttggtaggacagatttgctgtgttaataaagcttctagattaatttctgaatgctgtttcattaaaaccccgtctgtgtttacataacttttttcatagtgtgtgatatgtgtctgttaaatcttgtacactttcataaaatataactcattgcttgttcttgtacttcgtttgacatttctttcggttattttcccctcaaagtaggcttttcataggtttagtgcagagaaagtaagaagaccagcaacctatgagaaagagtatggcttcttgattctctcatttcattttccggttatttctagataagtttaagtatttttcacttaattgtttcaaatatattttcctcctgagttgcatggtactgtaaatagaagtgattcaaaatatctagttagcaaatatatagtccaccgtttttcccttgtgagcctcagttgatatcctcttacatttgaactttaagtttggtagctatttctaggccttatatattttttaattcaatgggatatgtaacttcatttacttgatactaaaactttccaaacaaaaaggttatgtttctattataatgtcttcagttcctcattagaataacaaaatgttcctagtgtacctcctggcacttagtagattctcagtaagttgttgaatacaagaaaaataatgtgtagaaaaaaactgagacaagaaattatgaaacatgtagaatggagtttcatgtttgagctctaaaaacaaattaagtgatatgaacagtctcacaaaaccagtgaccatgtgtactg

SEQ ID NO: 914826 - DNA, 4001 bp, Homo sapiens
ctcagatcctcaggaaaacctgaaaaccaatctaaagtagccccagccatgatcccattcattgattgtaattctctgcagagcacttgcgtgcttgtttacctgttgcttactgcctgtccctgcccactaaacaattgctctctgagggcaaacccctgtctgtcttgctcatcgttgaatgcccagagcacagcagtgcctggcaacaaggactatttgttaaatgaattaatccacccatcaactctacacctagaaataaacatcctataggtgctcatcccaccacacaaagggcaccaaataaacttaatctgcacaggttagaactgaccaacacatgttcaaaacccctgttcccagatgccaagggcagcaataatcagggcagggccaaatgggcaggatcgtacaggctttgggctgaaacctcggctctgcagccagccaatcatgggcaagcccttttcactgtcatccctcaccttcccctaacccttctgcacccagaccacagccctggcaaagcgcaggacctcaggccagaaaagagaaaactgtttaaggaagccaaaggtttgcagagaaaagcaacaactggctaactttttaaaaagtatttgttcaaatgggcaacgtggatgagagcttctttcacaaagtccatgaaagcaattggacttctttcacggggaggtttgcttctagcagaccttagcgcaacgatttaaaaagggttaccgtaagttaaaacagaggtgaccctgaaaaagaaggaatcagtgtaccaagaatcaggctcctggaagagcagcaaaaatctcttcttcaacccatgtaagcacctgcacacagataaagagcactcaacacctcaccgaggaagacactctccagtcttcctcctctccaacacttcttccacaccatacaccagactgaaggccccatcgtcctcctctatgactcctgtccttttcagggtgctgtaagttgggcgcctaccacacctctgtgcagaaagcgcatagcagctgctcccatttactgagtcatactccatgcccgagtcagacatcatctcatttaattctcaccacaaccttgaggatacgcatgggcagatgaggaaattgaggcaaagagaagtcaaaatcagccggtaaatcaggggcataaatagaaccgtgcccttaaccacgggctataccgcctttaaaccgtgcccttaaccactggctataccgccttctagatatcaacttctgaaaggcaggtgcccagtcttggctctgggcaaccccgcgagcaacccatgttagctgaatgagactgaaccgctgacagcgaacaggcttggggagtgacaaggggcggcccagcctccggaaatggtcagtttaaaatgctgctcagctgggggcgggggcgttgagagaggggtttaactgcacagaaatgccatctggcatcattccgccaaacaaccgggttggtttcgggcttcctgcgcgtccaagtcaacactaatcctcacaggcacaaggtgccaagcagccgggagcggagggaacggggctatgctctaggaagctgagggcctaggtggaaagggtgggaggcatctcgggcccgagaaccaaggcaggcgacctcgccacttggaagaggtgaccctcatatgcccaggtagccaggggctggggtggggagtcacgaccctggtccggagtcgacagggacggagcagaggaccggggaaaaaatcgcgaaccaccccccaatccccacgcccacgcgcactcactcgactgcgccacgtcccctgaaggctgctccgatccaagtccggtggtatccctaggtaaggccccgcttgcccagacccacttggctccgggccttcgggactcaccgcacgggaggagcaaccaggcggcgcagcgcgggcgaaaactatgattttcaaaactgaaggctcagccaatcctcggcaagtttgtccgggcggttgcaaaattttaagccaatcaaataacaggaagtaccagtcagccctcctattggccatatccactagcaatctgcgggactaagaggcggggaaaggaagcgaaagactttaagccccctcagcttccgggtgctgcggccgcggccgagagaggaagtagatccccgcctgggaggagcccgcagacctggaactacgagtcccggcgagcactgcgaaggccacgcgcggctttctttcttctccaagcacggtggcagtcttctgatctctgctgcttttttttcctcataaaaacatgtatgtatatacttacattgctgaaagaccagctttttaatgtaacaaattatctaggtacagaagtcataggttcctcttcccatgagaaaaacattcctcaaaatacaaaccaaacagcatcccagagggagtaaaatttcattgtactgaaacatatacaaattaaggctaccttggtatataaacaatttagaaattatgatggaatagttccaccaaatcatttacgtataggaattcatgccattttttaaagaattggtagtggggctcaattcaaacaatattatgcatccttacattcaacttaatacacttagcagctataaggagtgtaactgtaaccccacttcctgaaatctcaggagtaatgttaaaaatccaaacccatcaaaggccagggtgttacggtatttggctcatgaatcgaaaagcctaatcatttcaatttaatctttacaagtagaacaagatccaaacatgggacgttttcttatttttctttgcttttgtggttgtaatgcccttttggttttctgagcaagctgaatacatctgataaatactaccattggacaaaggatctaaacattgagatgttttactaaatcaaggtttcaagttggcacaatgtttttactaagtcatatttcaattagttcatctttccaatatggaggcggggggggaaagacaaggactaatatgtcctataaagaatctctggccggcgagatcccgccactgcactccagcctgggcgacagagcgagactccgtctcaaaaaaaaaaaaaaaaaaaaaaaagaatctctggccgggcgcggtggctcacgcctgcaatcctagcactttgggaggccgaggcgggtggattgcctgagctcaggagttcgagaccagcctgggcaacacagtggaaccctgtctctactaaaatacaaaaaaaaattagccgggcgtggtggcttgcacctgtaatcccagcgactcgggaggctgagacaggagaatcgcttgaacccgggaggcagaggttgcagtgggccgagatcgcgccattgcactccagcctgggccacaaaaagcaaaaaactccgtctcaaaaaaaaaatctctgccgcttttgagaagtaaaaacaaaacgccttgtgaatggcaacggagtgtgcgtttatctagagccttctgtcatctcttgggcgacagaatccttggtcacctaccctggtactggacgtttcttgagagaagtggttctcatgcagaggaggttttatcccacctccgccccccacatttggcagtgtgtgaattcatttgggtttgggagaaggggttagtggtatttggtgggtaaaggccagggatgctgctgaacgccatctagtgcataagacagtccccacagcaaggaattacccggccccagataccagaattgctgctgttgagaaactgctttagacaaagtcactttactctgtgagtcaaggttgctgttacctgtaaaataaggcagttcaatcttgaagagatttgtacatccacggtcagctaccaacagatagtttaccctgttcccaggtcgtctgtagtatttttcctctccctttcttccctctctttatcaattctgtttttgcctttgttattttactcagtttaccaactgactcca

SEQ ID NO: 914827 - DNA, 4001 bp, Homo sapiens
cactcaacagctgacccagcacctgcctccctccccagcctaattagggggtatgcctcagagggggctgggaagcaggacttggggatattcatctgcctagtctgtccctccttagtctccccctactgggcctcagacttgaggcctaagctaagacttatagggccccttccttgttgggtcaattgcctaggctagagtttttcaacctccataccactgacattttggattgcacagttctttgttgtgggggactctcttgtgcactgtagaatgtttagcagtatccccggcttctacccactagatgtcaatagcaccatcccagttgtgacaattaaaaatgtctccccagctgggcgaggtggctccacctgtaatcctagcactttgagaggccggggcaggtggatcacttgaggtcaggagttcaagaccagcctggccaatatggtgaaaccccatctctactaaaaatacaaaaattagctgggcttggtggcgagcgcctgtaatcccagctactggcgaggcagaggcagaagaatcacttgaatccaggaggcggaggttgcagtgagccgagattgcactactgcactccagcctgggcaacagagcgagactctttctcaaaaaaaaaaaaaaaaaaaaaggtctcccctggtctaggctaatgtgcgccccgaccaaagatgtcaggagaacaaaggggtaaggaaggtacagtgggacaggagtttgggagggggttcacagagctaagaaagatctaaataaagatctaaataactgatctaaataaagcagcccccacagattcccactcactgggcccacagaagccaactcaatgtcagactgcagggcaggaggtacaaagccgctagaaggctgcaaaaccaagagtgctaactcaccccagcaccactaccaaccacactgggctgaaaggcacagccacaggacctggcccactcagagaagcaccaagtctggctctgctctcactcagcactcatagctcagggctagggcagccaggtaaccagggctcaagcccagagccagggctcaaacactcactcattggttcagaaataatggcaaggtcccatacagcctcagcctctgcttccccaagccttcctctctacaccacccatcaccgcccccaccacccatacacggccaggcagaaccccaaagcaccgaaaggggccctaaggaagctgccaggcatccccacacaccccgtcagtccctctgccccgactccctctcctgctcaccactcagtccctatccaaacgggactgcacacaacgtggaatgcacatcctctcccctgctcccttctacctggaggatgcctgaaggggtctgccggggaatgcccgaatttttcgtcatcacagtcacactgggccacagaaccccatattctctaccctcaaggctcctgaaagtgcccccagacacacagcaggaagtgcccctgcgtccctcctcagacccaggagaaagccaaggctcccactctggggggtggaggcgggtctggcgtcccaccgccccagaaaccctcacccgggccctttccacacccggccgtgcccgcgctcccggtccacgccagcccgcaaggagcccccgccccactcacaggacgcagagcgcgaaggcccccgccacgctctcgctgtctcggaccaggaagctgccatcgcggcccgcccgggccagcagctcctccgcggccgcccggctcaggtcgcggtggtaccaggagggggcctggctgcccagggcgccccccgggcccggcgccccgcaggccgaggccatggcccgcgcagggctcagcaccgcccgcccccgccgccccgcgccatccgccccgagacgctcagggctgaggctggggccgggcccggggcccgggcttgaggatccgtgggccggacagagccggggatcgggactcagcactccgccgcgcaggccgcctcgttcaccgcgcagccgccgctgcctgcagcgccggcctcaacttgaagagaaagaaaagtttgttcagaggcggcgggggaggggcaggagcggagcgcagggccggctgccgccccctccccctccgctcggcccgcagcccgggccgcccctgcccccagctcctcctgcggggacggtgcccccaccttcccgaagggcccgggacctcccagaccccacaatgatcctgcccccatcattcacccgaggagatccagtccccaaatccccatcgaaatccgagtccccccatcctggccccgacacttcgggatccaggcaccccctggagaattcagcgcttctcagttctcccaatgatatgacccctaagccccataaaggtctgattccactccatggctcttcctctcgtcccccttacagcttggctgcatcgagttccccaaacctgcgaaggatccaggaccaccccctacccatcctcttccctccacccaagcgggcggggcccccaactcctgcgaaatgcagccccctcttagatctgaacccccaactccacgggaaccgtcccccggcaaagcctgcggggagattccctggctaaccaggcttctgaagattcttactctggcggggggcccagacgaggtgcgacgttctcgagcctctcacgcagcccctcccagccccgcagagcccttccccctctcggccaagttccccagcaccaccccccacacccgcaggccgggccttgagggggttcagcagtccgaagccaggaggatccctggcccgtctagtagaaagttccctcccgggatcccggccgccgcacgcagacccccacctcccgggctgctccggcgcccccttccccggacagcggccctgggctccaggcggccacttaagatggccatccgcgcgcgcccccgccctccgcgccgcccgccccgccccgcgccgccccggggagccgggggcagcaccgcgcctcgcctcaccccgccccgcgcctcggtcccggagccgctggcccactgggtgacctcgggcaagtcgcggcgcggggttgagcgtcggcttcccgctctggaaaatggggatcctgtggcgagggccggctctgggggccgagctcgtaccgcgctcggcaccgggcctggcgcccagcccgcgctcccgaacggcggctatttttattattaattaaggagaaacgaaggtgacagctgtgtaaactgtaaagcgcggctgcggaacgaacgggtattattagcactcgcccccgccccagcggctccctccgagtcagcaaactcgcgcctccgcgggccggacgcccagcggggagctcccagacggggtccgctgcaacgcccccctagcttcctcccctccagccgagggcggaagggggacgcggcagccgcaaagggggcggagcccataaaagggtctggcccgccccctcccaaaaaaagacctagccggtggcggcgtctccggggagtcgtcttcctgccccgcccctccgccccctggctccttaaaggcgcaggcctccagccgggcgcccgccgccaccatctcctgggccgccgtgggagaatccctttaacctgggagagaactttcactttgctacgttgaacctgttgacggagcccgggtcagtccctcgagctccttcctctatttcaaatatgcattgacttaacccagctggagcagagcctgggacgtggaaggggctctgtggggccttccacactagataaatataataactaagagatccacccacccacccaacagtgcctccagaacccaataactcatcctacaatctgtgccaccgttctcatcagccaccttttagtataagaaaagatgagcctgatgtgaggggaatccttggtagtgggggagagacctggactgggagtctgcacacctgggttctagtc

SEQ ID NO: 914828 - DNA, 4001 bp, Homo sapiens
gcataagctgtggctgcagacggctgccagcttgggccgcgaggccagggtgtgtgactgtcccggggctgcccagagctggggatagcgggtggctctcggcagcctctccccaccttcccagccccccgccctgcaggaccccctccctcagcccagcctcctccctccacagggactccatcagaaataactctaaaaatagaacctgggagggctaggtggggggaaaattgctggaatgttctcattccctttcctgaacaaggtctctggggactccaagagtccagagctactgaacaagaagtcacttctcagtggccccaccacccctggcccctcagagacccccgcagctcccatactggaccctgagccacagggtgggggcagcaggcagccgacaggcatggccgctttggggagagccactgcatgctgggcctggccggcgttggcacctgtgggcacccagagagcgtggagagagctgggaggggctcacaacagtgccgggaagtggggcttggcccagggcccccaagacacacagacggcacagcagggctggttcaagggctttattccatctctctcggtgcaggaggcggcgggtgtggggctgcctgcgggctgcgtctagttgcagtagttctccagctggtagagggagcagatgctggtacagcattgttccacaatgccacgcttctgcagggacccctccagggccaagggctgcaggctgcctgcaccagggcccccgcccagctccacctgccccactgccaggacgtgccgcgcagagcaggttccggaacagcggcgaggcagagggacacaggaggacacagtcagggagacacagtgcccgcctgcccgccagccctaggtcgcactcccacccatctccagccgggctggacccaggttagagggagggtcacccacactgggtgtggacctacaggccccaacgcccacatgtcccacctccttcccccgccccggggcagcgtcacagtgggagcctgaacaggtgatcccagtacttctccccagggcctgtccccagcatcttccccatctcctgactatggagctgccgtgaggcctggcgacaggggtctggcccactcaggcaggcagccacgccctcctccgggcgtgatggggtgttcgcccagaggcaggcagcgtggggcaccctgtgaccccaggtcacccaggactttacttaacaaaacacttgaatctgcggtcatcaaatgagggtggagaaatgggctgcggggcatttgtttgaggggcgagtggagggaggagcgtgcccaccctctgatgtatctcggggctgccgaagccaacaccgtcctcaggctgagattctgactgggccacagggagctggtcacttttaggacgtgaccaagagaacttctttttaaaaaagtgcacctgaccccctgctgggtggcagcctcctgcccccttctgcccatgctgggtgggagcgccaggagcagggggtggctgggggcggccaggggcagcaatgggcagttggctcaccctgcaggtcctctgcctcccggcgggtcttgggtgtgtagaagaagcctcgttccccgcacactaggtagagagcttccaccaggtgtgagccgcacaggtgttggttcacaaaggctgcggctgggtcaggtccccagagggccagcagcgccagcaggggcaggaggcgcatccacagggccatggcagaaggacagtgatctgggagacaggcagggctgaggcaggctgaaggccaggtgccctgccttggggcccctgggctcacccccacatgcttcacgagcccagccacgtcctccctgctgcagagctggggcctggggtccagccaccctggaatcctgagcccacctgacgcaaaggcccttggaacagacctgcttgatggcctcttctgatgcagcctgtcctggagggctgagggctgctgggcccccgctggctttatagtctcagagcccatctcccctacctctcaacccctgccgcctggcccattagggcctggggtgggggggtcggcagatggctgggggctgaggctgcaatttccggaccatttccctggtgctgggtctgtgggaagatctccttggtcgtcagcacctcttcctcaggaccagcgggtcattagagtcttaaccaggggcccggtggccagacctgtccctgctcacagctgggggcaaatgtctccaggagagcaaagccctcacctgggccactttccacattagaccaggagagctggaggctgcagggcggggctctttgcgctgctgtccccagacccctgtccccacacccctgtccccacacccctgtccccacacccctatccccacacccctgtccccaggacccctgtccccacacccctgtccccagacccctgtccccacacccctgtccccacacccctgtccccacacccctgtcccccggacccctgtccccagacccctgtccccacacccctgtccccacacccctgtccccacacccctgtccccacacccctgtcctcagacccctgtccccagacccctgtccccaggacccctgtccccacacccctgtccccacacccctgtccccacacccctgtccccaggacccctgtccccagacccctgtccccaggacccctgtccccacacccctgtccccaggacccctgtccccagtcccggatggcccaagatgccgccatggatgggccaaggtggtgggggtgggagagtgggagtgagggaggggtcccctccctgctggctgcctagttcccaccctgccttaggacagcagccccagctgaggccctcagctccccagggtggcagaaggagggcatgacctggggacctggggacaagcagcaagtcctcagcaggccactcggacctcatcttccgtgtgatctgggggtggcggcaggactctgggggtgggcaggtgtgggaagctgtgcactggcccagctccgtcctggccccccaggcaccctctcagcccccactcctcttctgggagcccatctcccctctcctggccaggtcccatgacaccatcacccccatagtgtcatctgggctgagcccctggggtacacccctccggccctcccagctccccagaacaggcacctggaggtccagcctgacccatggtgagggggcatgggctccgagccctgctgcctgcagcccctacctgcctcttagcaccaggggcaggatcaggaggtcccagaagcaggaggatgagaccatgggggcaggcaggttggagtatcctgtgccccggcccctcgcatccctatgtcccaccctggcctcagcctcggaacctctcggggccgctctgcacacacccagcctttggctctcctgccccgagcgggtttggtagtgggcaccagctatctgcaggacccctcccttccgccctttccaccctgagccatgccacagcaggacatgcggtggctgccccaggacgccacagtgctctgaggcccggcagctggagaggacatgggtgcctccttgagaggagtgtgtagggagggaggctggatggggggagcccaggtaggagggcagagccaggcgctggcagggccggggggaggcaaggcaggcacttccccagggcttcctgggggctcacagcccttcagagacacccccagctgcaacctcaggggctgggcactaacaaggtgtgtgaggaacagactgccaggctgggaaggaccaccatgcccaggagggccttcgtggatgagtaggagtttgccagtgttgtcggccggggagctgagatccaggatcccagcagcgtgtagtggggtggctggagggaggcagagaccttgaaggccagctggtgtcccagcaccccctgcaggatgccct

SEQ ID NO: 914829 - DNA, 4001 bp, Homo sapiens
caaacgcctagaatgagacggtttattcaccgcaggtgcttccctctggaaccttgctcacacacacctaagtcaccctccacatcttggacctgccaaaaatgacgaggggttgttgcagaaactccttctaacttcggcacataagatcagaccccaccccccaccccccacccccgtcctggactctgtcaaatagctaaatctagaggaacttgattcctacccaaaagctcgggaatgtggcatttttgacctggaagaaagcttccagatcatttcatacaactccccctcccccgcctccgccatcttgctatgaggctcccagagcccagagaatcttgacctattcttggaggtcctcaagcaaaggcagcccctggtctcccttgagccctgttccaaagcttgaactctcttactgacagaaagatctccttgacatctaacctaaatctctcacatgcaaactatgtcaatttgctcacaatatgtattcagggagaaggagctcaactcagtccccatgacaaaacgaccacgccgaggtcccactgcagccttctcttccttaatgctaataatctctatttcttttttcaggctctggctgaagctaactgctgctccctggactcgaacacacacagtagctctctgatattaactctcctcctcagctctctgggggcccagggctcagaaggtggccaaatcattcctctcagacaagccagcttcaactctaccctccagtcatccagaacagcctgattctactccccaagttccctgagaggggcctcagttcctgtttcaacaagtgctgtctagggctggggacagggcttggtgccgcctggctgggcattaccactgaaaccacagtcttacagactgtttgcagaatcttctctctgagtctgtttccggtagggcaggtggtatgataagaatagtctcagccgggagtggtggctcacgcctgtaatcccagctctttgggaggccaaggtggatagatcacaaagtccggagattaagtccatcctggccgacatggtgaaaccccatctctactaataatacaaaaattaactgggcgagttgtcatgtgcctgttaccccagctactcaggaggctgaggcaagagaatagcttgaaccaatgagtcggaggttgcagtgagccagtgagccaagattgtgccactgcacatcagcctggcaacagagtgagattgcatcaaaaaagaaagagagagagagagagacagaaagaaagaaagaaagaaagaaagagagagagagaaaagaaagaaagaggaaggaaggaagaaaggaagggagggaagagagggaaggaaaggaagggaaggaaagaagtctccaattcttcctcaaagaaacctgttttgcatcctgcctctactactttctagtgatgagtccttggacaaatcacttaacctctctgagcatcagttttcccatatgtacattggggaacataaaaatctctgcccagctcatgaggttgttgaaagtatgaagtgaggtcaaggatgtaaagcacctggaaaactaagatattttattatatgctagaaatagaatgaggcttagatcataaacagatcgatgttagcaaaaaagcctcaaagttcttttatttccaggcccaaactctgtgtctgggtttcagggtaagagaggaacagacttggtttgttagatgttccctggaggcacttggcataaatgccccccccccacttcccaatacacacacacacacacacacacacacacacacacacacacacacactcacatccaccttcccagatacatacggcacagcacagcctcctggactcctggactccccatagaccccagccacctggaccttcgctggccgcctctccattgccagggggccgtctcatggctccagccttggctgcagcgactccaagtctccttacagaggcccctgtgaacagcttctttccctttgcccacccttctgggccatggccctgagaaggcctgtgactcaaggcaaagcttgtccaaggcagttcagtactgaggctgcccaagggagctcagagttgaagcttcctccccctcgaccccctcccctctgtctgcctgacttctcaatgctgtgctgtcctgcttaattcttaatggaaattccatccccggcgccggccctagctggctcagggagtccaggcttgggccaacagcaaactccaccagagagactgggcctgtctggctatataaacacacctaaacacatatatacatgtgtgtatacacacaccagcagcaagacatgctcagagacatttacaaactcagatattctcatccagacacatccagacacaaagataatatacattctaatcattaacatttattgcatatacgagaacttcataggtatcaattgctctaatccttagaacagtactaggttctggtattatccctattttacacatgaagaaactgaggcccagggagggcctcagtaagtaacttacccaagacattgataataacagcctaacacatgagcaccaggaactgtgctaagaagcttatgtgcatgtttcattttgctgccatagtaaccttttataaaagttattattatccccataatacagacacagaaaagggaggccaggtggtttaaatcacctgtctgtggcctcacagctggtgagatggagactctacacaaatacacatgggaatccttatggatgcacagaaagacacacaggtaaagacacatgcacatgctcagaggtgtacccacaaatagcttatttcacctaaaccaaagtaggcgcctcaggactggtccagagctgtatcaggcaaaggtcccctccagcctgactccacattcttctcctgtccagatggcctatcccagatccaccagcttcacacatcactttaggaaggacaagttcagacctaaatggaggaaagacttcaggtttacactgcagtctgccaggttcatagtcaacccccagcctcagctccaaattgttcccccagtattccctagatagtcactgaaagaagcctcagctacactcttctgaagggatcgcacttccaaggagggagcacctccgaggctctgagcactgaccagcctccaatgctaggatcctgtccttcaggcccagatgaatataaacagggcccttgggacaaggcctggcacaggagcccaagcattgggtagagcagagcacgtgttgcccgagggagttgaagttatactgtaggaagatggcaaaaccctggtggaacgagaggagacagggattggggccaggccactccaccctctcctgcatttgttccaccacatacttcttgtggcttattggccacgtaggggagggcagaaaagtccttttccttttgggacaggcaatgaagtcctgagtccagagagttgagaggacagacatgcaggagagatccaaagagttcagtccgccaggagcttatccactgcttgaagttgccatgctatgctaggtatctccaaggggcaggatgtgtgctggcctcaggcctccttctaagcagccacaatagaaagtgcctaagaaggcctgttatagccagggtagtctctattgtctcttgtgatttcccctatccccaacccagaattccccaactgtttctgttgtcacaagctcatccaccctgtagtcagagaacatagcccagcatggcagtcccatggggcaccagcattggaagagttttttgagggaggagtgcttaatctccacaaatgaataaggaatcatggtgattcaggcaatagctctaagatggggagatattctgagctgaagaatttgcatttctaaaaagttcccaggtgatgttgatactactgatctggagatcatgctttgagaaccactact

SEQ ID NO: 914830 - DNA, 4001 bp, Homo sapiens
aaggaaggaaggaaggagggagggagggagggagggagggagggagggagggagggagggggagagagagagagagagagagagagagagaaagaaagaaagaaagaaagaaagaaagaaagaaagaaagaaaagaaagaaaagaaaagaaaggaaggaagaaaaaaagaaagaatggaaggaaggaaggaaggaaaagagagaaagagaaggaaggaagaaaggaagggaaggaaggaagctcaataccatctttctaacttcccagctgaaagagcacatttagtctgggtacctcactgaagtattcagaagagaatagccaggatgggacaggtctagaagctctactaagaagaataacaccaccactcagctggtattttagggcacctactcttccaagcgctgtatagtgtgtgcccagtggtcaccagggggaggaggtcatggagaagattctgtccagaaaaaaagataaccactggaagaaaggaaaggagcagagcaaatgccatccctccaccagcctgtgggagggagactcaaagtagggttgaacgaaaccaaagaagagaaagaatcaacccagctcaattcactgtcctccctgccaaatggttgccttgggacccaacccagaaaggtcactgcttctctgcagcaagtgtaatccagagtataaactacagcatggagcaaattatatatgctgagctccatgtcagatcccagcctgacctggcttgccttccaaaggcagtgtttggaagttttcacttctaaaagggcgaacagtgcttctaagtcccagagctaaagggacaagatgctctctggctgagctccatggacagcctcagtttcagattcaatggaacccctcaaaggcaccacatcaccatctgccctgacccccacagccaaagtccctgacttaaaatattccccactgaggccagtttcttggacccattgtcagaggtataatatatagattaaaaggggcaaaagtgggaggaggctagcggctgagggtggggccacaccagggatacatttgcgcatatgcattgaacaaagtgggtgcatgttgcatacatgtcgttgtccacaggtatacatgttgaaagtgtgaatggttgcatggctatcctgagaagagtgtgtgcaagactggtgcacatggacaggaatgtgtgtatgctgagcatgtaagcgtgggtgcactgcgagtgtttgtgggtggccatggccatatggtccactcatcccctggcctcctgtctcttctcctggtttaagagtggggtctcccaagctgtctccctgaccctggtctagccagatggggttagtcagagccacattcactccagtgttgtgtgagggctctgagcttctgtccttctccaagccctgagaaaccaaagctgaatgacccacagagaagacaccccagctgggacaagtcaggtcaccttagaaagcctgagttcagataacactccctagccccaatttctgccttcctgggttcacactggcacatccactcatccacatgtggactggctcagcccacctgggggccttcctgccacacacacaggcatttccacaggtacagacacagtgcacccagggcagcaggtgccacacaggcaaatacctgtggcccactccaggccaccacacactctgacacactcgttcacccacactcgcaccctggggcacatgctagaaaattccacatgtggacatcccatccagacacactccctcacactggcgcaagctccccttcacaagcactcccactgacacacttacacctactatccaattagtgacaaacctgcactgttcccaactaggctagcagaggcatcaccagccccctgaatccagctaggggagctgtctacttacttagcgtgcgagacaggctggtagtgcgagcggccagtggtggcggggcgcagctggagctccagaggccgcgcgcaaagtggccgctctgccggcccagcccgagaggccgcccctggcccccgccccaccccccgccccgttctcccccgcccgccctctccgaggcggtcgcagcctcccaaggaccttccacagcagcgcgctccctgccaagccttggtcccgcgtcagccacggctgcctgctgtctccgcgggactacgaggctatttcggtgcccctggggggggaaacatggccctccctcccatctgcaggagcgctggaatggggacgcggtcaggcctaattagagaccgggctcccccgggccaggcggcaggcaccagggtgatcgcccgggagccgcgaagccgtccaggcggggtcgcccacaaggtgccccgcatgccaacatctggagaggggaagggaatgtgccgcgatcgtttcccttggagctgaaacaaaacaaggagggatttgggtgcagttcacttgctaggaaggaggaagccacccagctttgatagaccccaaacgcctagaatgagacggtttattcaccgcaggtgcttccctctggaaccttgctcacacacacctaagtcaccctccacatcttggacctgccaaaaatgacgaggggttgttgcagaaactccttctaacttcggcacataagatcagaccccaccccccaccccccacccccgtcctggactctgtcaaatagctaaatctagaggaacttgattcctacccaaaagctcgggaatgtggcatttttgacctggaagaaagcttccagatcatttcatacaactccccctcccccgcctccgccatcttgctatgaggctcccagagcccagagaatcttgacctattcttggaggtcctcaagcaaaggcagcccctggtctcccttgagccctgttccaaagcttgaactctcttactgacagaaagatctccttgacatctaacctaaatctctcacatgcaaactatgtcaatttgctcacaatatgtattcagggagaaggagctcaactcagtccccatgacaaaacgaccacgccgaggtcccactgcagccttctcttccttaatgctaataatctctatttcttttttcaggctctggctgaagctaactgctgctccctggactcgaacacacacagtagctctctgatattaactctcctcctcagctctctgggggcccagggctcagaaggtggccaaatcattcctctcagacaagccagcttcaactctaccctccagtcatccagaacagcctgattctactccccaagttccctgagaggggcctcagttcctgtttcaacaagtgctgtctagggctggggacagggcttggtgccgcctggctgggcattaccactgaaaccacagtcttacagactgtttgcagaatcttctctctgagtctgtttccggtagggcaggtggtatgataagaatagtctcagccgggagtggtggctcacgcctgtaatcccagctctttgggaggccaaggtggatagatcacaaagtccggagattaagtccatcctggccgacatggtgaaaccccatctctactaataatacaaaaattaactgggcgagttgtcatgtgcctgttaccccagctactcaggaggctgaggcaagagaatagcttgaaccaatgagtcggaggttgcagtgagccagtgagccaagattgtgccactgcacatcagcctggcaacagagtgagattgcatcaaaaaagaaagagagagagagagagacagaaagaaagaaagaaagaaagaaagagagagagagaaaagaaagaaagaggaaggaaggaagaaaggaagggagggaagagagggaaggaaaggaagggaaggaaagaagtctccaattcttcctcaaagaaacctgttttgcatcctgcctctactactttctagtgatgagtccttggacaaatcacttaacctctctgagcatca
